United States Patent Application Publication US 2022/0290142 A1 - sequence listing, part 9

SEQ ID NO: 12249 - DNA, 1396 bp, Homo sapiens
atgacctccgagttcttcgctgcccagctccgggcccagatctctgacgacaccactcacccgatctcctactacaagcccgagttctacacgccggatgacgggggcactgctcacctgtctgtcgtcgcagaggacggcagtgctgtgtccgccaccagcaccatcaacctctagtaggggctgctgggccgcctgggtgggaaagggccaggggcgggtggcccagggactgcccacttatccagtaaggtggctccgtcacctcttttcctggtgggaaactgaggcccaaccttggtagcttatcctgggcctctcagtgagtatgtttgagcctcagtgggtggatagggaccaggctgggccaggcaaggtcgggcactgtctgacctggctgggcggtagctttggctccaaggtccgctccccggtcagcgggatcctgttcaataatgaaatggacgacttcagctctcccagcatcaccaacgagtttggggtacccccctcacctgccaatttcatccagccaggtatggggtggaggtccgggggtgggggactggggtggagaggggcgggtgtcctgggcaggcagctgacgggcatccctgtcttctcccatcggccgcagggaagcagccgctctcgtccatgtgcccgacgatcatggtgggccaggacggccaggtccggatggtggtgggagctgctgggggcacacagatcaccacggccactgcactggtatgtgtcacaccttttctccctggccgtgcccaccctgcacagcccccaagccatgctgatcacactcccatgccccaggccatcatctacaacctctggttcggctatgacgtgaagcgggccgtggaggagccccggctgcacaaccagcttctgcccaacgtcacgacagtggagagaaacattgaccaggtgggccgggggttggagaaactgagtcaaggtgtggggccccagggcatcctgggctggaggcctggatcatcacagagtggacaatggttggtgtcctctctctagtgcctgggccatctggagcccctgtgccatgagggccaagccccctgctccagtgagacccagcaggccccaacctgctcttcctgatgacctggcccgaaatggcaccacctgggctgaggcctgtgaccacacagatgtggttcaggtggcatctggagccctgctcaggcttcccctctcctcccacccccaggcagtgactgcagccctggagacccggcaccatcacacccagatcgcgtccaccttcatcgctgtggtgcaagccatcgtccgcacggctggtggctgggcagctgcctcggactccaggaaaggcggggagcctgccggctactga

SEQ ID NO: 12250 - DNA, 657 bp, Homo sapiens
atgacctccgagttcttcgctgcccagctccgggcccagatctctgacgacaccactcacccgatctcctactacaagcccgagttctacacgccggatgacgggggcactgctcacctgtctgtcgtcgcagaggacggcagtgctgtgtccgccaccagcaccatcaacctctactttggctccaaggtccgctccccggtcagcgggatcctgttcaataatgaaatggacgacttcagctctcccagcatcaccaacgagtttggggtacccccctcacctgccaatttcatccagccagggaagcagccgctctcgtccatgtgcccgacgatcatggtgggccaggacggccagcccccaagccatgctgatcacactcccatgccccaggccatcatctacaacctctggttcggctatgacgtgaagcgggccgtggaggagccccggctgcacaaccagcttctgcccaacgtcacgacagtggagagaaacattgaccaggcagtgactgcagccctggagacccggcaccatcacacccagatcgcgtccaccttcatcgctgtggtgcaagccatcgtccgcacggctggtggctgggcagctgcctcggactccaggaaaggcggggagcctgccggctactga

SEQ ID NO: 12251 - DNA, 20294 bp, Homo sapiens
ggtcagagctttaagctgcagctctgatgccccagggacctctcagacccccctgcccagagcaggcagcccggtaagccctcctcctcttcccctgcagcctcagggctggagccacagctgggagggctcccagatcctgaccatatcctcccagaggctgagccaggcctgggcactgtcccctcaaatgtgagaatactgggcagggggaggggagaaaggagggaatggagggctgagcctggaggcatgaaaggggcaacctaggcagcggtatgggggagtgctcagagcttagagtcctgtggaaggcagagaactgccccagcccctgcctctcatcccccaccctctgtgtccctggccgagaggttcctggaggacatttttccagcaaaagagggagggtggtgtctgggcctagatccttggatgggcttttctctgcctgcttgtggggtgcctagggcgagtgggcttttggagacaatttctggcctaacctgacttggacagcagcccccagaggcacagctctcccctcaggcatgggggcatgattccacctcgctagcccacatgtgttcttcacggagggctgctggcccgtctccctggggttaccctgagcagcagagctgtgtttgttgagactccatggggtggagggattgcgatgttgtcctctcagttcccggggctgatgtggaagctcaagggcttgccctggattcttcagggtagccctgccatccctagtgagtcagtgagttgggaggttgggggctggagaatcaggtagggaggacacagctagacctcaggccctgatgggaacgtactaggctccaagtgggacctgccaggagacaagaattgatgacagccacacctttggagtctcaagccctctgccacccatgcggtggcctagttcaaatgacaggaacacaaggtccagctggcccaatgggcaggtagagggctgcagccagggctggaactggccttgcactgcctctgggcccttctctacccacccagtagtattgttcaagcccaggagggaaaaaggccagctcagggttaatgttacctcagcaagtagctgagtggcactgagcctcctggtagccactgtaaagaaggacacagaatggtttgggggcattcgctaggaggaaggaagcagatggatactctatggagacagaatgtcctctgtgtttgctctacaggaacgggttgtcaaccttctgcagggccaggaattgtcatgaggctgtagtaggcagcagagcttggcggggtgaggcgagatcacaggtataggctcagggcctggattcaaatcccctgggctgccacttgttggatgtgtaaccataggcagagtaaggacctgccatagcaaattaccacaaactcagtggcttaaagcaacagaatagttctggaggctaaaagtctgaaatccaagtataggccaagccacactccctttgaggactccaggggaagatccttccttgtctcttcagcttctggtggctcctggcaatccttggccttccttggctgctgctgcatcactccagtctctgaaaccatctaccctatgtgtctgtgtggccttcacatggcattccttatttttgcagtggggtctcactatgttgcccaggctggtcttgaactcctgggtccaagcagtcctcctgcttcagcctcccaagtagctgggattatgagtgagtgccaccatgcccggctcacatggcctccttgtaataacgctagtgcctgggtgcggtggctcacgcctgtaatcccagcacttttggaggctgcggtggacggaccatgaggtcaggaaattgaggccatcctgtccaacatggtgaaaccctgtctctactaaaatacaaaaaaaaaaaaaaaaaaaaattagcctggtgtggtgacacatgcctgtagtcccagctacttgggaggctgagacaggggaatcgcttgaacccgggacgcagaagttgcagtgagctgagattgcgtggtgacttcactccagcctggtgacagagcgagactctgtctcaaaaaaaaaaaaaaaaaaaaaagaactgaagctactggatttagggctcattcattctttttttaattttaatttttttttttttttgagacagtctcactctgttagcccaggctggagtgcaatggcatgatcttggctcactgcaacctccacctcccaggttcaagcgattctcctgcctcagccttccaagtagctgggattacaggtgcccgccaccacgcccagctaatttttgtatttttagtagagacagcgtttcaccatattggtcaggctggtcttgaactcctgacctcaggtgatccacccctgtcagcctcccagtgttgggattacaggcgtgagccactgtgcccaacagggctcattcattctaatcccgtatgatctcatcttaactaattacttatgtagagactctatttccaaataaggtcgtgtgaggaaaaaccaactcaaactgtgttttttggcctggcgtggtggctcacacctataattccagcactttggggaggctaaggtgggcggatcacttgaggctaggagtttgagaccagcctggccaacatagcaaaaccccatcttcactaaaaaatacaaaacaaaaattagctgggtatggtggcatgtgccagtagtcccagctactcaggaggctgaggcaggagaatcgcttgaacctaggaggcggaggtttcagtgagccgagatagcaccacggcattccagcctgggtgacagagtgagactccatctcaaaaacacacacacacacacacacacaaaacaactgtgtttcgcctctgttctcacaagacaataatcatcacagaagacttcttgtaaccaaatttgtggattctcccacacacccagcaagaatcaattctgcagcagactccagctggtgtcttccaattcaactcaattctggtgctgtctacctggagatggcctcagaaaccacaggttgagggcttggtcccacaagaccaacccccatcccaccagtcacaagtctgggcattgggaacatctgactaactggcttctagttggggttccaaggccccctctttgggttcaattaatttgctagagtagctcacacaactcagggagacctgtttatcggtttatttcaaaggatgttttattttattttctcctcagacatactttatcatcccttaaagtcagtagctcaaaggaaactttaaaagctataaataggccgggcacggtggctcacgcctgtaatcccagcactttgggaggtcgaggcaggtggatcacttgaggtcaggagttggagaccagcctggccaacatggtgaaactccatctctactaaaagtacaaaataagctgggtgtggtggcaggagcctgtaatcccagctacttgggaggctgaggcaggagaatcatcggttgaacccgaggggtgcaagttgcagtgagccaagatcacacctctgcactctagcatgggcaacagagcgagactgagactccgtctcaaaaaaaaaaaaaaaaaaaaagataaaggctacaaataaacagtcagatgaagagatacatagggtaaagactggaagactcctaagtacagaagtttctgtcctggtagagctggacacatggatgagttggttttttttgttgttgcccaggctggagtacagtggcactatctcagctcactgcagcctctgcctcccgtgctcaagtgatcctcccccctcagcctcccaagtagctgggaccacaggcatgtgccactatgcccagctaacttttttatttttgtagagatggggtctctctattttgcccaggctggtcgtgaactcctgggctcaagccatccacccacctcgccctcccaaagcgctgggattataggcatgagccactgcacctggccatggatgagttcttgttccccttcctgtcagcctccacatgaaactccccaaaccctgtcctcttgggccttttttaaaaaaattaattaagaaattaaagacagggtctctctatgtttcccaggctgctcttgaactcctagtctcaagtgatccacccacctcgtcctcccatagtgctgggattacaagattagagatgccagctgtcaggtggctaggtggattcagtgtaaagtcctagaagatgcattttagtaaaaacagctagccacctgacagctggcatccatccattcagtgaagattgttgggcactgtggatactgtggaggaggcagcagtcgcagccggcctgcagagtgagatgcagtgccagagggcttcaggaggaggtggcattgtgattgatgtctgaagagtgtctccatgataatggagtcagtgcaaagtcccaaagactgggaaggagcaagaggaaaggatagctcatatccagctgccccactccaaaaaaaaaaaaaaaaagaggaaaggacgggcaccagcaaggtaggacaaggggggcctctggagtgttttcttctcagttggggaggggtgtgctcagatttgcatgccaagtgcctgggctgcagtagggaaacagcagaggggctgggacctgtgattgggagtctccaggtgagagggttggcctatggggactggaggtcaggtgaggctggtagtgggttatagaggtgggagcagctggacaggcccagtgaggatgcaggggtagctgcccagggctagactctggctgctctggtggcagttgcttagctcaggcttgggcacgtccacctggcgcatctgaaacattagccagcagggcgcagactcgtcagtgagagcattcctgagcccagcatccaagaagcgagggaggtcgggaaggtgctgctatgaggcagggggaggtccccaaaagtccaggtgagagcatggcatgcgtggaaagtgctgcgcagttttggcatcagtgaagtcacagggggctgtgggtgaacaggtgtgcttgggcatgtcaccagggaggccttgagacaggagcgggttggctttcctggagatcaggctgtggcatggtgtcgggactggggcatggacagtcttcctccacccccatcccctccttggagctttcagacactgcagataattaccaggtgatgtgataaatactacctgtggagggtgccttgggcagggaggacagggcggccaggaggggggccctttgggcccctgctctgagctgctcatcaggaaaggggagaagctcctacaggcctggtgttggagcctagccagaccctgtgaggccttgaaagtaggaggtgcattgtctgtgcattgtcatctcaaggaatccacccagcaactgttctagttatccctgctctctaggtaggagactgaggctaggaagggaaaggctgctgtgatacccacactatcagtggctggggttgagtttaaacccagggactctagggcccatgcctctgccatcctgcctctgagttttggagctggacttgttccatcaagtgccaggccagccctgctgctgggtgctcccaggcattcacaagctgacaattctgaagggcccacgcacttggccatgcttcagtctgtgtcctgacatcacaggtgggtgctggaataacaaatgctacaaatggcactgggggtgttggccaggctctgggggcacaggagttctgcccatgcccacagctggcctgtgctgacctccctccatcacagctgagtagcaccagcacttccattgagctgaagtcttcctcccattccttcagtgtggtctttgtggctcagagaggctgtggccaggtacaggatctggagtggcccctgcttctctgctctgtgaccttagacagtgggcaggatctgaggccaggcccacctgcagcaggtgttacaaagaggcaaattggcgcttaatgttggtaagaacttgccagccaaccagagtcccactatctttggaggtagtgagctccccattggggaaggtatgtaagccaacctttctgggatgctggaagatcagagagcaaacacttgagattctgtgatcctaatattgaatccaatgctatgatgtttggatttgaagtcagttctatttagccagtttaccaagtgtctccttggtgcaggacaccaggagacacaaaatgtcctggataatattgggtttctggctcccaggggtccctgagatgttgttccagcggttctggagtatgggccaggcaccgcttgcatctggaccgatccgcattgttcgatcattgtgagcctcatgatggcagttcgggatgtcatgcccccatgcgccccccaaccccaccccgccatggccctcaccatggcccactcagggcatgaggctttctgggtgattgctggtattcagtgttgtcagcttcttggacctgtcagtgggggtggggctgcaatgagatgccagttgcaggaagtggtttgcacagccttcctggtgtcatgggtcactctcttgccgagtggctttgggcaggtcccttcccctctcaggctgcaggttcctatgccaggagctcccttcttgccccaccagggccttgttttcccagatacagaggtggggcagatcccagcccgttgaaacagactgggctttggaggccacagtgggcccatttctcagagggactgtgtggctggatgctgagccaggcactggactggccctttgagcctcctgtctggccaaggcccctgaggcactgtgggctgctggtgccagcacacaagggtgataaggagatgaaagtcactaggatggtggggcggcacccgccccgggctgtgttggcagctgcccctggctggaggccagcttggccctggaaccctcctcaaggaacaaggacacaaaagagccagctcagccagcctctacctagcaccccaatcagcactcccttcttcccatgacccctaccctctgcccagctcctgtaactggccaaggagctaatggacacccaccagggtcttaatgagtgagccagggttaatgggttactgggcccggtgacacattcaccagcctcccagggctctcaaagtccacactggcctggccttgaacgtcttagctcggccacctccttttccagctttgacacctcggggctcaggacgggcctagggtggtcaagaggtcccctgcagccctcacttcctggaaaaggctccatttcctggccttcaggctcaggtggttccttccgcctggcaggtcctccccaaatccaatcccagctcgggctggattcccaaggcccctattctggtgtctgccccttccctagggctcttccccctggggtgaccatactctcatgcccagccaggtcagggctccttgagagaagaatctggaggggccaggatttgatgggagaatgaatgatggaatgaaagaaggaacgtaagcgtgagccttgctaagagtgacaatactggcaggctgcagaccatgtgtggacctcgatctgagggcttagaggcttcggcctgccagcgctgtgggggcacccaccccatctcattgaatggggcagagcaggtgagggcatgagatggacagatgggcctcatccccctgcttccgttgcctggggtcctcggtcagcctgtttgctcagacccctgaaattgggggtcaaggaaggaccctcctggattatgtgactcccttcagtccaggtgaccagggtccttggagtgacagctcctagagccccacctgtagtcctgcaagctggggagagggcctgttaggagaggcatcccctgccctggggttgtagaggtgaactaggctcctcagaccttgtggggcctcagatgcttacatctccagcccctcctggcgtgggcatctggctgcagcccagctctgtggccccatctcccagggaacctttggtctaatctgcctcccgctgaaacccagcctcattcagccccaccgaggctttcagagttcaggtctctcattcagggtttgagaccccaccgggctcagagacacctgcagcctgcagcggtcccagatcacagcctcagggatgggaccaggagccagcccacatcccacctgcagcagttcctgtgcctttaaagcctcccctccccccgccccgcccccaggccactaggggagggaaggaggagctgggtcacagcagggaatcttagcttggttttggtgtgctgctggatgaccagaccgggcgtcgggtgagcccagaagtgagagcagttggctgtgccccagtgctgtgtgacccagaggcgccgctcaccctctctgagctggtggacatcataggtggggaagctcaggtcagggcactcccatgagtgtctggaggcctgagtcccattctcagctctgccatatgcttgctgcgctctagaggagttcctcttcctctccaagcctcggtttatgtacccgtgcagtgggagtgagttgcacttcggggtgaagggggcaagacttgtgtgggcgcatcctgcagaaggatcccacaggtgggcagagccctgggttctttatccgactgggtctgggctgggggcctctgtttcttggctgatgagtttatgtgagtttgagtgaggtatgcgagtgggtgaaggagggctggggggagtcacctgacttgtgcgaagaagctcttgagagagccgtggcttcttggaattaagaggaaagagtgcagcatgaacagacaggccctggaggatctggcagccctgagtgggggcggggggtcagctctggagtagagccagagctgtgatggggttgggggaccctgtgtccttgggccatgcttgcctcgctcctgggttctgtttgtggctgtggattggggtggggcagggccggttgtgcgaggggtcattgcccaactccagggggcgcctgccacctctcagctatatatatagggatatatatagttctttcgacaggtttccagcaggtagtggttattaaatcttactgaaggggtgttttttctgattctcggctctgtgccgcaagggtggaaactgtgagagacagattccaactccacgtctgggtagtaagcatccagtccagggctgtaggcagtcctggggaagacgccagagatctgtgcattctcatatcgagggatagcgactccaggctgggggctggcagggtaaggggtgggtgggtcctgggcttacccgcaggtctgcagacttcctggggccagctgacctcgtaaaatcccttttgtctaagcttcagtttcctgcctgtgaatggggttggggctgtgctctggtttcacccttgtggctctggggttgtggtgacaaagccatcaagctgggttgaaggattaaccaggaaacttcagactggctgccgtgtctacctcttcctcatactcctctctctgctgcatcctgggaagctgctctgctcagcctaaatgaggctcagttgtgtgtgtgcgcacgtgcttgcacgtgtgttggaagtgggtgatactgacaccagagtctgtgtctctgggtgagtgaggcttgcacatttctcgggacagggaactcactaccttatgtgcccaggacaagagctgtggggtctggagaagacttctaggccagcccctgcagtccttcctcaggtgacatggcttccccagacccacttccccctaggtgccctctctgcattcagggggtagagggctgactgggacagaatgtgacacactcagcatgtgaggaaaagcctccttcattctgtaggccctacctctattaacatgtcctttgataaagtgcctcccctcctgtctcccctctctggaatcctcagctgctgccaggcttcagctgtgccccattgaaggcagctctgtctccctactttccccagcccagggttttccttttggggtcagctgcagggatctgggccatcctttgcccactcagactttctttctgcccacctgctgctgtgaatcctgtatgtcatatatatatataaaatatgtaatatattatatattatatgtaatatataatatataaagtatattatataatatgtattatattatatattatataatatgtaatatattatataatatataatatgtattatattatatattatataatatgtaatatattatataatatataatatgtattatattatatattatataatatgtattatattatatattatataatatgtattatatattatataatatgtattatatattatataatatgtattatatattatataatatgtattatatattatataatatgtattatatattatataatatgtattatatattatataatattataatatgtattatatattatataatattatataatatgtattatatattatataacaatatataatgtgtattatatataatataatattatataatgtgtattatatattatataatattatataatgtgtattatatattatataatattatataatgtgtattatatattatataatattatataatgtgtattatatatataatattatataatgtgtattatatatataatattatataatgtgtattatatatataatattatataatgtgtattatatatttaatattatataatgtgtattatatatttaatattatataatgtgtattatatattatataatattatataatgtgtattatatattatataatattatataatgtgtattatatattatataatatatgatgtgtattatatattatatattatatgatgtgtattatatattatataatatatgatgtgtattatatattatataatatatgatgtgtattatatattatataatattatatgatgtgtattatatattatatataatatataatattatatataatatattacatataatatatcatatattatatttatataatttatataatatatcatatattatatttatataatttatataatatatcatatattatatttatataatttatataatatatcatatattatatttatataatttatataatatatcatataaatatattatatatagtattatatatataaaattatactttaagttctagggtacatgtgcacaacgtacaggtttgttacatatgtatacatgtgccatgttggtgtgctgcacccattaacttgtcatttacattaggtatatctcctaatgctatccctccccgttcccctcaccccacaacaggccccagtgtgtgatgttccccttcctgtgtccaagtgttctcattgtttaattccaacctatgagtgagaacatgcatgtcttatatgctctcaggcagagaggaaactgctgagcaggccggggcaggggacagagccctgtggctctccactttagacccctcctggctgactgccatggaatgcagccacttagcagggccaaatcccctgatgttcctgttggctgtctagccttcagggacaggtcatgggaccttggttcctgccctgtcatcttcccagtcaccctgatcttcacggggaggaatagcctgggaaaggacttggtcacagcacctccaccctagggctattgaggatctcacagttgtgtgtctggtgggttctgtccagagcccatttgagagcagtggatgacaggacaggcctatgtgacccaggcaggcagcaatattgggtcagccttcatgtccccttctgtcagctggggcagcctggaagcatgattgtggggtaggtgttatgggcacggaatagacctcaggtggaggctgcaggggctctccggcaccgtagacacagcaggcccaggagcaggggagggagccatgactcagggagactctggcccatatccttggcagatgagggccacaggggaatgggcagcactgtccaaagtcccctgggctgggtccgcagctgttcctggctcagacttcttggtgggctggtcagaaacatgcagtaacttggggcagttaccaggtggccaagcctgcactgctgggctctgtgagcttgggccagctcaggccctctctgggccctgcctttctgggctgttcgggtggttccttgggcctggggtgctaatgtttctggatgggcagcagaaccagtctgcactcagggccccaggccatgttcccggaacacacctttagcattgacagcagcgtgtggtgaggccccttaggctgggttctggtctagtgccaggggcaccactactccaccgcctccagagccatctctgggacactggctgtgagttcagatgttctgaacagggacagggagagccagagggaaccagcctggggctcactggaggggctcgtgggcagacagcgccctttggagggaactgagtctgaaaggaaggaaaccctttccccggctcatagcacctgccatccagggccctcccagggctgcgtgaactttagtcacgtggtgacaggccgagtcaccatgccaagtcactgtgcgcctccttgctgctgtgacgtcagcttccccatcctcccagccaggctggacctccgtgagaggcctgcctgtcctgcaccctgtgcagatgcctcccactgtccgccggggctgctgggcacgccctggctggtctcttggactaggtaagctcatgagtcctctggccgctcctgctccttccctgcctctgctcctcctcggaggtggccacccccagatcccagtcccaattcggaggccccctgaggagtgctgcagggggccacaggcgtggctctgagccactctggagagtggcggggggcccagccagttctgtggctgggactttcccaggcagacaagtctgtctcttcctccccagcgggtgcagcccagaactgtcttctgaggaagaggtgctctcctgggcccccactgtccccaggcctcaggtaagcccatcagggtcccaaggaagggggtctgggtttgaggccaaccatggcagctgacctactttctagcctcagtttcccctagtgtgtgcagctctcacgctgtttgggtgagaaccaggcctctgggcttggacattctttcagtgagtttttagggtggagggatgggaaatggaagcccaggacctcagcagggtgtcttcctccgatccggggacatctgcctgtgggaggctgggcccaccctcccttgctgacctgccctgggaggaagggacagggcccagcactgcctactcccctccctgttcttcccagcagtctgagcctggctgggtgtcccctgctcctccagcagcctacttgggcctttgggtagacagattaacagacaggcgaggctgggtcatggttggaccaccccaggaccctgaccgggggctcagctcatgaccctgagcctgggagagatgaggccatgccctccagggcactcagcatgacccggcccagtggacgggactgggtagcttccttggtgcagggggctgtcatgctaggacggggtcactgaccaggccaggcccctgccccatgacttgtggtggaaatgtccttttgtttttgtttttttgcattttttttgagacggagtttcactcttgttgcccaggctggagtgcagtggtgcaatcttgcctcactgcaacctccacctcctgggttcaagcaattctcctgcctcagctcctgagtagctgggattacaggcacctgccaccatgcctggctaattttttgtatttttagtggagatgggggtttcaccatgttggccaggctgttctcaaactcttcacctcaggtgatccacctgcctctgcctcccaaagtgctgggattataggtgtgagccactgcacccggccatgtgatgggaatgttctgtgtccataatagatgctgcatattgctggcccagctcctgaggctctttggacctccaggaatcggtgtctctatcaggaacccttaaccctgacccggactcccagctgggacccggggtgtcggagtggcaagagcgctgtcaggcctggtgaagggtgtgagctgtccaacggggcagggaggaggcagggcctgttctgcagttggacagacagagccctctagctgctttctggaagactgaagggcaggtgatgttggagggagggagtgcaggcaggggctgtgagggagttcaggtcagaaacaggtggcgcctggattcaggctgtggtggtcacggtggggatgaggggctgctttggattgtgctggggatgtggggtggtgcgctgctgcatgactactgccaggtctctctgctcttagtgtctgcatccagggctgggagggggtcaaatgaatcacactatcggccccaggcccaccaagcctggggaggtggccacccttccatgatggcatttggatgttccctgtgtgtggggagggcacagggactccattcgtagaccacctctgggacagtgtgtctgcctctgaggtcagacgctctgcactgggacagggtggagtggagggaaatccagcttggggctcattggaggggcttgctggcagacaccgccctttgtgggaaactgactgtgggagaggggaaccccaacctctgtcaccacatccctcttccctgttgtcacacctgtcacctgctgccatagccatgagacttcccaagggtcactgctgccactcactgcacagcctggaagggagtccacaggggacatacagtgagcaagagacctgtgccactcaggcctcctgggggtgtccccagtgcagccatgatgataatcacagctaccattcaccaagccctgcccacagtctaacctactctattcacaacactcccagcagcaaggcaagtgaggtgctgccgtcatccaggctggacagttcagtgatttgcctgaggccccacagcaggtgagtggcaagtccagcatcagagcagggcaggctggcggtgccccctgagccccctttgccatgctgaccacatgcacatcctgggcttctgcaggaatgccctgtcccctacctgccctgctccgtgcaaaaccctctttgagctgtgcctgggagacatgctgagagaattcatggaaacaaatgtgttactgacagcctctttgcctccagagttcaactggagacagagaaaccagctagaggcagagggaggtaacacggagtcccccagaaaggtctgggctgcgcgtgcttcaggtaacctcccttgaccttcaggagaacgagaaggctgcctgatcagagagtccctgaagaagattctgtggctacaggcttcagcagagtgtgagggagaccccggttatttcctcagctatttccaccaaatcctcctgtctttcgtggccaacaccccaggcaaggcttggggcccccgtctgctgctggacggtaagtcctggccccgtggcagtgaatctgtggggcgctctgattgtgggcactatggaagctaaaccccatgctccaggtggggtggagggtcttcagaggactcctggacagtgccaggctctaggctggggtgggggacacaggagaaaccaggccaggcccatccctactggagcttctccctaagcagtggaggctcagccactgtaaggaggtaggcaaggccctgcagaaagaggggtgtggaaatctgggggctcccaggaagggccgctgctggagatggggttcttaccaggatgggctctgaagataagcagggaggatttgggagggcagagatgaggcccagagcttctggcagagggcatggcctgcgcaaaggtctgggggccggacagcctgcacgtattctgggaagcgggaaggagacacaggccttgtgtttctgaggcccgactttagactgtgccctgttggggaggggccagggaatgtctgaggctaggcctgaccctgcttcttaccccgtgggtgcagcagagccatgaagaagaagttagtggtgctgggcctgctggccgtggtcctggtgctggtcattgtcggcctctgtctctggctgccctcagcctccaaggaacctgacaaccatgtgtacaccagggctgccgtggccgcggatgccaagcagtgctcgaagattgggaggtgagcagggcagggcatgggacatgggccctgaaaactgggcaagtggacctgagcaataccttcacccccctgagactcagtttccccatgtgtaagcttcgcttggactctctcagtagcctttgggaaggggacagtgactccgagagcagggtgtgggtctctagagccaaacagggccccttttctcagttctaagagtctctgtctctttggaataaactgcactgttttgttgtttggttgttatttttacttatttcttcctatctatctatctatctatctatctatcatctatctatctatctatctatctatctatctatctatctatctatctatctatctactatctatctatctatttatttagagatggagttttgctctgttgccaggctggagtgcagtggtgcaatctcagttaactgcaacctccgcctcccaagttcaagtgattctcatgcctaagtctcccaagtagctgggattacaggcgtgcgccaccacgcccaacaaatttgtgtgtgtgtgtgtgtgtgtgtgtgtgtgtgtgtgtgtgtgtgtgtttccaagacagagtatcgctctgttacccaggctggagggcagtggtgcaatcttggcttactgcaacctccacctcccaggttcaagtgattctcctgcctcagcctccacagtagctgagactacaggcatgtgccaccatgcccagctaatttttgtatttttagtagagacagggttttgctatgttggccaggctggtcttgaactcctgaccttgtgatcctcccacctctgcctctcaaagtgctgggattaaggtgtgagccactgctcctggcctaattatggtgtttttagtagagatggggtttcaccatgttggtcaggctggtcttgaactcctgacctcaggtaatccacccacctgggcctcccaaagtgttgggattacaggtgtgagccaccacgcccggcttattctttttttttttttttttttttggttaggagacaatttctttctttctttttttttattttattttattattattatactttaagttttagggtacatgtgcacaatgtgcaggtttgttacatatgtacatatgtacacatgtgccatgttggtgtgctgcacccaccaactcatcatttagcattaggtatatctcccaatgccatccctcccccctccccccaaggaacactgttgcccaaacagggacatgaagggcttattcttttttgttgttgttttgttttgttttgttttttgagacggagtctcacgctgtctcccaggctggagtgcagtggcgcaatctcggctcgctgcaacctccgtctcctggattcaggtgattctcctgcctcagcctcctgagtagctgatattacaggcatccgccaccacgcccggctaatttttgtatttttagtagagacagggtttcaccataatggtctggctggtctcaaactcctgacctcaggtgatccgcctgccttggcctcccaaagtgctgggattacaggcatgagccaccatgcccggccgggcttattctttttttaaggtggagtcttactctgttacccaggctggagtataggggagcgatcatagcccactgcagcctcaaactcttgggtttaagtgatcttcccgcctcagcttcctaaagtgctgggattacaggtgtgagccatggtgcctggcttctactgttttattctattttagactcttatctcatgttatatacaaagatcagttccctcctaaagacttaaacagaaaaaatattatgtttttcatattttgagacagggtcttgttctgtcacccaggctggagtgcagtggcatgatcatagctcactgcagccttgaactcttgggcttaagcgatcctcccacctcagccccctgagtagctaggactacaggcgtgcatcacacctgactaattaaaaaagactgttttctagagatggtctcactctattgcccaggctggtcttgaactcctggcctcaagtgatcctccaccttggcctcccaaagtgctgagattacaggtgtaagccaccatctctagccgggaaaaaaaatgttattaataaagtatagcaatttccctttttgtcccagttataaaagtcatgtacatttgtttgcttgataaagaggaaactgtctgggcaaggtggtccacacctgtaatcccagcactttgggaggttgaggcgggcagaccacccgaggtcaggagttcgagaccagcctggccaacatggtgcactctgtccctactaaaaatataaaaagttagccgggcatggtggtgtgcgcctgtaatcccagctactcaggaggctgaggcaggggaatcacttgaacccaggaggcagaggttgcagtgagctaagatcatgccactgcactccagcctgggcaactgagtgaaactccctctcagaaaaaaaaaaagaaagaaaagaaaagaaaaagaggaaactgtaatcccagcactttgggaggttgaggcgataggattgctttagaccatgagttcgagaccagcttgggcaacatagaaagaccctatctctacaaaaaagacaaaaaattgccaggtgtggtggttcttacctgtagtcccagctactcagcagactgaagtgggaggattgcttgagcccaggaggtcaaagctgcattgagccaagactgtgccactgcacttcatcctgggtgacaaagtgagaccctgtctcataaaacaaaggctgggcacagtggctcatgcctgtaataccagcactttgggaggccaaggtgggtggatcacttgagcacaggagttcttgaccagcctgggcaacatgatgaaaccccatctctacaaaatacacaaacaaacaaaattggctgggcatggtggcatgtgcccatagtcccagctacttgggaggctgagatgggagggtcaattgagcccaggagactgaggctgcagtgatctgagatcacaccactgcactccagcctgagcaacaaagagagactttgtctcaaaaaaaaaaaaaaaaaaaaaaaaaaaaagaggccaaggcaggcggatcatgaggtcaagagatagagaccagcctggccaacatggtgaaaccccgtctctactaaaaatacaaaaattagctgggcgtggtggcatgcacctgtagtcccagctactcaggaggctgaggcaggagaatggcttgaacccgggaggcagaggttgcagtgagctgagatcgtgccactgcactccagcctggcaatagagcaagactccatctcaaaaaaaaaaaaaaaaagaaagaaagaaactaaaaacaaaaaccccaaaactcgaatggacttctcttccatcctcctttgggcaggtgggcagcagggtgtgtatgcggggccagggtggaagcctgcaggttctcatgcctttatgtgccacatggcagggatgcactgcgggacggtggctctgcggtggatgcagccattgcagccctgttgtgtgtggggctcatgaatgcccacagcatgggcatcgggggtggcctcttcctcaccatctacaacagcaccacacgtgagtgcctcgggagaggagagggagaggggcagggggtgtgggttgggccgaggcacagctgggcggtccccaggctcacgtggcataaagggtttgggtgggcgggcctgcctacctgcttctccttctaggaaaagctgaggtcatcaacgcccgcgaggtggcccccaggctggcctttgccaccatgttcaacag

SEQ ID NO: 12252 - DNA, 758 bp, Homo sapiens
ggtcagagctttaagctgcagctctgatgccccagggacctctcagacccccctgcccagagcaggcagcccgcgggtgcagcccagaactgtcttctgaggaagaggtgctctcctgggcccccactgtccccaggcctcagcagcaaggcaagtgaggtgctgccgtcatccaggctggacagttcagtgatttgcctgaggccccacagcaggagaacgagaaggctgcctgatcagagagtccctgaagaagattctgtggctacaggcttcagcagagtgtgagggagaccccggttatttcctcagctatttccaccaaatcctcctgtctttcgtggccaacaccccaggcaaggcttggggcccccgtctgctgctggacgcagagccatgaagaagaagttagtggtgctgggcctgctggccgtggtcctggtgctggtcattgtcggcctctgtctctggctgccctcagcctccaaggaacctgacaaccatgtgtacaccagggctgccgtggccgcggatgccaagcagtgctcgaagattgggagggatgcactgcgggacggtggctctgcggtggatgcagccattgcagccctgttgtgtgtggggctcatgaatgcccacagcatgggcatcgggggtggcctcttcctcaccatctacaacagcaccacacgaaaagctgaggtcatcaacgcccgcgaggtggcccccaggctggcctttgccaccatgttcaacag

SEQ ID NO: 12253 - DNA, 24988 bp, Homo sapiens
aggggagggaaggaggagctgggtcacagcagggaatcttagcttggttttggtgtgctgctggatgaccagaccgggcgtcgggtgagcccagaagtgagagcagttggctgtgccccagtgctgtgtgacccagaggcgccgctcaccctctctgagctggtggacatcataggtggggaagctcaggtcagggcactcccatgagtgtctggaggcctgagtcccattctcagctctgccatatgcttgctgcgctctagaggagttcctcttcctctccaagcctcggtttatgtacccgtgcagtgggagtgagttgcacttcggggtgaagggggcaagacttgtgtgggcgcatcctgcagaaggatcccacaggtgggcagagccctgggttctttatccgactgggtctgggctgggggcctctgtttcttggctgatgagtttatgtgagtttgagtgaggtatgcgagtgggtgaaggagggctggggggagtcacctgacttgtgcgaagaagctcttgagagagccgtggcttcttggaattaagaggaaagagtgcagcatgaacagacaggccctggaggatctggcagccctgagtgggggcggggggtcagctctggagtagagccagagctgtgatggggttgggggaccctgtgtccttgggccatgcttgcctcgctcctgggttctgtttgtggctgtggattggggtggggcagggccggttgtgcgaggggtcattgcccaactccagggggcgcctgccacctctcagctatatatatagggatatatatagttctttcgacaggtttccagcaggtagtggttattaaatcttactgaaggggtgttttttctgattctcggctctgtgccgcaagggtggaaactgtgagagacagattccaactccacgtctgggtagtaagcatccagtccagggctgtaggcagtcctggggaagacgccagagatctgtgcattctcatatcgagggatagcgactccaggctgggggctggcagggtaaggggtgggtgggtcctgggcttacccgcaggtctgcagacttcctggggccagctgacctcgtaaaatcccttttgtctaagcttcagtttcctgcctgtgaatggggttggggctgtgctctggtttcacccttgtggctctggggttgtggtgacaaagccatcaagctgggttgaaggattaaccaggaaacttcagactggctgccgtgtctacctcttcctcatactcctctctctgctgcatcctgggaagctgctctgctcagcctaaatgaggctcagttgtgtgtgtgcgcacgtgcttgcacgtgtgttggaagtgggtgatactgacaccagagtctgtgtctctgggtgagtgaggcttgcacatttctcgggacagggaactcactaccttatgtgcccaggacaagagctgtggggtctggagaagacttctaggccagcccctgcagtccttcctcaggtgacatggcttccccagacccacttccccctaggtgccctctctgcattcagggggtagagggctgactgggacagaatgtgacacactcagcatgtgaggaaaagcctccttcattctgtaggccctacctctattaacatgtcctttgataaagtgcctcccctcctgtctcccctctctggaatcctcagctgctgccaggcttcagctgtgccccattgaaggcagctctgtctccctactttccccagcccagggttttccttttggggtcagctgcagggatctgggccatcctttgcccactcagactttctttctgcccacctgctgctgtgaatcctgtatgtcatatatatatataaaatatgtaatatattatatattatatgtaatatataatatataaagtatattatataatatgtattatattatatattatataatatgtaatatattatataatatataatatgtattatattatatattatataatatgtaatatattatataatatataatatgtattatattatatattatataatatgtattatattatatattatataatatgtattatatattatataatatgtattatatattatataatatgtattatatattatataatatgtattatatattatataatatgtattatatattatataatatgtattatatattatataatattataatatgtattatatattatataatattatataatatgtattatatattatataacaatatataatgtgtattatatataatataatattatataatgtgtattatatattatataatattatataatgtgtattatatattatataatattatataatgtgtattatatattatataatattatataatgtgtattatatatataatattatataatgtgtattatatatataatattatataatgtgtattatatatataatattatataatgtgtattatatatttaatattatataatgtgtattatatatttaatattatataatgtgtattatatattatataatattatataatgtgtattatatattatataatattatataatgtgtattatatattatataatatatgatgtgtattatatattatatattatatgatgtgtattatatattatataatatatgatgtgtattatatattatataatatatgatgtgtattatatattatataatattatatgatgtgtattatatattatatataatatataatattatatataatatattacatataatatatcatatattatatttatataatttatataatatatcatatattatatttatataatttatataatatatcatatattatatttatataatttatataatatatcatatattatatttatataatttatataatatatcatataaatatattatatatagtattatatatataaaattatactttaagttctagggtacatgtgcacaacgtacaggtttgttacatatgtatacatgtgccatgttggtgtgctgcacccattaacttgtcatttacattaggtatatctcctaatgctatccctccccgttcccctcaccccacaacaggccccagtgtgtgatgttccccttcctgtgtccaagtgttctcattgtttaattccaacctatgagtgagaacatgcatgtcttatatgctctcaggcagagaggaaactgctgagcaggccggggcaggggacagagccctgtggctctccactttagacccctcctggctgactgccatggaatgcagccacttagcagggccaaatcccctgatgttcctgttggctgtctagccttcagggacaggtcatgggaccttggttcctgccctgtcatcttcccagtcaccctgatcttcacggggaggaatagcctgggaaaggacttggtcacagcacctccaccctagggctattgaggatctcacagttgtgtgtctggtgggttctgtccagagcccatttgagagcagtggatgacaggacaggcctatgtgacccaggcaggcagcaatattgggtcagccttcatgtccccttctgtcagctggggcagcctggaagcatgattgtggggtaggtgttatgggcacggaatagacctcaggtggaggctgcaggggctctccggcaccgtagacacagcaggcccaggagcaggggagggagccatgactcagggagactctggcccatatccttggcagatgagggccacaggggaatgggcagcactgtccaaagtcccctgggctgggtccgcagctgttcctggctcagacttcttggtgggctggtcagaaacatgcagtaacttggggcagttaccaggtggccaagcctgcactgctgggctctgtgagcttgggccagctcaggccctctctgggccctgcctttctgggctgttcgggtggttccttgggcctggggtgctaatgtttctggatgggcagcagaaccagtctgcactcagggccccaggccatgttcccggaacacacctttagcattgacagcagcgtgtggtgaggccccttaggctgggttctggtctagtgccaggggcaccactactccaccgcctccagagccatctctgggacactggctgtgagttcagatgttctgaacagggacagggagagccagagggaaccagcctggggctcactggaggggctcgtgggcagacagcgccctttggagggaactgagtctgaaaggaaggaaaccctttccccggctcatagcacctgccatccagggccctcccagggctgcgtgaactttagtcacgtggtgacaggccgagtcaccatgccaagtcactgtgcgcctccttgctgctgtgacgtcagcttccccatcctcccagccaggctggacctccgtgagaggcctgcctgtcctgcaccctgtgcagatgcctcccactgtccgccggggctgctgggcacgccctggctggtctcttggactaggtaagctcatgagtcctctggccgctcctgctccttccctgcctctgctcctcctcggaggtggccacccccagatcccagtcccaattcggaggccccctgaggagtgctgcagggggccacaggcgtggctctgagccactctggagagtggcggggggcccagccagttctgtggctgggactttcccaggcagacaagtctgtctcttcctccccagcgggtgcagcccagaactgtcttctgaggaagaggtgctctcctgggcccccactgtccccaggcctcaggtaagcccatcagggtcccaaggaagggggtctgggtttgaggccaaccatggcagctgacctactttctagcctcagtttcccctagtgtgtgcagctctcacgctgtttgggtgagaaccaggcctctgggcttggacattctttcagtgagtttttagggtggagggatgggaaatggaagcccaggacctcagcagggtgtcttcctccgatccggggacatctgcctgtgggaggctgggcccaccctcccttgctgacctgccctgggaggaagggacagggcccagcactgcctactcccctccctgttcttcccagcagtctgagcctggctgggtgtcccctgctcctccagcagcctacttgggcctttgggtagacagattaacagacaggcgaggctgggtcatggttggaccaccccaggaccctgaccgggggctcagctcatgaccctgagcctgggagagatgaggccatgccctccagggcactcagcatgacccggcccagtggacgggactgggtagcttccttggtgcagggggctgtcatgctaggacggggtcactgaccaggccaggcccctgccccatgacttgtggtggaaatgtccttttgtttttgtttttttgcattttttttgagacggagtttcactcttgttgcccaggctggagtgcagtggtgcaatcttgcctcactgcaacctccacctcctgggttcaagcaattctcctgcctcagctcctgagtagctgggattacaggcacctgccaccatgcctggctaattttttgtatttttagtggagatgggggtttcaccatgttggccaggctgttctcaaactcttcacctcaggtgatccacctgcctctgcctcccaaagtgctgggattataggtgtgagccactgcacccggccatgtgatgggaatgttctgtgtccataatagatgctgcatattgctggcccagctcctgaggctctttggacctccaggaatcggtgtctctatcaggaacccttaaccctgacccggactcccagctgggacccggggtgtcggagtggcaagagcgctgtcaggcctggtgaagggtgtgagctgtccaacggggcagggaggaggcagggcctgttctgcagttggacagacagagccctctagctgctttctggaagactgaagggcaggtgatgttggagggagggagtgcaggcaggggctgtgagggagttcaggtcagaaacaggtggcgcctggattcaggctgtggtggtcacggtggggatgaggggctgctttggattgtgctggggatgtggggtggtgcgctgctgcatgactactgccaggtctctctgctcttagtgtctgcatccagggctgggagggggtcaaatgaatcacactatcggccccaggcccaccaagcctggggaggtggccacccttccatgatggcatttggatgttccctgtgtgtggggagggcacagggactccattcgtagaccacctctgggacagtgtgtctgcctctgaggtcagacgctctgcactgggacagggtggagtggagggaaatccagcttggggctcattggaggggcttgctggcagacaccgccctttgtgggaaactgactgtgggagaggggaaccccaacctctgtcaccacatccctcttccctgttgtcacacctgtcacctgctgccatagccatgagacttcccaagggtcactgctgccactcactgcacagcctggaagggagtccacaggggacatacagtgagcaagagacctgtgccactcaggcctcctgggggtgtccccagtgcagccatgatgataatcacagctaccattcaccaagccctgcccacagtctaacctactctattcacaacactcccagcagcaaggcaagtgaggtgctgccgtcatccaggctggacagttcagtgatttgcctgaggccccacagcaggtgagtggcaagtccagcatcagagcagggcaggctggcggtgccccctgagccccctttgccatgctgaccacatgcacatcctgggcttctgcaggaatgccctgtcccctacctgccctgctccgtgcaaaaccctctttgagctgtgcctgggagacatgctgagagaattcatggaaacaaatgtgttactgacagcctctttgcctccagagttcaactggagacagagaaaccagctagaggcagagggaggtaacacggagtcccccagaaaggtctgggctgcgcgtgcttcaggtaacctcccttgaccttcaggagaacgagaaggctgcctgatcagagagtccctgaagaagattctgtggctacaggcttcagcagagtgtgagggagaccccggttatttcctcagctatttccaccaaatcctcctgtctttcgtggccaacaccccaggcaaggcttggggcccccgtctgctgctggacggtaagtcctggccccgtggcagtgaatctgtggggcgctctgattgtgggcactatggaagctaaaccccatgctccaggtggggtggagggtcttcagaggactcctggacagtgccaggctctaggctggggtgggggacacaggagaaaccaggccaggcccatccctactggagcttctccctaagcagtggaggctcagccactgtaaggaggtaggcaaggccctgcagaaagaggggtgtggaaatctgggggctcccaggaagggccgctgctggagatggggttcttaccaggatgggctctgaagataagcagggaggatttgggagggcagagatgaggcccagagcttctggcagagggcatggcctgcgcaaaggtctgggggccggacagcctgcacgtattctgggaagcgggaaggagacacaggccttgtgtttctgaggcccgactttagactgtgccctgttggggaggggccagggaatgtctgaggctaggcctgaccctgcttcttaccccgtgggtgcagcagagccatgaagaagaagttagtggtgctgggcctgctggccgtggtcctggtgctggtcattgtcggcctctgtctctggctgccctcagcctccaaggaacctgacaaccatgtgtacaccagggctgccgtggccgcggatgccaagcagtgctcgaagattgggaggtgagcagggcagggcatgggacatgggccctgaaaactgggcaagtggacctgagcaataccttcacccccctgagactcagtttccccatgtgtaagcttcgcttggactctctcagtagcctttgggaaggggacagtgactccgagagcagggtgtgggtctctagagccaaacagggccccttttctcagttctaagagtctctgtctctttggaataaactgcactgttttgttgtttggttgttatttttacttatttcttcctatctatctatctatctatctatctatcatctatctatctatctatctatctatctatctatctatctatctatctatctatctactatctatctatctatttatttagagatggagttttgctctgttgccaggctggagtgcagtggtgcaatctcagttaactgcaacctccgcctcccaagttcaagtgattctcatgcctaagtctcccaagtagctgggattacaggcgtgcgccaccacgcccaacaaatttgtgtgtgtgtgtgtgtgtgtgtgtgtgtgtgtgtgtgtgtgtgtgtttccaagacagagtatcgctctgttacccaggctggagggcagtggtgcaatcttggcttactgcaacctccacctcccaggttcaagtgattctcctgcctcagcctccacagtagctgagactacaggcatgtgccaccatgcccagctaatttttgtatttttagtagagacagggttttgctatgttggccaggctggtcttgaactcctgaccttgtgatcctcccacctctgcctctcaaagtgctgggattaaggtgtgagccactgctcctggcctaattatggtgtttttagtagagatggggtttcaccatgttggtcaggctggtcttgaactcctgacctcaggtaatccacccacctgggcctcccaaagtgttgggattacaggtgtgagccaccacgcccggcttattctttttttttttttttttttttggttaggagacaatttctttctttctttttttttattttattttattattattatactttaagttttagggtacatgtgcacaatgtgcaggtttgttacatatgtacatatgtacacatgtgccatgttggtgtgctgcacccaccaactcatcatttagcattaggtatatctcccaatgccatccctcccccctccccccaaggaacactgttgcccaaacagggacatgaagggcttattcttttttgttgttgttttgttttgttttgttttttgagacggagtctcacgctgtctcccaggctggagtgcagtggcgcaatctcggctcgctgcaacctccgtctcctggattcaggtgattctcctgcctcagcctcctgagtagctgatattacaggcatccgccaccacgcccggctaatttttgtatttttagtagagacagggtttcaccataatggtctggctggtctcaaactcctgacctcaggtgatccgcctgccttggcctcccaaagtgctgggattacaggcatgagccaccatgcccggccgggcttattctttttttaaggtggagtcttactctgttacccaggctggagtataggggagcgatcatagcccactgcagcctcaaactcttgggtttaagtgatcttcccgcctcagcttcctaaagtgctgggattacaggtgtgagccatggtgcctggcttctactgttttattctattttagactcttatctcatgttatatacaaagatcagttccctcctaaagacttaaacagaaaaaatattatgtttttcatattttgagacagggtcttgttctgtcacccaggctggagtgcagtggcatgatcatagctcactgcagccttgaactcttgggcttaagcgatcctcccacctcagccccctgagtagctaggactacaggcgtgcatcacacctgactaattaaaaaagactgttttctagagatggtctcactctattgcccaggctggtcttgaactcctggcctcaagtgatcctccaccttggcctcccaaagtgctgagattacaggtgtaagccaccatctctagccgggaaaaaaaatgttattaataaagtatagcaatttccctttttgtcccagttataaaagtcatgtacatttgtttgcttgataaagaggaaactgtctgggcaaggtggtccacacctgtaatcccagcactttgggaggttgaggcgggcagaccacccgaggtcaggagttcgagaccagcctggccaacatggtgcactctgtccctactaaaaatataaaaagttagccgggcatggtggtgtgcgcctgtaatcccagctactcaggaggctgaggcaggggaatcacttgaacccaggaggcagaggttgcagtgagctaagatcatgccactgcactccagcctgggcaactgagtgaaactccctctcagaaaaaaaaaaagaaagaaaagaaaagaaaaagaggaaactgtaatcccagcactttgggaggttgaggcgataggattgctttagaccatgagttcgagaccagcttgggcaacatagaaagaccctatctctacaaaaaagacaaaaaattgccaggtgtggtggttcttacctgtagtcccagctactcagcagactgaagtgggaggattgcttgagcccaggaggtcaaagctgcattgagccaagactgtgccactgcacttcatcctgggtgacaaagtgagaccctgtctcataaaacaaaggctgggcacagtggctcatgcctgtaataccagcactttgggaggccaaggtgggtggatcacttgagcacaggagttcttgaccagcctgggcaacatgatgaaaccccatctctacaaaatacacaaacaaacaaaattggctgggcatggtggcatgtgcccatagtcccagctacttgggaggctgagatgggagggtcaattgagcccaggagactgaggctgcagtgatctgagatcacaccactgcactccagcctgagcaacaaagagagactttgtctcaaaaaaaaaaaaaaaaaaaaaaaaaaaaagaggccaaggcaggcggatcatgaggtcaagagatagagaccagcctggccaacatggtgaaaccccgtctctactaaaaatacaaaaattagctgggcgtggtggcatgcacctgtagtcccagctactcaggaggctgaggcaggagaatggcttgaacccgggaggcagaggttgcagtgagctgagatcgtgccactgcactccagcctggcaatagagcaagactccatctcaaaaaaaaaaaaaaaaagaaagaaagaaactaaaaacaaaaaccccaaaactcgaatggacttctcttccatcctcctttgggcaggtgggcagcagggtgtgtatgcggggccagggtggaagcctgcaggttctcatgcctttatgtgccacatggcagggatgcactgcgggacggtggctctgcggtggatgcagccattgcagccctgttgtgtgtggggctcatgaatgcccacagcatgggcatcgggggtggcctcttcctcaccatctacaacagcaccacacgtgagtgcctcgggagaggagagggagaggggcagggggtgtgggttgggccgaggcacagctgggcggtccccaggctcacgtggcataaagggtttgggtgggcgggcctgcctacctgcttctccttctaggaaaagctgaggtcatcaacgcccgcgaggtggcccccaggctggcctttgccaccatgttcaacagctcggagcagtcccagaagggtaagccatgcggcagacttggggcgtgggtgcagagctggctgagccaccgggaaggggccttgcccacaggagcctgctcccgtcagggttcaggggcagttctgtcaccccccatcccttcctgtccccatagcaccctcccacaatgagtggtcaggaccatcatcaccatggtaaagggccgggagcttctgttatttctgctaaggcctccggggccactctgtgcagcacatggagagaataattattatgctagcagacctcatggaccagggctcactggggcccacactctgctctgtgcttttcacccatgagcctctcacaaccctccctgctcctttgggctaggggatgctgtgtggattcccattttacagggtggggatgctgaggctcagacaggtcacgcaaatcagttgaggtcacacagctgggaggtggtgaagctaaaattgaacccaggctgtctataccgtgccttttcaacaggcatcccattcactcatttgttcatttgtggggatggtgctctagaatgtgaggtggagtctctcttttctaatctggtcttaagtggagaggaggcccccaaattccccaggtacctgaagggaagccactgtccatccaggaagccactgtctgtcctcaaaggtggtacagtagattgtgagataaaagttggaggatgggagggtctcaacaactcacgcctctaatcctagcactttaggaggccaagtcaggaggagcgcatgagcccaggagtttgagacctgcctgggcaacatagcaagactccatctctacaaaaaacggaaaaaaaaattagctaggtgtggcggtgtgtgcttatgttcccagctacttgggaggctaaggtgggaggatcacttgagcccaggaggttgaggctgcagtgagccatgattgtaccactacactctagcttgggcaacaaagtgagaccctgccaaaaaaaaaaaaaaggctgggcctttttttcacaggctcacgcctgtaatcccagcactttgggaggctgaggcagatggatcacctaggtcaggagttcaagaccagcctggccaacatagtgaaaccctttctctactaaaagtacaataattagtcaggcgtggtggcacaggcctgtaatcccagctactcaggaggctaaggcaggagaatcgcttgaacccaggaggaggagattgcagtgagccgagatcatgccactgcactccagtctgggcaacaagaatgaagctccgtctcaaaaaaaaaaaaagttggaggatggaggggcaggacacactcaccatagcaggtcttagacttcaggtgggggtcctgggtggtgccctttggagtcttctgcaacatactcaatctttgacttttttcttttttttttcttttttttttttttgtcacccagactgtcgcccaggctggagtgcagtggcacgatctcggctcactgcaagctctgcctcctgagttcacgccattctcctgcctcagcctcccgaatagctgggactacaggcgcctgccaccacgcccagctaattttttgtattttttagtagagacgggttttcactatgttgcccaggctggtctcgatctcctgacctcgtgatcccccggcctcggcctcccaaagtgctggaattacaggcgtgagccactgtgcccgatcaatctttcatttttttttaatactcattgagaaactcagcatttgtagacatgaagttgctcagggtaagagaatgcgggaatcataggcttggcaccttgtggactcttagaatcatttatttaacttgaatgtattgagtattctcttaaagaatcagctgttgttcctgaagctggggtgaaaaacaaagatggcagatgaaatctgtgacactccaggtgggaggagaaactaggcaggtgcaggtgtgttacgggctgtagaaaaacaggtctggagggcctcaaaatctgggactgtatagagggtgacctagtcagggaaggggacatctgagcaaagacccagaggcagagatggggtcaggggagttatctcctggtctgctatccaggtgtgatggcagggacagagccctgtggggagctggggaggctgcagcaagtgatccaagggaaatggcccaggttgtgtgggatctcttaggttatggtgaagcctctgcttcctgtctgagggaagtgggggctcgtggagtatgtgagtggaaggggatggatctggcctatggaccccgtgggttgctgtgtaaggggcagggagcatgtggggacctgtctggaggtcactgcagtaattcgtggagagggtgctgggaagtggctgacgctggacagacacacttggaagtggagtctgtggatttgaggatgggttgggtgtgacgcttgtgtagggagtccccggggacccctgatcttttgtctgtacctggaaggatggggtgaccctaatggagacaggcagggttctcaggaagcaggttgagcagacactcaggagctcggttttgggcacgttgaagtttgagatgctttcttcgagcaggcaggtagatcctcaggtctggtgatcggaggagcagcccaggccagcaggtcaatttgagagttgtcagtgcataaatggaggctgaagctcagatgtcaagcagaccaccaggagagagagcaaagacagaggggagagtaggagctaggatggcaggcgggggagactcgggtggagccaggtgctgggatgcaggggcagctctcagggaaagtgatgagcccagtaaagctgagagggggcactgggtctggcagtgtgggggtcaccagagaacttggcaagtgtgctggcatgagagtctgattggcctgaggtcaggagaagattttttttctgatattgatacatgatattttctatatttatgggtacatgtgagtgcttgttacatgcatagagtgtataatgatcaaggcagggtatttggagtctccgtcaccttgaatatttttcatttctgggtgttagcaccatagtcctctcttcgttactttgaaatatacaaaatactgttgctaagcatcgtcaccctggtctgctatcaaagattagaacttctcctgtcttggctgggcacggtggctcacacctgtcatcccagcaccttggaaggctgaggtgggtggatgacctgaggtcaggagtttgaaaccagcctggccaacatggcaaaaccccatctgtactaaaaatacaaaaattagcctggcgtgctggcctgtgcctgtaataccagctactcgggaggctgaggcaggagaatcgcttgaacctgggaggcggaggttgtagtgagctgagatcatgccactgcactgtagtctgggagacagagcaagactccatctcaaaaacaaacaaagaagaaaaacaaaacaaaacaaaaaataacttctgtctaactacaaggtggaaggaatcatgtgctgggtgtcagaccttccgggatgtatgtgcagcttctaggaattgaaaccaccagctcttggaaacttgtgccaggcttcagggtgggagaggcagttctagagccacagctgccaagccaagccaaatggccccatcatctctcgcaagagcaggagagtccctgggggcagaggccatagttgtacctttctgggcaaagggtcagtgtctgtagtgtccttatgggcagcggggctcaggggggaagcaggcccaggggtgtgtttccaatgacctcctcaaaagtcagaactggaaggcaaaaccccttataggctgagtgcacctgtaatcccagcatgttgggatgctgaggtgggaggattgcttgaggccagagtttgagaccagtcttggcaacgtagcaagacccctgtctctacaaaaaataaaaataaaaaattaggctgggaatggtggctcacgcctgtaatcccagaactctgagaggctgaggaggatggatcacctgatgttaggagttcaagaccagcctgaccaacctggtgaaaccccgtctctactaaaaatacaaaaattagcaaggcatggtggtgcatgcctgtaatcccagctacttgggaggctgaggcaggagaattgcttgaactcgggaggtggaggttggagtgagccaagattgtgccattgcactccagcctgggcaacaagagtgaaactccatctcagaaaaaaaaaaaaaaaaaaaaaagccctgtgtagtggggtatgtctgtagtcttaggtacttcagaggctgaggtaggaggatcgcttgagcctgggaagccaaggctgcagtgagccatgattgcaccactgcactccagctgggacaacagaatgagaccctgtctcaaaacagacaaacaaacaaaaacccttatagttggatggagaaactgaggctgggagaggggacaggacggaggttaaggctcagtcttgcctctctggggccgtagaaaagaggcagggagccctttcttggggctggctgtgtcttgaaggtggcctgtgcttgacctcggtcaaggtgggatctgctcttgttttggcacattctcgtggagcccatgagtcttacaggataaggccttgtggtcagtgagatgggagggggtctggcctggcacaggattttagacatgcaggcacctgcacagacagacacctcatcctgggacagcaaaacccagccgcatgctactgcttcccctgctgtgccctcctcagacatccctggtccatgtacactcctacctgctgagcccctcctaaaaaaaaaaattaaacatcccctcctaaaaaaaaacaattaaaattaaaaaataaatttaaaaattaaaaatccccttctgctaggtgtgctgttcacgcctgtaatctcagcgactcaggaggctgaggtgggaggatcgcttgaatccaggagttcgagatcgggctgggcaagatggcaagaccccaactcaaaaaagaaaaaaaaaaaatctttcctcctaagcctcattgccccatctgtaaaatgagtcagggactgtgcctgggatgctgcctgcgagagatcccgatgtcccccactcagggtcactaactatggctctctctccccaggggggctgtcggtggcggtgcctggggagatccgaggctatgagctggcacaccagcggcatgggcggctgccctgggctcgcctcttccagcccagcatccagctggcccgccagggcttccccgtgggcaagggcttggcggcagccctggaaaacaagcggaccgtcatcgagcagcagcctgtcttgtggtatgtctgtgggtgcggccccctgacacaggcagggcaggcacagcccaaggaccttgcaggccgtagcagcagtggagcagccctctgccttcaggaccctgtgctgataatgggatgaggagatacagacccttcccaccacgtgtggggacacattctgagcgtggggtcccagtggccactgtggctggccatgtgtcctgagtggcaagggacactaggaagctcccggaagggacactaggaagacgagcgctgagtgacagggccacccacctgtgacaggcgctgcccctgttctgctccgttctcctgtgtggacgggtgtgaggggtggtctagctgagtccaccccacctgctgcctcacatgagccccctctgccccagtgaggtgttctgccgggatagaaaggtgcttcgggagggggagagactgaccctgccgcagctggctgacacctacgagacgctggccatcgagggtgcccaggccttctacaacggcagcctcacggcccagattgtgaaggacatccaggcggccggtgagtgggtaacctcaggggcctgggtgaggaactctgcagtggaaaccctgagctgtagcccagagctatggggtcctcctgtcttgcctgagcctgcaggaagttcctggtggaggagggtcagtgactggccatgtgggtccacagctcctgcttatatcaaaaccaagagaggccacacagtccaggagagcaagtccctgttggggtaaatgcaggtgtaggcaagagccagggctagggaagcactagaatacagcctgaagatccaggaggacttcttggaggaggtggcggctgggctgcagataactttgttaggcagagagaggaagggattcctagcagaggaacagctgggctaaggcccagtagagggcgctttgattcaccaagagggttacaagggatgagggtctccttgagagaggcatggggaaggggatttgtggggcaggggcctggagcttggctgtggctttcttcaggtaatttttgtcacgtttcatggaggagggtgattagcgtgtcgacctttaccactgaggctggaaattggcatgccaataccctgtctgtctggagctgactccaggagaattaagagcctccctcctctattcattcatcatgaggagaagaggccaagcggcagggagactggcaggaattctccagttagaaaaggccctctgagccaggcgcggtggctcacgtctgtaatcccagcactttgggaggccgaggcgggtggatcacctgaggtcaggagttcaagaccagcctggccaacatggcgaaaccctgtctctactaaaaatgcaaaattagtcaggcatggtaggttgtgcctgtaatcccagctacttgggaggctgtgccaggagaatcgctagaacctggggggctgaggttgcagtgagccgagattgcaccactgcactccacagagtgagattccatctcaaaaaaaaaaaaagaaagaaagaaaaggccctctgaggccaagcttggtgtctcatgcctgtaatcccaacactttgggaggctgaggtagaagttgaggccaggaggtccaagacaagcctgggcaacatagtgagtctacaaaaaaaatattgagaaactacataaatatagtgggggtgggggtggggaacaagaaaacaaaaaattcaaagcatagtgaaaagaaatatagcaaaacccggccgggcatggtggctcacgcctgtaatcccagcactttgagaggccgaggcgtgtggatcacggggtcaggagatcgagaccatcctggctaacacagtgaaacctgtctctactaaaaatacaaaaaaattagccacgtgtggtggcgggcgcctgcagtcccagctacttgggaggctgaggcaggagaatggcgtgaacctgggaggtggagcttgcagtgagccgatatcgcgccactgcactccagcctgggcgatagagcgagactccgtctcaaaaaacaaaaaaaaagtagcaaaacacaacaaaaaaattaaaatttgctgggtgtagttgtgcctttagtctcagctactggggagggtctgctggaggatcacttgagcccaggagttcaaggctgtgattaagccactgcactccagcctgggtgacagagcaagatcctatctctaaaaaaaaaaaagaaaagaaaacactctgtggccacagatgagagaaggcagacaggaagccagtaagccaagcaggcaaagggcaggtggccccagcccggctgttgggtggtgagcagtgtcagggagacaggagtgccggagctgatgaggttcccaaggaggtgaggttgcctgtggccccctcccagggcacagtcccacccctccagtagtgcactctgtcctccctggtaggtacaggcttttccccaccaccatggtgcagccatgcctgcccccaacaccactgctgcagctccatcctccacgcagtggtgcagccccatcccagcacccatttgagctgctgtcccattgcagggggcattgtgacagctgaggacctgaacaactaccgtgctgagctgatcgagcacccgctgaacatcagcctgggagacgtggtgctgtacatgcccagtgcgccgctcagcgggcccgtgctggccctcatcctcaacatcctcaaaggtgagtggtcgcaccacagccgtgtggtaggacccatgacactgcctctctctccccacgccccacccctcctgcatctctgctcgccccccatgccacgtctttccatcactgagctcccgaggtgtgtccctgcgtcacagttcaccatgtcctgaaggaggcagtgcagagcgacagggctgaagcgggcaatgctcaagggttggaggaggaacaggagtcatcaggagggagagaggtgcaggagctcagggctgcagggccggtccagagggtaccccggtccagtgggtgaccctgccacttggtcattgaatggccagagctgatgcgtgacgtgaggtccaggctcgggagccctcaccttacttcactctcaccacagccttctgaagcagctgctgctattggttattaaacgctccttgaggtgggcaaagtggctcaggcaggtgttaaccctctgagcccctcagagcctctggggctcagcaacatgcacctggctctgatcaaccagggtacaacttctcccgggagagcgtggagagccccgagcagaagggcctgacgtaccaccgcatcgtagaggctttccggtttgcctacgccaagaggaccctgcttggggaccccaagtttgtggatgtgactgaggtaaggggcaggggctggcccactgtgggtgtggggcctgccatagaggcatcaggtgggctccccagggtggctacagcctcacatatgctttatgaatccattcctgccacagacttcgattgcgggcctactgtgtgctcggatggactcgtgggtgacccccagtcttggcttctgccgcacagaactgacagtgtggggaattagtggccaccctcctacctcaggtcctttgcacatgctgtggttctcgagtgctcagtgctgagatgaggaatgcatgggggcattgcagccctcgggcatggtgagatggatgggtgaaagggagagggccaggtgaacagagaccttggccacccactccctgtcactccaaactaacgcttcccagatgccaccctcagccctgcaccacctgacccactcactcagtagttgccccagctccacactgggtccctataagaccctgtcatatcccttcccgctgaggatcctcacatccctccttacctacttgggtccttggcattcctgggcggatctgcagacccccccacactgaccagtgacctcccaggaggggcgtcagctgcccaggtggtgtcttctctttccccgtgagcattctgcacctctgactcccgctgcagccagtgacctggtgtcttgtctctctgaggggacagagccactgcagtgtgtccctctgccctcctttttggctaaggccagctccttcatctactcgctggctcggggtgctgttcctacaatgctcctttctgcctctgatgatttacttctttatcacggcttattcccgaaagaaaggcagctgttgttgctctagaaacttctatctgctgcctccttctgtcctttgctcctcttagagcaaacatggctgggctatgtcctctctcccttcagggtatcccctcccctgctctatccccatgccaccagatcgccatgtccagcctcagtttccccatcaggccccactcagcagcatctcacacagctcaccacactctcctcgagttttcattttgcaaattttcgcacctacaaaaatgtaaaaaaaccccaaaactgcccaagcatcaatgctcccttttcctggagtctgcagtgtggatgtttctgtcggatttcctaactctctccgtctccacccacatctattgggattcgtgtttttctgagggattccacagtaggttactgatgtcgcacctcagggtgtgtctcaaaagtgagacttgaacatagcacagcaggatgtcggggtgacacaacctgttgtcccttctctttacctacagtaggctcccttggctgttttgtttttgttgtgtttttgtttgtacacagagtctctgtcatccaggttggagtgcagtggtgtgatcttggctcactgcagcctcaacctccagggctcaagcaatcctcccacttcagccccctgaacagctgggaccagaggcacgtgccaccaaacctggataatttttgtattttttttagagacagggtcttgcccagactggtctcaaactcccgggatcaaactatcttcccacctcagcctcccaaagcgctgggattacaggtgtgtttttttttttgagacagagtctcgctctgttgcccaggctggagtgcagtggcgctatctcggctcactgtaagctccgcctcctgggttcacgccattctcctgcctcagcctcccgagtagctgggattacaggcgcccgccacaccgcccagctaattttttgtatttttagtagagagggggtttcaccgtgatcgcgatctcctgacctcgtgatccgcctgcctcggcctcccaaagtgctgggattacaggcatgagccaccgtgcctggcctgttttgttgatttttaaagcccagggcagtagtcttggaaaatgtcccacatcgtggatttgcctttctgtttccttgagggcagattcagacagaacacctttccctgggattggtcaactaatccgtggggtgttgctgaaactttattttattttattttatttttgagacggagtctcgctctgtcccccaggctgtcccccaggctggagtgcagtggcgggatctccgctcactgcaagctccgcctcccaggttcacgccattctcctgcctcagccccccaagtagctgggactacatgtgcccaccaccgcgcccagctaattttttgtatttttagtagagacggggtttcactgtgttagccaggatggtctcgatctcctgacgtcgtgatccgccctcccaaagtgctgggattacaggcctcggcctcccaaagtgctgggattacaggcgtgagccaccgcgcccggtgttgaaactcccttgaggcattttcttcggccttcgggtccatcctctgtctcctccttgacctcctcatctcctcgccactgccttggggaccttggccaggctcatggcatccagcagccactcaatgtcaatacctccatgttcatctctcagcccgcccttgcccgtgaacccatgcttatttatttattttttttaatacgtgcacccatgctcttcaggtctgatgaagtatccaaaatcaagctcctgaccatccccaaacctgccccttctgcagggtttacctcgctagtcggcgccatccttgattcttctctttctcccacccaggccatcatctcttgcctggttgatacccacagcctcccctttgggctttatccttatccccatcatagctgccagagggatcctgtgaaaacactccccagcctgctcattcctctgccctaagcctgcatggcacagagcaaaagccagttgttatgggacctaggaagtcctgtgggatgggccccagcctgcatcttcatcctcttctccccaccccactccattcactctctgcctatcactcaccagcctataccacctgcctcagggcctttgcactgaccatttaggccacattccaggctcttttcacacgttgcctcctctgagaagccctccctgaccactctgcccatacctcatgcctcttgattccccttacctggcttgtggtttcagcactttccctgtgtgtgtttgtttttcttggcatgagagcaggacctaagtgtctgttccctgttgattccccagtgccaggcatgcagtgcaaactctagaaatattttttgcatgaaggaatgagtgattgaatgcagcaagggtctggaggctgaggaccaggcagacagacattcagagttgctggaacgcgacagagacagggagtcagactggtcatgcaaggtcctgggcctgcccttgggtcctggggagccacggaaggttgtgggtgccagagggttgcggtcagagtcacagtcaagggccttctgagacctgtgccccctccccaccctccctccccacctcctcaggccagctctggggtctcggcaggtggtccgcaacatgacctccgagttcttcgctgcccagctccgggcccagatctctgacgacaccactcacccgatctcctactacaagcccgagttctacacgccggatgacgggggcactgctcacctgtctgtcgtcgcagaggacggcagtgctgtgtccgccaccagcaccatcaacctctagtaggggctgctgggccgcctgggtgggaaagggccaggggcgggtggcccagggactgcccacttatccagtaaggtggctccgtcacctcttttcctggtgggaaactgaggcccaaccttggtagcttatcctgggcctctcagtgagtatgtttgagcctcagtgggtggatagggaccaggctgggccaggcaaggtcgggcactgtctgacctggctgggcggtagctttggctccaaggtccgctccccggtcagcgggatcctgttcaataatgaaatggacgacttcagctctcccagcatcaccaacgagtttggggtacccccctcacctgccaatttcatccagccaggtatggggtggaggtccgggggtgggggactggggtggagaggggcgggtgtcctgggcaggcagctgacgggcatccctgtcttctcccatcggccgcagggaagcagccgctctcgtccatgtgcccgacgatcatggtgggccaggacggcc

SEQ ID NO: 12254 - DNA, 2091 bp, Homo sapiens
aggggagggaaggaggagctgggtcacagcagggaatcttagcttggttttggtgtgctgctggatgaccagaccgggcgtcgggtgagcccagaagtgagagcagttggctgtgccccagtgctgtgtgacccagaggcgccgctcaccctctctgagctggtggacatcataggtggggaagctcaggtcagggcactcccatgagtgtctggaggcctgagtcccattctcagctctgccatatgcttgctgcgctctagaggagttcctcttcctctccaagcctcggtttatgtacccgtgcagtgggagtgagttgcacttcggggtgaagggggcaagacttgtgtgggcgcatcctgcagaaggatcccacagcgggtgcagcccagaactgtcttctgaggaagaggtgctctcctgggcccccactgtccccaggcctcagcaaggcaagtgaggtgctgccgtcatccaggctggacagttcagtgatttgcctgaggccccacagcaggagaacgagaaggctgcctgatcagagagtccctgaagaagattctgtggctacaggcttcagcagagtgtgagggagaccccggttatttcctcagctatttccaccaaatcctcctgtctttcgtggccaacaccccaggcaaggcttggggcccccgtctgctgctggacgcagagccatgaagaagaagttagtggtgctgggcctgctggccgtggtcctggtgctggtcattgtcggcctctgtctctggctgccctcagcctccaaggaacctgacaaccatgtgtacaccagggctgccgtggccgcggatgccaagcagtgctcgaagattgggagggatgcactgcgggacggtggctctgcggtggatgcagccattgcagccctgttgtgtgtggggctcatgaatgcccacagcatgggcatcgggggtggcctcttcctcaccatctacaacagcaccacacgaaaagctgaggtcatcaacgcccgcgaggtggcccccaggctggcctttgccaccatgttcaacagctcggagcagtcccagaagggggggctgtcggtggcggtgcctggggagatccgaggctatgagctggcacaccagcggcatgggcggctgccctgggctcgcctcttccagcccagcatccagctggcccgccagggcttccccgtgggcaagggcttggcggcagccctggaaaacaagcggaccgtcatcgagcagcagcctgtcttgtgtgaggtgttctgccgggatagaaaggtgcttcgggagggggagagactgaccctgccgcagctggctgacacctacgagacgctggccatcgagggtgcccaggccttctacaacggcagcctcacggcccagattgtgaaggacatccaggcggccgggggcattgtgacagctgaggacctgaacaactaccgtgctgagctgatcgagcacccgctgaacatcagcctgggagacgtggtgctgtacatgcccagtgcgccgctcagcgggcccgtgctggccctcatcctcaacatcctcaaagggtacaacttctcccgggagagcgtggagagccccgagcagaagggcctgacgtaccaccgcatcgtagaggctttccggtttgcctacgccaagaggaccctgcttggggaccccaagtttgtggatgtgactgaggtggtccgcaacatgacctccgagttcttcgctgcccagctccgggcccagatctctgacgacaccactcacccgatctcctactacaagcccgagttctacacgccggatgacgggggcactgctcacctgtctgtcgtcgcagaggacggcagtgctgtgtccgccaccagcaccatcaacctctactttggctccaaggtccgctccccggtcagcgggatcctgttcaataatgaaatggacgacttcagctctcccagcatcaccaacgagtttggggtacccccctcacctgccaatttcatccagccagggaagcagccgctctcgtccatgtgcccgacgatcatggtgggccaggacggcc

SEQ ID NO: 12255 - DNA, 11637 bp, Homo sapiens
ccagaccgggcgtcgggtgagcccagaagtgagagcagttggctgtgccccagtgctgtgtgacccagaggcgccgctcaccctctctgagctggtggacatcataggtggggaagctcaggtcagggcactcccatgagtgtctggaggcctgagtcccattctcagctctgccatatgcttgctgcgctctagaggagttcctcttcctctccaagcctcggtttatgtacccgtgcagtgggagtgagttgcacttcggggtgaagggggcaagacttgtgtgggcgcatcctgcagaaggatcccacaggtgggcagagccctgggttctttatccgactgggtctgggctgggggcctctgtttcttggctgatgagtttatgtgagtttgagtgaggtatgcgagtgggtgaaggagggctggggggagtcacctgacttgtgcgaagaagctcttgagagagccgtggcttcttggaattaagaggaaagagtgcagcatgaacagacaggccctggaggatctggcagccctgagtgggggcggggggtcagctctggagtagagccagagctgtgatggggttgggggaccctgtgtccttgggccatgcttgcctcgctcctgggttctgtttgtggctgtggattggggtggggcagggccggttgtgcgaggggtcattgcccaactccagggggcgcctgccacctctcagctatatatatagggatatatatagttctttcgacaggtttccagcaggtagtggttattaaatcttactgaaggggtgttttttctgattctcggctctgtgccgcaagggtggaaactgtgagagacagattccaactccacgtctgggtagtaagcatccagtccagggctgtaggcagtcctggggaagacgccagagatctgtgcattctcatatcgagggatagcgactccaggctgggggctggcagggtaaggggtgggtgggtcctgggcttacccgcaggtctgcagacttcctggggccagctgacctcgtaaaatcccttttgtctaagcttcagtttcctgcctgtgaatggggttggggctgtgctctggtttcacccttgtggctctggggttgtggtgacaaagccatcaagctgggttgaaggattaaccaggaaacttcagactggctgccgtgtctacctcttcctcatactcctctctctgctgcatcctgggaagctgctctgctcagcctaaatgaggctcagttgtgtgtgtgcgcacgtgcttgcacgtgtgttggaagtgggtgatactgacaccagagtctgtgtctctgggtgagtgaggcttgcacatttctcgggacagggaactcactaccttatgtgcccaggacaagagctgtggggtctggagaagacttctaggccagcccctgcagtccttcctcaggtgacatggcttccccagacccacttccccctaggtgccctctctgcattcagggggtagagggctgactgggacagaatgtgacacactcagcatgtgaggaaaagcctccttcattctgtaggccctacctctattaacatgtcctttgataaagtgcctcccctcctgtctcccctctctggaatcctcagctgctgccaggcttcagctgtgccccattgaaggcagctctgtctccctactttccccagcccagggttttccttttggggtcagctgcagggatctgggccatcctttgcccactcagactttctttctgcccacctgctgctgtgaatcctgtatgtcatatatatatataaaatatgtaatatattatatattatatgtaatatataatatataaagtatattatataatatgtattatattatatattatataatatgtaatatattatataatatataatatgtattatattatatattatataatatgtaatatattatataatatataatatgtattatattatatattatataatatgtattatattatatattatataatatgtattatatattatataatatgtattatatattatataatatgtattatatattatataatatgtattatatattatataatatgtattatatattatataatatgtattatatattatataatattataatatgtattatatattatataatattatataatatgtattatatattatataacaatatataatgtgtattatatataatataatattatataatgtgtattatatattatataatattatataatgtgtattatatattatataatattatataatgtgtattatatattatataatattatataatgtgtattatatatataatattatataatgtgtattatatatataatattatataatgtgtattatatatataatattatataatgtgtattatatatttaatattatataatgtgtattatatatttaatattatataatgtgtattatatattatataatattatataatgtgtattatatattatataatattatataatgtgtattatatattatataatatatgatgtgtattatatattatatattatatgatgtgtattatatattatataatatatgatgtgtattatatattatataatatatgatgtgtattatatattatataatattatatgatgtgtattatatattatatataatatataatattatatataatatattacatataatatatcatatattatatttatataatttatataatatatcatatattatatttatataatttatataatatatcatatattatatttatataatttatataatatatcatatattatatttatataatttatataatatatcatataaatatattatatatagtattatatatataaaattatactttaagttctagggtacatgtgcacaacgtacaggtttgttacatatgtatacatgtgccatgttggtgtgctgcacccattaacttgtcatttacattaggtatatctcctaatgctatccctccccgttcccctcaccccacaacaggccccagtgtgtgatgttccccttcctgtgtccaagtgttctcattgtttaattccaacctatgagtgagaacatgcatgtcttatatgctctcaggcagagaggaaactgctgagcaggccggggcaggggacagagccctgtggctctccactttagacccctcctggctgactgccatggaatgcagccacttagcagggccaaatcccctgatgttcctgttggctgtctagccttcagggacaggtcatgggaccttggttcctgccctgtcatcttcccagtcaccctgatcttcacggggaggaatagcctgggaaaggacttggtcacagcacctccaccctagggctattgaggatctcacagttgtgtgtctggtgggttctgtccagagcccatttgagagcagtggatgacaggacaggcctatgtgacccaggcaggcagcaatattgggtcagccttcatgtccccttctgtcagctggggcagcctggaagcatgattgtggggtaggtgttatgggcacggaatagacctcaggtggaggctgcaggggctctccggcaccgtagacacagcaggcccaggagcaggggagggagccatgactcagggagactctggcccatatccttggcagatgagggccacaggggaatgggcagcactgtccaaagtcccctgggctgggtccgcagctgttcctggctcagacttcttggtgggctggtcagaaacatgcagtaacttggggcagttaccaggtggccaagcctgcactgctgggctctgtgagcttgggccagctcaggccctctctgggccctgcctttctgggctgttcgggtggttccttgggcctggggtgctaatgtttctggatgggcagcagaaccagtctgcactcagggccccaggccatgttcccggaacacacctttagcattgacagcagcgtgtggtgaggccccttaggctgggttctggtctagtgccaggggcaccactactccaccgcctccagagccatctctgggacactggctgtgagttcagatgttctgaacagggacagggagagccagagggaaccagcctggggctcactggaggggctcgtgggcagacagcgccctttggagggaactgagtctgaaaggaaggaaaccctttccccggctcatagcacctgccatccagggccctcccagggctgcgtgaactttagtcacgtggtgacaggccgagtcaccatgccaagtcactgtgcgcctccttgctgctgtgacgtcagcttccccatcctcccagccaggctggacctccgtgagaggcctgcctgtcctgcaccctgtgcagatgcctcccactgtccgccggggctgctgggcacgccctggctggtctcttggactaggtaagctcatgagtcctctggccgctcctgctccttccctgcctctgctcctcctcggaggtggccacccccagatcccagtcccaattcggaggccccctgaggagtgctgcagggggccacaggcgtggctctgagccactctggagagtggcggggggcccagccagttctgtggctgggactttcccaggcagacaagtctgtctcttcctccccagcgggtgcagcccagaactgtcttctgaggaagaggtgctctcctgggcccccactgtccccaggcctcaggtaagcccatcagggtcccaaggaagggggtctgggtttgaggccaaccatggcagctgacctactttctagcctcagtttcccctagtgtgtgcagctctcacgctgtttgggtgagaaccaggcctctgggcttggacattctttcagtgagtttttagggtggagggatgggaaatggaagcccaggacctcagcagggtgtcttcctccgatccggggacatctgcctgtgggaggctgggcccaccctcccttgctgacctgccctgggaggaagggacagggcccagcactgcctactcccctccctgttcttcccagcagtctgagcctggctgggtgtcccctgctcctccagcagcctacttgggcctttgggtagacagattaacagacaggcgaggctgggtcatggttggaccaccccaggaccctgaccgggggctcagctcatgaccctgagcctgggagagatgaggccatgccctccagggcactcagcatgacccggcccagtggacgggactgggtagcttccttggtgcagggggctgtcatgctaggacggggtcactgaccaggccaggcccctgccccatgacttgtggtggaaatgtccttttgtttttgtttttttgcattttttttgagacggagtttcactcttgttgcccaggctggagtgcagtggtgcaatcttgcctcactgcaacctccacctcctgggttcaagcaattctcctgcctcagctcctgagtagctgggattacaggcacctgccaccatgcctggctaattttttgtatttttagtggagatgggggtttcaccatgttggccaggctgttctcaaactcttcacctcaggtgatccacctgcctctgcctcccaaagtgctgggattataggtgtgagccactgcacccggccatgtgatgggaatgttctgtgtccataatagatgctgcatattgctggcccagctcctgaggctctttggacctccaggaatcggtgtctctatcaggaacccttaaccctgacccggactcccagctgggacccggggtgtcggagtggcaagagcgctgtcaggcctggtgaagggtgtgagctgtccaacggggcagggaggaggcagggcctgttctgcagttggacagacagagccctctagctgctttctggaagactgaagggcaggtgatgttggagggagggagtgcaggcaggggctgtgagggagttcaggtcagaaacaggtggcgcctggattcaggctgtggtggtcacggtggggatgaggggctgctttggattgtgctggggatgtggggtggtgcgctgctgcatgactactgccaggtctctctgctcttagtgtctgcatccagggctgggagggggtcaaatgaatcacactatcggccccaggcccaccaagcctggggaggtggccacccttccatgatggcatttggatgttccctgtgtgtggggagggcacagggactccattcgtagaccacctctgggacagtgtgtctgcctctgaggtcagacgctctgcactgggacagggtggagtggagggaaatccagcttggggctcattggaggggcttgctggcagacaccgccctttgtgggaaactgactgtgggagaggggaaccccaacctctgtcaccacatccctcttccctgttgtcacacctgtcacctgctgccatagccatgagacttcccaagggtcactgctgccactcactgcacagcctggaagggagtccacaggggacatacagtgagcaagagacctgtgccactcaggcctcctgggggtgtccccagtgcagccatgatgataatcacagctaccattcaccaagccctgcccacagtctaacctactctattcacaacactcccagcagcaaggcaagtgaggtgctgccgtcatccaggctggacagttcagtgatttgcctgaggccccacagcaggtgagtggcaagtccagcatcagagcagggcaggctggcggtgccccctgagccccctttgccatgctgaccacatgcacatcctgggcttctgcaggaatgccctgtcccctacctgccctgctccgtgcaaaaccctctttgagctgtgcctgggagacatgctgagagaattcatggaaacaaatgtgttactgacagcctctttgcctccagagttcaactggagacagagaaaccagctagaggcagagggaggtaacacggagtcccccagaaaggtctgggctgcgcgtgcttcaggtaacctcccttgaccttcaggagaacgagaaggctgcctgatcagagagtccctgaagaagattctgtggctacaggcttcagcagagtgtgagggagaccccggttatttcctcagctatttccaccaaatcctcctgtctttcgtggccaacaccccaggcaaggcttggggcccccgtctgctgctggacggtaagtcctggccccgtggcagtgaatctgtggggcgctctgattgtgggcactatggaagctaaaccccatgctccaggtggggtggagggtcttcagaggactcctggacagtgccaggctctaggctggggtgggggacacaggagaaaccaggccaggcccatccctactggagcttctccctaagcagtggaggctcagccactgtaaggaggtaggcaaggccctgcagaaagaggggtgtggaaatctgggggctcccaggaagggccgctgctggagatggggttcttaccaggatgggctctgaagataagcagggaggatttgggagggcagagatgaggcccagagcttctggcagagggcatggcctgcgcaaaggtctgggggccggacagcctgcacgtattctgggaagcgggaaggagacacaggccttgtgtttctgaggcccgactttagactgtgccctgttggggaggggccagggaatgtctgaggctaggcctgaccctgcttcttaccccgtgggtgcagcagagccatgaagaagaagttagtggtgctgggcctgctggccgtggtcctggtgctggtcattgtcggcctctgtctctggctgccctcagcctccaaggaacctgacaaccatgtgtacaccagggctgccgtggccgcggatgccaagcagtgctcgaagattgggaggtgagcagggcagggcatgggacatgggccctgaaaactgggcaagtggacctgagcaataccttcacccccctgagactcagtttccccatgtgtaagcttcgcttggactctctcagtagcctttgggaaggggacagtgactccgagagcagggtgtgggtctctagagccaaacagggccccttttctcagttctaagagtctctgtctctttggaataaactgcactgttttgttgtttggttgttatttttacttatttcttcctatctatctatctatctatctatctatcatctatctatctatctatctatctatctatctatctatctatctatctatctatctactatctatctatctatttatttagagatggagttttgctctgttgccaggctggagtgcagtggtgcaatctcagttaactgcaacctccgcctcccaagttcaagtgattctcatgcctaagtctcccaagtagctgggattacaggcgtgcgccaccacgcccaacaaatttgtgtgtgtgtgtgtgtgtgtgtgtgtgtgtgtgtgtgtgtgtgtgtttccaagacagagtatcgctctgttacccaggctggagggcagtggtgcaatcttggcttactgcaacctccacctcccaggttcaagtgattctcctgcctcagcctccacagtagctgagactacaggcatgtgccaccatgcccagctaatttttgtatttttagtagagacagggttttgctatgttggccaggctggtcttgaactcctgaccttgtgatcctcccacctctgcctctcaaagtgctgggattaaggtgtgagccactgctcctggcctaattatggtgtttttagtagagatggggtttcaccatgttggtcaggctggtcttgaactcctgacctcaggtaatccacccacctgggcctcccaaagtgttgggattacaggtgtgagccaccacgcccggcttattctttttttttttttttttttttggttaggagacaatttctttctttctttttttttattttattttattattattatactttaagttttagggtacatgtgcacaatgtgcaggtttgttacatatgtacatatgtacacatgtgccatgttggtgtgctgcacccaccaactcatcatttagcattaggtatatctcccaatgccatccctcccccctccccccaaggaacactgttgcccaaacagggacatgaagggcttattcttttttgttgttgttttgttttgttttgttttttgagacggagtctcacgctgtctcccaggctggagtgcagtggcgcaatctcggctcgctgcaacctccgtctcctggattcaggtgattctcctgcctcagcctcctgagtagctgatattacaggcatccgccaccacgcccggctaatttttgtatttttagtagagacagggtttcaccataatggtctggctggtctcaaactcctgacctcaggtgatccgcctgccttggcctcccaaagtgctgggattacaggcatgagccaccatgcccggccgggcttattctttttttaaggtggagtcttactctgttacccaggctggagtataggggagcgatcatagcccactgcagcctcaaactcttgggtttaagtgatcttcccgcctcagcttcctaaagtgctgggattacaggtgtgagccatggtgcctggcttctactgttttattctattttagactcttatctcatgttatatacaaagatcagttccctcctaaagacttaaacagaaaaaatattatgtttttcatattttgagacagggtcttgttctgtcacccaggctggagtgcagtggcatgatcatagctcactgcagccttgaactcttgggcttaagcgatcctcccacctcagccccctgagtagctaggactacaggcgtgcatcacacctgactaattaaaaaagactgttttctagagatggtctcactctattgcccaggctggtcttgaactcctggcctcaagtgatcctccaccttggcctcccaaagtgctgagattacaggtgtaagccaccatctctagccgggaaaaaaaatgttattaataaagtatagcaatttccctttttgtcccagttataaaagtcatgtacatttgtttgcttgataaagaggaaactgtctgggcaaggtggtccacacctgtaatcccagcactttgggaggttgaggcgggcagaccacccgaggtcaggagttcgagaccagcctggccaacatggtgcactctgtccctactaaaaatataaaaagttagccgggcatggtggtgtgcgcctgtaatcccagctactcaggaggctgaggcaggggaatcacttgaacccaggaggcagaggttgcagtgagctaagatcatgccactgcactccagcctgggcaactgagtgaaactccctctcagaaaaaaaaaaagaaagaaaagaaaagaaaaagaggaaactgtaatcccagcactttgggaggttgaggcgataggattgctttagaccatgagttcgagaccagcttgggcaacatagaaagaccctatctctacaaaaaagacaaaaaattgccaggtgtggtggttcttacctgtagtcccagctactcagcagactgaagtgggaggattgcttgagcccaggaggtcaaagctgcattgagccaagactgtgccactgcacttcatcctgggtgacaaagtgagaccctgtctcataaaacaaaggctgggcacagtggctcatgcctgtaataccagcactttgggaggccaaggtgggtggatcacttgagcacaggagttcttgaccagcctgggcaacatgatgaaaccccatctctacaaaatacacaaacaaacaaaattggctgggcatggtggcatgtgcccatagtcccagctacttgggaggctgagatgggagggtcaattgagcccaggagactgaggctgcagtgatctgagatcacaccactgcactccagcctgagcaacaaagagagactttgtctcaaaaaaaaaaaaaaaaaaaaaaaaaaaaagaggccaaggcaggcggatcatgaggtcaagagatagagaccagcctggccaacatggtgaaaccccgtctctactaaaaatacaaaaattagctgggcgtggtggcatgcacctgtagtcccagctactcaggaggctgaggcaggagaatggcttgaacccgggaggcagaggttgcagtgagctgagatcgtgccactgcactccagcctggcaatagagcaagactccatctcaaaaaaaaaaaaaaaaagaaagaaagaaactaaaaacaaaaaccccaaaactcgaatggacttctcttccatcctcctttgggcaggtgggcagcagggtgtgtatgcggggccagggtggaagcctgcaggttctcatgcctttatgtgccacatggcagggatgcactgcgggacggtggctctgcggtggatgcagccattgcagccctgttgtgtgtggggctcatgaatgcc

SEQ ID NO: 12256 - DNA, 831 bp, Homo sapiens
ccagaccgggcgtcgggtgagcccagaagtgagagcagttggctgtgccccagtgctgtgtgacccagaggcgccgctcaccctctctgagctggtggacatcataggtggggaagctcaggtcagggcactcccatgagtgtctggaggcctgagtcccattctcagctctgccatatgcttgctgcgctctagaggagttcctcttcctctccaagcctcggtttatgtacccgtgcagtgggagtgagttgcacttcggggtgaagggggcaagacttgtgtgggcgcatcctgcagaaggatcccacagcaaggcaagtgaggtgctgccgtcatccaggctggacagttcagtgatttgcctgaggccccacagcagagttcaactggagacagagaaaccagctagaggcagagggaggtaacacggagtcccccagaaaggtctgggctgcgcgtgcttcaggcttcagcagagtgtgagggagaccccggttatttcctcagctatttccaccaaatcctcctgtctttcgtggccaacaccccaggcaaggcttggggcccccgtctgctgctggacgagccatgaagaagaagttagtggtgctgggcctgctggccgtggtcctggtgctggtcattgtcggcctctgtctctggctgccctcagcctccaaggaacctgacaaccatgtgtacaccagggctgccgtggccgcggatgccaagcagtgctcgaagattgggagggatgcactgcgggacggtggctctgcggtggatgcagccattgcagccctgttgtgtgtggggctcatgaatgcc

SEQ ID NO: 12257 - DNA, 17271 bp, Homo sapiens
ggtgtgctgctggatgaccagaccgggcgtcgggtgagcccagaagtgagagcagttggctgtgccccagtgctgtgtgacccagaggcgccgctcaccctctctgagctggtggacatcataggtggggaagctcaggtcagggcactcccatgagtgtctggaggcctgagtcccattctcagctctgccatatgcttgctgcgctctagaggagttcctcttcctctccaagcctcggtttatgtacccgtgcagtgggagtgagttgcacttcggggtgaagggggcaagacttgtgtgggcgcatcctgcagaaggatcccacaggtgggcagagccctgggttctttatccgactgggtctgggctgggggcctctgtttcttggctgatgagtttatgtgagtttgagtgaggtatgcgagtgggtgaaggagggctggggggagtcacctgacttgtgcgaagaagctcttgagagagccgtggcttcttggaattaagaggaaagagtgcagcatgaacagacaggccctggaggatctggcagccctgagtgggggcggggggtcagctctggagtagagccagagctgtgatggggttgggggaccctgtgtccttgggccatgcttgcctcgctcctgggttctgtttgtggctgtggattggggtggggcagggccggttgtgcgaggggtcattgcccaactccagggggcgcctgccacctctcagctatatatatagggatatatatagttctttcgacaggtttccagcaggtagtggttattaaatcttactgaaggggtgttttttctgattctcggctctgtgccgcaagggtggaaactgtgagagacagattccaactccacgtctgggtagtaagcatccagtccagggctgtaggcagtcctggggaagacgccagagatctgtgcattctcatatcgagggatagcgactccaggctgggggctggcagggtaaggggtgggtgggtcctgggcttacccgcaggtctgcagacttcctggggccagctgacctcgtaaaatcccttttgtctaagcttcagtttcctgcctgtgaatggggttggggctgtgctctggtttcacccttgtggctctggggttgtggtgacaaagccatcaagctgggttgaaggattaaccaggaaacttcagactggctgccgtgtctacctcttcctcatactcctctctctgctgcatcctgggaagctgctctgctcagcctaaatgaggctcagttgtgtgtgtgcgcacgtgcttgcacgtgtgttggaagtgggtgatactgacaccagagtctgtgtctctgggtgagtgaggcttgcacatttctcgggacagggaactcactaccttatgtgcccaggacaagagctgtggggtctggagaagacttctaggccagcccctgcagtccttcctcaggtgacatggcttccccagacccacttccccctaggtgccctctctgcattcagggggtagagggctgactgggacagaatgtgacacactcagcatgtgaggaaaagcctccttcattctgtaggccctacctctattaacatgtcctttgataaagtgcctcccctcctgtctcccctctctggaatcctcagctgctgccaggcttcagctgtgccccattgaaggcagctctgtctccctactttccccagcccagggttttccttttggggtcagctgcagggatctgggccatcctttgcccactcagactttctttctgcccacctgctgctgtgaatcctgtatgtcatatatatatataaaatatgtaatatattatatattatatgtaatatataatatataaagtatattatataatatgtattatattatatattatataatatgtaatatattatataatatataatatgtattatattatatattatataatatgtaatatattatataatatataatatgtattatattatatattatataatatgtattatattatatattatataatatgtattatatattatataatatgtattatatattatataatatgtattatatattatataatatgtattatatattatataatatgtattatatattatataatatgtattatatattatataatattataatatgtattatatattatataatattatataatatgtattatatattatataacaatatataatgtgtattatatataatataatattatataatgtgtattatatattatataatattatataatgtgtattatatattatataatattatataatgtgtattatatattatataatattatataatgtgtattatatatataatattatataatgtgtattatatatataatattatataatgtgtattatatatataatattatataatgtgtattatatatttaatattatataatgtgtattatatatttaatattatataatgtgtattatatattatataatattatataatgtgtattatatattatataatattatataatgtgtattatatattatataatatatgatgtgtattatatattatatattatatgatgtgtattatatattatataatatatgatgtgtattatatattatataatatatgatgtgtattatatattatataatattatatgatgtgtattatatattatatataatatataatattatatataatatattacatataatatatcatatattatatttatataatttatataatatatcatatattatatttatataatttatataatatatcatatattatatttatataatttatataatatatcatatattatatttatataatttatataatatatcatataaatatattatatatagtattatatatataaaattatactttaagttctagggtacatgtgcacaacgtacaggtttgttacatatgtatacatgtgccatgttggtgtgctgcacccattaacttgtcatttacattaggtatatctcctaatgctatccctccccgttcccctcaccccacaacaggccccagtgtgtgatgttccccttcctgtgtccaagtgttctcattgtttaattccaacctatgagtgagaacatgcatgtcttatatgctctcaggcagagaggaaactgctgagcaggccggggcaggggacagagccctgtggctctccactttagacccctcctggctgactgccatggaatgcagccacttagcagggccaaatcccctgatgttcctgttggctgtctagccttcagggacaggtcatgggaccttggttcctgccctgtcatcttcccagtcaccctgatcttcacggggaggaatagcctgggaaaggacttggtcacagcacctccaccctagggctattgaggatctcacagttgtgtgtctggtgggttctgtccagagcccatttgagagcagtggatgacaggacaggcctatgtgacccaggcaggcagcaatattgggtcagccttcatgtccccttctgtcagctggggcagcctggaagcatgattgtggggtaggtgttatgggcacggaatagacctcaggtggaggctgcaggggctctccggcaccgtagacacagcaggcccaggagcaggggagggagccatgactcagggagactctggcccatatccttggcagatgagggccacaggggaatgggcagcactgtccaaagtcccctgggctgggtccgcagctgttcctggctcagacttcttggtgggctggtcagaaacatgcagtaacttggggcagttaccaggtggccaagcctgcactgctgggctctgtgagcttgggccagctcaggccctctctgggccctgcctttctgggctgttcgggtggttccttgggcctggggtgctaatgtttctggatgggcagcagaaccagtctgcactcagggccccaggccatgttcccggaacacacctttagcattgacagcagcgtgtggtgaggccccttaggctgggttctggtctagtgccaggggcaccactactccaccgcctccagagccatctctgggacactggctgtgagttcagatgttctgaacagggacagggagagccagagggaaccagcctggggctcactggaggggctcgtgggcagacagcgccctttggagggaactgagtctgaaaggaaggaaaccctttccccggctcatagcacctgccatccagggccctcccagggctgcgtgaactttagtcacgtggtgacaggccgagtcaccatgccaagtcactgtgcgcctccttgctgctgtgacgtcagcttccccatcctcccagccaggctggacctccgtgagaggcctgcctgtcctgcaccctgtgcagatgcctcccactgtccgccggggctgctgggcacgccctggctggtctcttggactaggtaagctcatgagtcctctggccgctcctgctccttccctgcctctgctcctcctcggaggtggccacccccagatcccagtcccaattcggaggccccctgaggagtgctgcagggggccacaggcgtggctctgagccactctggagagtggcggggggcccagccagttctgtggctgggactttcccaggcagacaagtctgtctcttcctccccagcgggtgcagcccagaactgtcttctgaggaagaggtgctctcctgggcccccactgtccccaggcctcaggtaagcccatcagggtcccaaggaagggggtctgggtttgaggccaaccatggcagctgacctactttctagcctcagtttcccctagtgtgtgcagctctcacgctgtttgggtgagaaccaggcctctgggcttggacattctttcagtgagtttttagggtggagggatgggaaatggaagcccaggacctcagcagggtgtcttcctccgatccggggacatctgcctgtgggaggctgggcccaccctcccttgctgacctgccctgggaggaagggacagggcccagcactgcctactcccctccctgttcttcccagcagtctgagcctggctgggtgtcccctgctcctccagcagcctacttgggcctttgggtagacagattaacagacaggcgaggctgggtcatggttggaccaccccaggaccctgaccgggggctcagctcatgaccctgagcctgggagagatgaggccatgccctccagggcactcagcatgacccggcccagtggacgggactgggtagcttccttggtgcagggggctgtcatgctaggacggggtcactgaccaggccaggcccctgccccatgacttgtggtggaaatgtccttttgtttttgtttttttgcattttttttgagacggagtttcactcttgttgcccaggctggagtgcagtggtgcaatcttgcctcactgcaacctccacctcctgggttcaagcaattctcctgcctcagctcctgagtagctgggattacaggcacctgccaccatgcctggctaattttttgtatttttagtggagatgggggtttcaccatgttggccaggctgttctcaaactcttcacctcaggtgatccacctgcctctgcctcccaaagtgctgggattataggtgtgagccactgcacccggccatgtgatgggaatgttctgtgtccataatagatgctgcatattgctggcccagctcctgaggctctttggacctccaggaatcggtgtctctatcaggaacccttaaccctgacccggactcccagctgggacccggggtgtcggagtggcaagagcgctgtcaggcctggtgaagggtgtgagctgtccaacggggcagggaggaggcagggcctgttctgcagttggacagacagagccctctagctgctttctggaagactgaagggcaggtgatgttggagggagggagtgcaggcaggggctgtgagggagttcaggtcagaaacaggtggcgcctggattcaggctgtggtggtcacggtggggatgaggggctgctttggattgtgctggggatgtggggtggtgcgctgctgcatgactactgccaggtctctctgctcttagtgtctgcatccagggctgggagggggtcaaatgaatcacactatcggccccaggcccaccaagcctggggaggtggccacccttccatgatggcatttggatgttccctgtgtgtggggagggcacagggactccattcgtagaccacctctgggacagtgtgtctgcctctgaggtcagacgctctgcactgggacagggtggagtggagggaaatccagcttggggctcattggaggggcttgctggcagacaccgccctttgtgggaaactgactgtgggagaggggaaccccaacctctgtcaccacatccctcttccctgttgtcacacctgtcacctgctgccatagccatgagacttcccaagggtcactgctgccactcactgcacagcctggaagggagtccacaggggacatacagtgagcaagagacctgtgccactcaggcctcctgggggtgtccccagtgcagccatgatgataatcacagctaccattcaccaagccctgcccacagtctaacctactctattcacaacactcccagcagcaaggcaagtgaggtgctgccgtcatccaggctggacagttcagtgatttgcctgaggccccacagcaggtgagtggcaagtccagcatcagagcagggcaggctggcggtgccccctgagccccctttgccatgctgaccacatgcacatcctgggcttctgcaggaatgccctgtcccctacctgccctgctccgtgcaaaaccctctttgagctgtgcctgggagacatgctgagagaattcatggaaacaaatgtgttactgacagcctctttgcctccagagttcaactggagacagagaaaccagctagaggcagagggaggtaacacggagtcccccagaaaggtctgggctgcgcgtgcttcaggtaacctcccttgaccttcaggagaacgagaaggctgcctgatcagagagtccctgaagaagattctgtggctacaggcttcagcagagtgtgagggagaccccggttatttcctcagctatttccaccaaatcctcctgtctttcgtggccaacaccccaggcaaggcttggggcccccgtctgctgctggacggtaagtcctggccccgtggcagtgaatctgtggggcgctctgattgtgggcactatggaagctaaaccccatgctccaggtggggtggagggtcttcagaggactcctggacagtgccaggctctaggctggggtgggggacacaggagaaaccaggccaggcccatccctactggagcttctccctaagcagtggaggctcagccactgtaaggaggtaggcaaggccctgcagaaagaggggtgtggaaatctgggggctcccaggaagggccgctgctggagatggggttcttaccaggatgggctctgaagataagcagggaggatttgggagggcagagatgaggcccagagcttctggcagagggcatggcctgcgcaaaggtctgggggccggacagcctgcacgtattctgggaagcgggaaggagacacaggccttgtgtttctgaggcccgactttagactgtgccctgttggggaggggccagggaatgtctgaggctaggcctgaccctgcttcttaccccgtgggtgcagcagagccatgaagaagaagttagtggtgctgggcctgctggccgtggtcctggtgctggtcattgtcggcctctgtctctggctgccctcagcctccaaggaacctgacaaccatgtgtacaccagggctgccgtggccgcggatgccaagcagtgctcgaagattgggaggtgagcagggcagggcatgggacatgggccctgaaaactgggcaagtggacctgagcaataccttcacccccctgagactcagtttccccatgtgtaagcttcgcttggactctctcagtagcctttgggaaggggacagtgactccgagagcagggtgtgggtctctagagccaaacagggccccttttctcagttctaagagtctctgtctctttggaataaactgcactgttttgttgtttggttgttatttttacttatttcttcctatctatctatctatctatctatctatcatctatctatctatctatctatctatctatctatctatctatctatctatctatctactatctatctatctatttatttagagatggagttttgctctgttgccaggctggagtgcagtggtgcaatctcagttaactgcaacctccgcctcccaagttcaagtgattctcatgcctaagtctcccaagtagctgggattacaggcgtgcgccaccacgcccaacaaatttgtgtgtgtgtgtgtgtgtgtgtgtgtgtgtgtgtgtgtgtgtgtgtttccaagacagagtatcgctctgttacccaggctggagggcagtggtgcaatcttggcttactgcaacctccacctcccaggttcaagtgattctcctgcctcagcctccacagtagctgagactacaggcatgtgccaccatgcccagctaatttttgtatttttagtagagacagggttttgctatgttggccaggctggtcttgaactcctgaccttgtgatcctcccacctctgcctctcaaagtgctgggattaaggtgtgagccactgctcctggcctaattatggtgtttttagtagagatggggtttcaccatgttggtcaggctggtcttgaactcctgacctcaggtaatccacccacctgggcctcccaaagtgttgggattacaggtgtgagccaccacgcccggcttattctttttttttttttttttttttggttaggagacaatttctttctttctttttttttattttattttattattattatactttaagttttagggtacatgtgcacaatgtgcaggtttgttacatatgtacatatgtacacatgtgccatgttggtgtgctgcacccaccaactcatcatttagcattaggtatatctcccaatgccatccctcccccctccccccaaggaacactgttgcccaaacagggacatgaagggcttattcttttttgttgttgttttgttttgttttgttttttgagacggagtctcacgctgtctcccaggctggagtgcagtggcgcaatctcggctcgctgcaacctccgtctcctggattcaggtgattctcctgcctcagcctcctgagtagctgatattacaggcatccgccaccacgcccggctaatttttgtatttttagtagagacagggtttcaccataatggtctggctggtctcaaactcctgacctcaggtgatccgcctgccttggcctcccaaagtgctgggattacaggcatgagccaccatgcccggccgggcttattctttttttaaggtggagtcttactctgttacccaggctggagtataggggagcgatcatagcccactgcagcctcaaactcttgggtttaagtgatcttcccgcctcagcttcctaaagtgctgggattacaggtgtgagccatggtgcctggcttctactgttttattctattttagactcttatctcatgttatatacaaagatcagttccctcctaaagacttaaacagaaaaaatattatgtttttcatattttgagacagggtcttgttctgtcacccaggctggagtgcagtggcatgatcatagctcactgcagccttgaactcttgggcttaagcgatcctcccacctcagccccctgagtagctaggactacaggcgtgcatcacacctgactaattaaaaaagactgttttctagagatggtctcactctattgcccaggctggtcttgaactcctggcctcaagtgatcctccaccttggcctcccaaagtgctgagattacaggtgtaagccaccatctctagccgggaaaaaaaatgttattaataaagtatagcaatttccctttttgtcccagttataaaagtcatgtacatttgtttgcttgataaagaggaaactgtctgggcaaggtggtccacacctgtaatcccagcactttgggaggttgaggcgggcagaccacccgaggtcaggagttcgagaccagcctggccaacatggtgcactctgtccctactaaaaatataaaaagttagccgggcatggtggtgtgcgcctgtaatcccagctactcaggaggctgaggcaggggaatcacttgaacccaggaggcagaggttgcagtgagctaagatcatgccactgcactccagcctgggcaactgagtgaaactccctctcagaaaaaaaaaaagaaagaaaagaaaagaaaaagaggaaactgtaatcccagcactttgggaggttgaggcgataggattgctttagaccatgagttcgagaccagcttgggcaacatagaaagaccctatctctacaaaaaagacaaaaaattgccaggtgtggtggttcttacctgtagtcccagctactcagcagactgaagtgggaggattgcttgagcccaggaggtcaaagctgcattgagccaagactgtgccactgcacttcatcctgggtgacaaagtgagaccctgtctcataaaacaaaggctgggcacagtggctcatgcctgtaataccagcactttgggaggccaaggtgggtggatcacttgagcacaggagttcttgaccagcctgggcaacatgatgaaaccccatctctacaaaatacacaaacaaacaaaattggctgggcatggtggcatgtgcccatagtcccagctacttgggaggctgagatgggagggtcaattgagcccaggagactgaggctgcagtgatctgagatcacaccactgcactccagcctgagcaacaaagagagactttgtctcaaaaaaaaaaaaaaaaaaaaaaaaaaaaagaggccaaggcaggcggatcatgaggtcaagagatagagaccagcctggccaacatggtgaaaccccgtctctactaaaaatacaaaaattagctgggcgtggtggcatgcacctgtagtcccagctactcaggaggctgaggcaggagaatggcttgaacccgggaggcagaggttgcagtgagctgagatcgtgccactgcactccagcctggcaatagagcaagactccatctcaaaaaaaaaaaaaaaaagaaagaaagaaactaaaaacaaaaaccccaaaactcgaatggacttctcttccatcctcctttgggcaggtgggcagcagggtgtgtatgcggggccagggtggaagcctgcaggttctcatgcctttatgtgccacatggcagggatgcactgcgggacggtggctctgcggtggatgcagccattgcagccctgttgtgtgtggggctcatgaatgcccacagcatgggcatcgggggtggcctcttcctcaccatctacaacagcaccacacgtgagtgcctcgggagaggagagggagaggggcagggggtgtgggttgggccgaggcacagctgggcggtccccaggctcacgtggcataaagggtttgggtgggcgggcctgcctacctgcttctccttctaggaaaagctgaggtcatcaacgcccgcgaggtggcccccaggctggcctttgccaccatgttcaacagctcggagcagtcccagaagggtaagccatgcggcagacttggggcgtgggtgcagagctggctgagccaccgggaaggggccttgcccacaggagcctgctcccgtcagggttcaggggcagttctgtcaccccccatcccttcctgtccccatagcaccctcccacaatgagtggtcaggaccatcatcaccatggtaaagggccgggagcttctgttatttctgctaaggcctccggggccactctgtgcagcacatggagagaataattattatgctagcagacctcatggaccagggctcactggggcccacactctgctctgtgcttttcacccatgagcctctcacaaccctccctgctcctttgggctaggggatgctgtgtggattcccattttacagggtggggatgctgaggctcagacaggtcacgcaaatcagttgaggtcacacagctgggaggtggtgaagctaaaattgaacccaggctgtctataccgtgccttttcaacaggcatcccattcactcatttgttcatttgtggggatggtgctctagaatgtgaggtggagtctctcttttctaatctggtcttaagtggagaggaggcccccaaattccccaggtacctgaagggaagccactgtccatccaggaagccactgtctgtcctcaaaggtggtacagtagattgtgagataaaagttggaggatgggagggtctcaacaactcacgcctctaatcctagcactttaggaggccaagtcaggaggagcgcatgagcccaggagtttgagacctgcctgggcaacatagcaagactccatctctacaaaaaacggaaaaaaaaattagctaggtgtggcggtgtgtgcttatgttcccagctacttgggaggctaaggtgggaggatcacttgagcccaggaggttgaggctgcagtgagccatgattgtaccactacactctagcttgggcaacaaagtgagaccctgccaaaaaaaaaaaaaaggctgggcctttttttcacaggctcacgcctgtaatcccagcactttgggaggctgaggcagatggatcacctaggtcaggagttcaagaccagcctggccaacatagtgaaaccctttctctactaaaagtacaataattagtcaggcgtggtggcacaggcctgtaatcccagctactcaggaggctaaggcaggagaatcgcttgaacccaggaggaggagattgcagtgagccgagatcatgccactgcactccagtctgggcaacaagaatgaagctccgtctcaaaaaaaaaaaaagttggaggatggaggggcaggacacactcaccatagcaggtcttagacttcaggtgggggtcctgggtggtgccctttggagtcttctgcaacatactcaatctttgacttttttcttttttttttcttttttttttttttgtcacccagactgtcgcccaggctggagtgcagtggcacgatctcggctcactgcaagctctgcctcctgagttcacgccattctcctgcctcagcctcccgaatagctgggactacaggcgcctgccaccacgcccagctaattttttgtattttttagtagagacgggttttcactatgttgcccaggctggtctcgatctcctgacctcgtgatcccccggcctcggcctcccaaagtgctggaattacaggcgtgagccactgtgcccgatcaatctttcatttttttttaatactcattgagaaactcagcatttgtagacatgaagttgctcagggtaagagaatgcgggaatcataggcttggcaccttgtggactcttagaatcatttatttaacttgaatgtattgagtattctcttaaagaatcagctgttgttcctgaagctggggtgaaaaacaaagatggcagatgaaatctgtgacactccaggtgggaggagaaactaggcaggtgcaggtgtgttacgggctgtagaaaaacaggtctggagggcctcaaaatctgggactgtatagagggtgacctagtcagggaaggggacatctgagcaaagacccagaggcagagatggggtcaggggagttatctcctggtctgctatccaggtgtgatggcagggacagagccctgtggggagctggggaggctgcagcaagtgatccaagggaaatggcccaggttgtgtgggatctcttaggttatggtgaagcctctgcttcctgtctgagggaagtgggggctcgtggagtatgtgagtggaaggggatggatctggcctatggaccccgtgggttgctgtgtaaggggcagggagcatgtggggacctgtctggaggtcactgcagtaattcgtggagagggtgctgggaagtggctgacgctggacagacacacttggaagtggagtctgtggatttgaggatgggttgggtgtgacgcttgtgtagggagtccccggggacccctgatcttttgtctgtacctggaaggatggggtgaccctaatggagacaggcagggttctcaggaagcaggttgagcagacactcaggagctcggttttgggcacgttgaagtttgagatgctttcttcgagcaggcaggtagatcctcaggtctggtgatcggaggagcagcccaggccagcaggtcaatttgagagttgtcagtgcataaatggaggctgaagctcagatgtcaagcagaccaccaggagagagagcaaagacagaggggagagtaggagctaggatggcaggcgggggagactcgggtggagccaggtgctgggatgcaggggcagctctcagggaaagtgatgagcccagtaaagctgagagggggcactgggtctggcagtgtgggggtcaccagagaacttggcaagtgtgctggcatgagagtctgattggcctgaggtcaggagaagattttttttctgatattgatacatgatattttctatatttatgggtacatgtgagtgcttgttacatgcatagagtgtataatgatcaaggcagggtatttggagtctccgtcaccttgaatatttttcatttctgggtgttagcaccatagtcctctcttcgttactttgaaatatacaaaatactgttgctaagcatcgtcaccctggtctgctatcaaagattagaacttctcctgtcttggctgggcacggtggctcacacctgtcatcccagcaccttggaaggctgaggtgggtggatgacctgaggtcaggagtttgaaaccagcctggccaacatggcaaaaccccatctgtactaaaaatacaaaaattagcctggcgtgctggcctgtgcctgtaataccagctactcgggaggctgaggcaggagaatcgcttgaacctgggaggcggaggttgtagtgagctgagatcatgccactgcactgtagtctgggagacagagcaagactccatctcaaaaacaaacaaagaagaaaaacaaaacaaaacaaaaaataacttctgtctaactacaaggtggaaggaatcatgtgctgggtgtcagaccttccgggatgtatgtgcagcttctaggaattgaaaccaccagctcttggaaacttgtgccaggcttcagggtgggagaggcagttctagagccacagctgccaagccaagccaaatggccccatcatctctcgcaagagcaggagagtccctgggggcagaggccatagttgtacctttctgggcaaagggtcagtgtctgtagtgtccttatgggcagcggggctcaggggggaagcaggcccaggggtgtgtttccaatgacctcctcaaaagtcagaactggaaggcaaaaccccttataggctgagtgcacctgtaatcccagcatgttgggatgctgaggtgggaggattgcttgaggccagagtttgagaccagtcttggcaacgtagcaagacccctgtctctacaaaaaataaaaataaaaaattaggctgggaatggtggctcacgcctgtaatcccagaactctgagaggctgaggaggatggatcacctgatgttaggagttcaagaccagcctgaccaacctggtgaaaccccgtctctactaaaaatacaaaaattagcaaggcatggtggtgcatgcctgtaatcccagctacttgggaggctgaggcaggagaattgcttgaactcgggaggtggaggttggagtgagccaagattgtgccattgcactccagcctgggcaacaagagtgaaactccatctcagaaaaaaaaaaaaaaaaaaaaaagccctgtgtagtggggtatgtctgtagtcttaggtacttcagaggctgaggtaggaggatcgcttgagcctgggaagccaaggctgcagtgagccatgattgcaccactgcactccagctgggacaacagaatgagaccctgtctcaaaacagacaaacaaacaaaaacccttatagttggatggagaaactgaggctgggagaggggacaggacggaggttaaggctcagtcttgcctctctggggccgtagaaaagaggcagggagccctttcttggggctggctgtgtcttgaaggtggcctgtgcttgacctcggtcaaggtgggatctgctcttgttttggcacattctcgtggagcccatgagtcttacaggataaggccttgtggtcagtgagatgggagggggtctggcctggcacaggattttagacatgcaggcacctgcacagacagacacctcatcctgggacagcaaaacccagccgcatgctactgcttcccctgctgtgccctcctcagacatccctggtccatgtacactcctacctgctgagcccctcctaaaaaaaaaaattaaacatcccctcctaaaaaaaaacaattaaaattaaaaaataaatttaaaaattaaaaatccccttctgctaggtgtgctgttcacgcctgtaatctcagcgactcaggaggctgaggtgggaggatcgcttgaatccaggagttcgagatcgggctgggcaagatggcaagaccccaactcaaaaaagaaaaaaaaaaaatctttcctcctaagcctcattgccccatctgtaaaatgagtcagggactgtgcctgggatgctgcctgcgagagatcccgatgtcccccactcagggtcactaactatggctctctctccccaggggggctgtcggtggcggtgcctggggagatccgaggctatgagctggcacaccagcggcatgggcggctgccctgggctcgcctcttccagcccagcatccagctggcccgccagggcttccccgtgggcaagggcttgg

SEQ ID NO: 12258 - DNA, 1078 bp, Homo sapiens
ggtgtgctgctggatgaccagaccgggcgtcgggtgagcccagaagtgagagcagttggctgtgccccagtgctgtgtgacccagaggcgccgctcaccctctctgagctggtggacatcatagcgggtgcagcccagaactgtcttctgaggaagaggtgctctcctgggcccccactgtccccaggcctcagcagcaaggcaagtgaggtgctgccgtcatccaggctggacagttcagtgatttgcctgaggccccacagcagagttcaactggagacagagaaaccagctagaggcagagggaggtaacacggagtcccccagaaaggtctgggctgcgcgtgcttcaggtaacctcccttgaccttcaggagaacgagaaggctgcctgatcagagagtccctgaagaagattctgtggctacaggcttcagcagagtgtgagggagaccccggttatttcctcagctatttccaccaaatcctcctgtctttcgtggccaacaccccaggcaaggcttggggcccccgtctgctgctggacgcagagccatgaagaagaagttagtggtgctgggcctgctggccgtggtcctggtgctggtcattgtcggcctctgtctctggctgccctcagcctccaaggaacctgacaaccatgtgtacaccagggctgccgtggccgcggatgccaagcagtgctcgaagattgggagggatgcactgcgggacggtggctctgcggtggatgcagccattgcagccctgttgtgtgtggggctcatgaatgcccacagcatgggcatcgggggtggcctcttcctcaccatctacaacagcaccacacgaaaagctgaggtcatcaacgcccgcgaggtggcccccaggctggcctttgccaccatgttcaacagctcggagcagtcccagaagggggggctgtcggtggcggtgcctggggagatccgaggctatgagctggcacaccagcggcatgggcggctgccctgggctcgcctcttccagcccagcatccagctggcccgccagggcttccccgtgggcaagggcttgg

SEQ ID NO: 12259 - DNA, 19535 bp, Homo sapiens
ggcccaccaagcctggggaggtggccacccttccatgatggcatttggatgttccctgtgtgtggggagggcacagggactccattcgtagaccacctctgggacagtgtgtctgcctctgaggtcagacgctctgcactgggacagggtggagtggagggaaatccagcttggggctcattggaggggcttgctggcagacaccgccctttgtgggaaactgactgtgggagaggggaaccccaacctctgtcaccacatccctcttccctgttgtcacacctgtcacctgctgccatagccatgagacttcccaagggtcactgctgccactcactgcacagcctggaagggagtccacaggggacatacagtgagcaagagacctgtgccactcaggcctcctgggggtgtccccagtgcagccatgatgataatcacagctaccattcaccaagccctgcccacagtctaacctactctattcacaacactcccagcagcaaggcaagtgaggtgctgccgtcatccaggctggacagttcagtgatttgcctgaggccccacagcaggtgagtggcaagtccagcatcagagcagggcaggctggcggtgccccctgagccccctttgccatgctgaccacatgcacatcctgggcttctgcaggaatgccctgtcccctacctgccctgctccgtgcaaaaccctctttgagctgtgcctgggagacatgctgagagaattcatggaaacaaatgtgttactgacagcctctttgcctccagagttcaactggagacagagaaaccagctagaggcagagggaggtaacacggagtcccccagaaaggtctgggctgcgcgtgcttcaggtaacctcccttgaccttcaggagaacgagaaggctgcctgatcagagagtccctgaagaagattctgtggctacaggcttcagcagagtgtgagggagaccccggttatttcctcagctatttccaccaaatcctcctgtctttcgtggccaacaccccaggcaaggcttggggcccccgtctgctgctggacggtaagtcctggccccgtggcagtgaatctgtggggcgctctgattgtgggcactatggaagctaaaccccatgctccaggtggggtggagggtcttcagaggactcctggacagtgccaggctctaggctggggtgggggacacaggagaaaccaggccaggcccatccctactggagcttctccctaagcagtggaggctcagccactgtaaggaggtaggcaaggccctgcagaaagaggggtgtggaaatctgggggctcccaggaagggccgctgctggagatggggttcttaccaggatgggctctgaagataagcagggaggatttgggagggcagagatgaggcccagagcttctggcagagggcatggcctgcgcaaaggtctgggggccggacagcctgcacgtattctgggaagcgggaaggagacacaggccttgtgtttctgaggcccgactttagactgtgccctgttggggaggggccagggaatgtctgaggctaggcctgaccctgcttcttaccccgtgggtgcagcagagccatgaagaagaagttagtggtgctgggcctgctggccgtggtcctggtgctggtcattgtcggcctctgtctctggctgccctcagcctccaaggaacctgacaaccatgtgtacaccagggctgccgtggccgcggatgccaagcagtgctcgaagattgggaggtgagcagggcagggcatgggacatgggccctgaaaactgggcaagtggacctgagcaataccttcacccccctgagactcagtttccccatgtgtaagcttcgcttggactctctcagtagcctttgggaaggggacagtgactccgagagcagggtgtgggtctctagagccaaacagggccccttttctcagttctaagagtctctgtctctttggaataaactgcactgttttgttgtttggttgttatttttacttatttcttcctatctatctatctatctatctatctatcatctatctatctatctatctatctatctatctatctatctatctatctatctatctactatctatctatctatttatttagagatggagttttgctctgttgccaggctggagtgcagtggtgcaatctcagttaactgcaacctccgcctcccaagttcaagtgattctcatgcctaagtctcccaagtagctgggattacaggcgtgcgccaccacgcccaacaaatttgtgtgtgtgtgtgtgtgtgtgtgtgtgtgtgtgtgtgtgtgtgtgtttccaagacagagtatcgctctgttacccaggctggagggcagtggtgcaatcttggcttactgcaacctccacctcccaggttcaagtgattctcctgcctcagcctccacagtagctgagactacaggcatgtgccaccatgcccagctaatttttgtatttttagtagagacagggttttgctatgttggccaggctggtcttgaactcctgaccttgtgatcctcccacctctgcctctcaaagtgctgggattaaggtgtgagccactgctcctggcctaattatggtgtttttagtagagatggggtttcaccatgttggtcaggctggtcttgaactcctgacctcaggtaatccacccacctgggcctcccaaagtgttgggattacaggtgtgagccaccacgcccggcttattctttttttttttttttttttttggttaggagacaatttctttctttctttttttttattttattttattattattatactttaagttttagggtacatgtgcacaatgtgcaggtttgttacatatgtacatatgtacacatgtgccatgttggtgtgctgcacccaccaactcatcatttagcattaggtatatctcccaatgccatccctcccccctccccccaaggaacactgttgcccaaacagggacatgaagggcttattcttttttgttgttgttttgttttgttttgttttttgagacggagtctcacgctgtctcccaggctggagtgcagtggcgcaatctcggctcgctgcaacctccgtctcctggattcaggtgattctcctgcctcagcctcctgagtagctgatattacaggcatccgccaccacgcccggctaatttttgtatttttagtagagacagggtttcaccataatggtctggctggtctcaaactcctgacctcaggtgatccgcctgccttggcctcccaaagtgctgggattacaggcatgagccaccatgcccggccgggcttattctttttttaaggtggagtcttactctgttacccaggctggagtataggggagcgatcatagcccactgcagcctcaaactcttgggtttaagtgatcttcccgcctcagcttcctaaagtgctgggattacaggtgtgagccatggtgcctggcttctactgttttattctattttagactcttatctcatgttatatacaaagatcagttccctcctaaagacttaaacagaaaaaatattatgtttttcatattttgagacagggtcttgttctgtcacccaggctggagtgcagtggcatgatcatagctcactgcagccttgaactcttgggcttaagcgatcctcccacctcagccccctgagtagctaggactacaggcgtgcatcacacctgactaattaaaaaagactgttttctagagatggtctcactctattgcccaggctggtcttgaactcctggcctcaagtgatcctccaccttggcctcccaaagtgctgagattacaggtgtaagccaccatctctagccgggaaaaaaaatgttattaataaagtatagcaatttccctttttgtcccagttataaaagtcatgtacatttgtttgcttgataaagaggaaactgtctgggcaaggtggtccacacctgtaatcccagcactttgggaggttgaggcgggcagaccacccgaggtcaggagttcgagaccagcctggccaacatggtgcactctgtccctactaaaaatataaaaagttagccgggcatggtggtgtgcgcctgtaatcccagctactcaggaggctgaggcaggggaatcacttgaacccaggaggcagaggttgcagtgagctaagatcatgccactgcactccagcctgggcaactgagtgaaactccctctcagaaaaaaaaaaagaaagaaaagaaaagaaaaagaggaaactgtaatcccagcactttgggaggttgaggcgataggattgctttagaccatgagttcgagaccagcttgggcaacatagaaagaccctatctctacaaaaaagacaaaaaattgccaggtgtggtggttcttacctgtagtcccagctactcagcagactgaagtgggaggattgcttgagcccaggaggtcaaagctgcattgagccaagactgtgccactgcacttcatcctgggtgacaaagtgagaccctgtctcataaaacaaaggctgggcacagtggctcatgcctgtaataccagcactttgggaggccaaggtgggtggatcacttgagcacaggagttcttgaccagcctgggcaacatgatgaaaccccatctctacaaaatacacaaacaaacaaaattggctgggcatggtggcatgtgcccatagtcccagctacttgggaggctgagatgggagggtcaattgagcccaggagactgaggctgcagtgatctgagatcacaccactgcactccagcctgagcaacaaagagagactttgtctcaaaaaaaaaaaaaaaaaaaaaaaaaaaaagaggccaaggcaggcggatcatgaggtcaagagatagagaccagcctggccaacatggtgaaaccccgtctctactaaaaatacaaaaattagctgggcgtggtggcatgcacctgtagtcccagctactcaggaggctgaggcaggagaatggcttgaacccgggaggcagaggttgcagtgagctgagatcgtgccactgcactccagcctggcaatagagcaagactccatctcaaaaaaaaaaaaaaaaagaaagaaagaaactaaaaacaaaaaccccaaaactcgaatggacttctcttccatcctcctttgggcaggtgggcagcagggtgtgtatgcggggccagggtggaagcctgcaggttctcatgcctttatgtgccacatggcagggatgcactgcgggacggtggctctgcggtggatgcagccattgcagccctgttgtgtgtggggctcatgaatgcccacagcatgggcatcgggggtggcctcttcctcaccatctacaacagcaccacacgtgagtgcctcgggagaggagagggagaggggcagggggtgtgggttgggccgaggcacagctgggcggtccccaggctcacgtggcataaagggtttgggtgggcgggcctgcctacctgcttctccttctaggaaaagctgaggtcatcaacgcccgcgaggtggcccccaggctggcctttgccaccatgttcaacagctcggagcagtcccagaagggtaagccatgcggcagacttggggcgtgggtgcagagctggctgagccaccgggaaggggccttgcccacaggagcctgctcccgtcagggttcaggggcagttctgtcaccccccatcccttcctgtccccatagcaccctcccacaatgagtggtcaggaccatcatcaccatggtaaagggccgggagcttctgttatttctgctaaggcctccggggccactctgtgcagcacatggagagaataattattatgctagcagacctcatggaccagggctcactggggcccacactctgctctgtgcttttcacccatgagcctctcacaaccctccctgctcctttgggctaggggatgctgtgtggattcccattttacagggtggggatgctgaggctcagacaggtcacgcaaatcagttgaggtcacacagctgggaggtggtgaagctaaaattgaacccaggctgtctataccgtgccttttcaacaggcatcccattcactcatttgttcatttgtggggatggtgctctagaatgtgaggtggagtctctcttttctaatctggtcttaagtggagaggaggcccccaaattccccaggtacctgaagggaagccactgtccatccaggaagccactgtctgtcctcaaaggtggtacagtagattgtgagataaaagttggaggatgggagggtctcaacaactcacgcctctaatcctagcactttaggaggccaagtcaggaggagcgcatgagcccaggagtttgagacctgcctgggcaacatagcaagactccatctctacaaaaaacggaaaaaaaaattagctaggtgtggcggtgtgtgcttatgttcccagctacttgggaggctaaggtgggaggatcacttgagcccaggaggttgaggctgcagtgagccatgattgtaccactacactctagcttgggcaacaaagtgagaccctgccaaaaaaaaaaaaaaggctgggcctttttttcacaggctcacgcctgtaatcccagcactttgggaggctgaggcagatggatcacctaggtcaggagttcaagaccagcctggccaacatagtgaaaccctttctctactaaaagtacaataattagtcaggcgtggtggcacaggcctgtaatcccagctactcaggaggctaaggcaggagaatcgcttgaacccaggaggaggagattgcagtgagccgagatcatgccactgcactccagtctgggcaacaagaatgaagctccgtctcaaaaaaaaaaaaagttggaggatggaggggcaggacacactcaccatagcaggtcttagacttcaggtgggggtcctgggtggtgccctttggagtcttctgcaacatactcaatctttgacttttttcttttttttttcttttttttttttttgtcacccagactgtcgcccaggctggagtgcagtggcacgatctcggctcactgcaagctctgcctcctgagttcacgccattctcctgcctcagcctcccgaatagctgggactacaggcgcctgccaccacgcccagctaattttttgtattttttagtagagacgggttttcactatgttgcccaggctggtctcgatctcctgacctcgtgatcccccggcctcggcctcccaaagtgctggaattacaggcgtgagccactgtgcccgatcaatctttcatttttttttaatactcattgagaaactcagcatttgtagacatgaagttgctcagggtaagagaatgcgggaatcataggcttggcaccttgtggactcttagaatcatttatttaacttgaatgtattgagtattctcttaaagaatcagctgttgttcctgaagctggggtgaaaaacaaagatggcagatgaaatctgtgacactccaggtgggaggagaaactaggcaggtgcaggtgtgttacgggctgtagaaaaacaggtctggagggcctcaaaatctgggactgtatagagggtgacctagtcagggaaggggacatctgagcaaagacccagaggcagagatggggtcaggggagttatctcctggtctgctatccaggtgtgatggcagggacagagccctgtggggagctggggaggctgcagcaagtgatccaagggaaatggcccaggttgtgtgggatctcttaggttatggtgaagcctctgcttcctgtctgagggaagtgggggctcgtggagtatgtgagtggaaggggatggatctggcctatggaccccgtgggttgctgtgtaaggggcagggagcatgtggggacctgtctggaggtcactgcagtaattcgtggagagggtgctgggaagtggctgacgctggacagacacacttggaagtggagtctgtggatttgaggatgggttgggtgtgacgcttgtgtagggagtccccggggacccctgatcttttgtctgtacctggaaggatggggtgaccctaatggagacaggcagggttctcaggaagcaggttgagcagacactcaggagctcggttttgggcacgttgaagtttgagatgctttcttcgagcaggcaggtagatcctcaggtctggtgatcggaggagcagcccaggccagcaggtcaatttgagagttgtcagtgcataaatggaggctgaagctcagatgtcaagcagaccaccaggagagagagcaaagacagaggggagagtaggagctaggatggcaggcgggggagactcgggtggagccaggtgctgggatgcaggggcagctctcagggaaagtgatgagcccagtaaagctgagagggggcactgggtctggcagtgtgggggtcaccagagaacttggcaagtgtgctggcatgagagtctgattggcctgaggtcaggagaagattttttttctgatattgatacatgatattttctatatttatgggtacatgtgagtgcttgttacatgcatagagtgtataatgatcaaggcagggtatttggagtctccgtcaccttgaatatttttcatttctgggtgttagcaccatagtcctctcttcgttactttgaaatatacaaaatactgttgctaagcatcgtcaccctggtctgctatcaaagattagaacttctcctgtcttggctgggcacggtggctcacacctgtcatcccagcaccttggaaggctgaggtgggtggatgacctgaggtcaggagtttgaaaccagcctggccaacatggcaaaaccccatctgtactaaaaatacaaaaattagcctggcgtgctggcctgtgcctgtaataccagctactcgggaggctgaggcaggagaatcgcttgaacctgggaggcggaggttgtagtgagctgagatcatgccactgcactgtagtctgggagacagagcaagactccatctcaaaaacaaacaaagaagaaaaacaaaacaaaacaaaaaataacttctgtctaactacaaggtggaaggaatcatgtgctgggtgtcagaccttccgggatgtatgtgcagcttctaggaattgaaaccaccagctcttggaaacttgtgccaggcttcagggtgggagaggcagttctagagccacagctgccaagccaagccaaatggccccatcatctctcgcaagagcaggagagtccctgggggcagaggccatagttgtacctttctgggcaaagggtcagtgtctgtagtgtccttatgggcagcggggctcaggggggaagcaggcccaggggtgtgtttccaatgacctcctcaaaagtcagaactggaaggcaaaaccccttataggctgagtgcacctgtaatcccagcatgttgggatgctgaggtgggaggattgcttgaggccagagtttgagaccagtcttggcaacgtagcaagacccctgtctctacaaaaaataaaaataaaaaattaggctgggaatggtggctcacgcctgtaatcccagaactctgagaggctgaggaggatggatcacctgatgttaggagttcaagaccagcctgaccaacctggtgaaaccccgtctctactaaaaatacaaaaattagcaaggcatggtggtgcatgcctgtaatcccagctacttgggaggctgaggcaggagaattgcttgaactcgggaggtggaggttggagtgagccaagattgtgccattgcactccagcctgggcaacaagagtgaaactccatctcagaaaaaaaaaaaaaaaaaaaaaagccctgtgtagtggggtatgtctgtagtcttaggtacttcagaggctgaggtaggaggatcgcttgagcctgggaagccaaggctgcagtgagccatgattgcaccactgcactccagctgggacaacagaatgagaccctgtctcaaaacagacaaacaaacaaaaacccttatagttggatggagaaactgaggctgggagaggggacaggacggaggttaaggctcagtcttgcctctctggggccgtagaaaagaggcagggagccctttcttggggctggctgtgtcttgaaggtggcctgtgcttgacctcggtcaaggtgggatctgctcttgttttggcacattctcgtggagcccatgagtcttacaggataaggccttgtggtcagtgagatgggagggggtctggcctggcacaggattttagacatgcaggcacctgcacagacagacacctcatcctgggacagcaaaacccagccgcatgctactgcttcccctgctgtgccctcctcagacatccctggtccatgtacactcctacctgctgagcccctcctaaaaaaaaaaattaaacatcccctcctaaaaaaaaacaattaaaattaaaaaataaatttaaaaattaaaaatccccttctgctaggtgtgctgttcacgcctgtaatctcagcgactcaggaggctgaggtgggaggatcgcttgaatccaggagttcgagatcgggctgggcaagatggcaagaccccaactcaaaaaagaaaaaaaaaaaatctttcctcctaagcctcattgccccatctgtaaaatgagtcagggactgtgcctgggatgctgcctgcgagagatcccgatgtcccccactcagggtcactaactatggctctctctccccaggggggctgtcggtggcggtgcctggggagatccgaggctatgagctggcacaccagcggcatgggcggctgccctgggctcgcctcttccagcccagcatccagctggcccgccagggcttccccgtgggcaagggcttggcggcagccctggaaaacaagcggaccgtcatcgagcagcagcctgtcttgtggtatgtctgtgggtgcggccccctgacacaggcagggcaggcacagcccaaggaccttgcaggccgtagcagcagtggagcagccctctgccttcaggaccctgtgctgataatgggatgaggagatacagacccttcccaccacgtgtggggacacattctgagcgtggggtcccagtggccactgtggctggccatgtgtcctgagtggcaagggacactaggaagctcccggaagggacactaggaagacgagcgctgagtgacagggccacccacctgtgacaggcgctgcccctgttctgctccgttctcctgtgtggacgggtgtgaggggtggtctagctgagtccaccccacctgctgcctcacatgagccccctctgccccagtgaggtgttctgccgggatagaaaggtgcttcgggagggggagagactgaccctgccgcagctggctgacacctacgagacgctggccatcgagggtgcccaggccttctacaacggcagcctcacggcccagattgtgaaggacatccaggcggccggtgagtgggtaacctcaggggcctgggtgaggaactctgcagtggaaaccctgagctgtagcccagagctatggggtcctcctgtcttgcctgagcctgcaggaagttcctggtggaggagggtcagtgactggccatgtgggtccacagctcctgcttatatcaaaaccaagagaggccacacagtccaggagagcaagtccctgttggggtaaatgcaggtgtaggcaagagccagggctagggaagcactagaatacagcctgaagatccaggaggacttcttggaggaggtggcggctgggctgcagataactttgttaggcagagagaggaagggattcctagcagaggaacagctgggctaaggcccagtagagggcgctttgattcaccaagagggttacaagggatgagggtctccttgagagaggcatggggaaggggatttgtggggcaggggcctggagcttggctgtggctttcttcaggtaatttttgtcacgtttcatggaggagggtgattagcgtgtcgacctttaccactgaggctggaaattggcatgccaataccctgtctgtctggagctgactccaggagaattaagagcctccctcctctattcattcatcatgaggagaagaggccaagcggcagggagactggcaggaattctccagttagaaaaggccctctgagccaggcgcggtggctcacgtctgtaatcccagcactttgggaggccgaggcgggtggatcacctgaggtcaggagttcaagaccagcctggccaacatggcgaaaccctgtctctactaaaaatgcaaaattagtcaggcatggtaggttgtgcctgtaatcccagctacttgggaggctgtgccaggagaatcgctagaacctggggggctgaggttgcagtgagccgagattgcaccactgcactccacagagtgagattccatctcaaaaaaaaaaaaagaaagaaagaaaaggccctctgaggccaagcttggtgtctcatgcctgtaatcccaacactttgggaggctgaggtagaagttgaggccaggaggtccaagacaagcctgggcaacatagtgagtctacaaaaaaaatattgagaaactacataaatatagtgggggtgggggtggggaacaagaaaacaaaaaattcaaagcatagtgaaaagaaatatagcaaaacccggccgggcatggtggctcacgcctgtaatcccagcactttgagaggccgaggcgtgtggatcacggggtcaggagatcgagaccatcctggctaacacagtgaaacctgtctctactaaaaatacaaaaaaattagccacgtgtggtggcgggcgcctgcagtcccagctacttgggaggctgaggcaggagaatggcgtgaacctgggaggtggagcttgcagtgagccgatatcgcgccactgcactccagcctgggcgatagagcgagactccgtctcaaaaaacaaaaaaaaagtagcaaaacacaacaaaaaaattaaaatttgctgggtgtagttgtgcctttagtctcagctactggggagggtctgctggaggatcacttgagcccaggagttcaaggctgtgattaagccactgcactccagcctgggtgacagagcaagatcctatctctaaaaaaaaaaaagaaaagaaaacactctgtggccacagatgagagaaggcagacaggaagccagtaagccaagcaggcaaagggcaggtggccccagcccggctgttgggtggtgagcagtgtcagggagacaggagtgccggagctgatgaggttcccaaggaggtgaggttgcctgtggccccctcccagggcacagtcccacccctccagtagtgcactctgtcctccctggtaggtacaggcttttccccaccaccatggtgcagccatgcctgcccccaacaccactgctgcagctccatcctccacgcagtggtgcagccccatcccagcacccatttgagctgctgtcccattgcagggggcattgtgacagctgaggacctgaacaactaccgtgctgagctgatcgagcacccgctgaacatcagcctgggagacgtggtgctgtacatgcccagtgcgccgctcagcgggcccgtgctggccctcatcctcaacatcctcaaaggtgagtggtcgcaccacagccgtgtggtaggacccatgacactgcctctctctccccacgccccacccctcctgcatctctgctcgccccccatgccacgtctttccatcactgagctcccgaggtgtgtccctgcgtcacagttcaccatgtcctgaaggaggcagtgcagagcgacagggctgaagcgggcaatgctcaagggttggaggaggaacaggagtcatcaggagggagagaggtgcaggagctcagggctgcagggccggtccagagggtaccccggtccagtgggtgaccctgccacttggtcattgaatggccagagctgatgcgtgacgtgaggtccaggctcgggagccctcaccttacttcactctcaccacagccttctgaagcagctgctgctattggttattaaacgctccttgaggtgggcaaagtggctcaggcaggtgttaaccctctgagcccctcagagcctctggggctcagcaacatgcacctggctctgatcaaccagggtacaacttctcccgggagagcgtggagagccccgagcagaagggcctgacgtaccaccgcatcgtagaggctttccggtttgcctacgccaagaggaccctgcttggggaccccaagtttgtggatgtgactgaggtaaggggcaggggctggcccactgtgggtgtggggcctgccatagaggcatcaggtgggctccccagggtggctacagcctcacatatgctttatgaatccattcctgccacagacttcgattgcgggcctactgtgtgctcggatggactcgtgggtgacccccagtcttggcttctgccgcacagaactgacagtgtggggaattagtggccaccctcctacctcaggtcctttgcacatgctgtggttctcgagtgctcagtgctgagatgaggaatgcatgggggcattgcagccctcgggcatggtgagatggatgggtgaaagggagagggccaggtgaacagagaccttggccacccactccctgtcactccaaactaacgcttcccagatgccaccctcagccctgcaccacctgacccactcactcagtagttgccccagctccacactgggtccctataagaccctgtcatatcccttcccgctgaggatcctcacatccctccttacctacttgggtccttggcattcctgggcggatctgcagacccccccacactgaccagtgacctcccaggaggggcgtcagctgcccaggtggtgtcttctctttccccgtgagcattctgcacctctgactcccgctgcagccagtgacctggtgtcttgtctctctgaggggacagagccactgcagtgtgtccctctgccctcctttttggctaaggccagctccttcatctactcgctggctcggggtgctgttcctacaatgctcctttctgcctctgatgatttacttctttatcacggcttattcccgaaagaaaggcagctgttgttgctctagaaacttctatctgctgcctccttctgtcctttgctcctcttagagcaaacatggctgggctatgtcctctctcccttcagggtatcccctcccctgctctatccccatgccaccagatcgccatgtccagcctcagtttccccatcaggccccactcagcagcatctcacacagctcaccacactctcctcgagttttcattttgcaaattttcgcacctacaaaaatgtaaaaaaaccccaaaactgcccaagcatcaatgctcccttttcctggagtctgcagtgtggatgtttctgtcggatttcctaactctctccgtctccacccacatctattgggattcgtgtttttctgagggattccacagtaggttactgatgtcgcacctcagggtgtgtctcaaaagtgagacttgaacatagcacagcaggatgtcggggtgacacaacctgttgtcccttctctttacctacagtaggctcccttggctgttttgtttttgttgtgtttttgtttgtacacagagtctctgtcatccaggttggagtgcagtggtgtgatcttggctcactgcagcctcaacctccagggctcaagcaatcctcccacttcagccccctgaacagctgggaccagaggcacgtgccaccaaacctggataatttttgtattttttttagagacagggtcttgcccagactggtctcaaactcccgggatcaaactatcttcccacctcagcctcccaaagcgctgggattacaggtgtgtttttttttttgagacagagtctcgctctgttgcccaggctggagtgcagtggcgctatctcggctcactgtaagctccgcctcctgggttcacgccattctcctgcctcagcctcccgagtagctgggattacaggcgcccgccacaccgcccagctaattttttgtatttttagtagagagggggtttcaccgtgatcgcgatctcctgacctcgtgatccgcctgcctcggcctcccaaagtgctgggattacaggcatgagccaccgtgcctggcctgttttgttgatttttaaagcccagggcagtagtcttggaaaatgtcccacatcgtggatttgcctttctgtttccttgagggcagattcagacagaacacctttccctgggattggtcaactaatccgtggggtgttgctgaaactttattttattttattttatttttgagacggagtctcgctctgtcccccaggctgtcccccaggctggagtgcagtggcgggatctccgctcactgcaagctccgcctcccaggttcacgccattctcctgcctcagccccccaagtagctgggactacatgtgcccaccaccgcgcccagctaattttttgtatttttagtagagacggggtttcactgtgttagccaggatggtctcgatctcctgacgtcgtgatccgccctcccaaagtgctgggattacaggcctcggcctcccaaagtgctgggattacaggcgtgagccaccgcgcccggtgttgaaactcccttgaggcattttcttcggccttcgggtccatcctctgtctcctccttgacctcctcatctcctcgccactgccttggggaccttggccaggctcatggcatccagcagccactcaatgtcaatacctccatgttcatctctcagcccgcccttgcccgtgaacccatgcttatttatttattttttttaatacgtgcacccatgctcttcaggtctgatgaagtatccaaaatcaagctcctgaccatccccaaacctgccccttctgcagggtttacctcgctagtcggcgccatccttgattcttctctttctcccacccaggccatcatctcttgcctggttgatacccacagcctcccctttgggctttatccttatccccatcatagctgccagagggatcctgtgaaaacactccccagcctgctcattcctctgccctaagcctgcatggcacagagcaaaagccagttgttatgggacctaggaagtcctgtgggatgggccccagcctgcatcttcatcctcttctccccaccccactccattcactctctgcctatcactcaccagcctataccacctgcctcagggcctttgcactgaccatttaggccacattccaggctcttttcacacgttgcctcctctgagaagccctccctgaccactctgcccatacctcatgcctcttgattccccttacctggcttgtggtttcagcactttccctgtgtgtgtttgtttttcttggcatgagagcaggacctaagtgtctgttccctgttgattccccagtgccaggcatgcagtgcaaactctagaaatattttttgcatgaaggaatgagtgattgaatgcagcaagggtctggaggctgaggaccaggcagacagacattcagagttgctggaacgcgacagagacagggagtcagactggtcatgcaaggtcctgggcctgcccttgggtcctggggagccacggaaggttgtgggtgccagagggttgcggtcagagtcacagtcaagggccttctgagacctgtgccccctccccaccctccctccccacctcctcaggccagctctggggtctcggcaggtggtccgcaacatgacctccgagttcttcgctgcccagctccgggcccagatctctgacgacaccactcacccgatctcctactacaagcccgagttctacacgccggatgacgggggcactgctcacctgtctgtcgtcgcagaggacggcagtgctgtgtccgccaccagcaccatcaacctctagtaggggctgctgggccgcctgggtgggaaagggccaggggcgggtggcccagggactgcccacttatccagtaaggtggctccgtcacctcttttcctggtgggaaactgaggcccaaccttggtagcttatcctgggcctctcagtgagtatgtttgagcctcagtgggtggatagggaccaggctgggccaggcaaggtcgggcactgtctgacctggctgggcggtagctttggctccaaggtccgctccccggtcagcgggatcctgttcaataatgaaatggacgacttcagctctcccagcatcaccaacgagtttggggtacccccctcacctgccaatttcatccagccaggtatggggtggaggtccgggggtgggggactggggtggagaggggcgggtgtcctgggcaggcagctgacgggcatccctgtcttctcccatcggccgcagggaagcagccgctctcgtccatgtgcccgacgatcatggtgggccaggacggccaggtccggatggtggtgggagctgctgggggcacacagatcaccacggccactgcactggtatgtgtcacaccttttctccctggccgtgcccaccctgcacagcccccaagccatgctgatcacactcccatgccccaggccatcatctacaacctctggttcggctatgacgtgaagcgggccgtggaggagccccggctgcacaaccagcttctgcccaacgtcacgacagtggagagaaacattgaccaggtgggccgggggttggagaaactgagtcaaggtgtggggccccagggcatcctgggctggaggcctggatcatcacagagtggacaatggttggtgtcctctctctagtgcctgggccatctggagcccctgtgccatgagggccaagccccctgctccagtgagacccagcaggccccaacctgctcttcctgatgacctggcccgaaatggcaccacctgggctgaggcctgtgaccacacagatgtggttcaggtggcatctggagccctgctcaggcttcccctctcctcccacccccaggcagtgactgcagccctggagacccggcaccatcacacccagatcgcgtccaccttcatcgctgtggtgcaagccatcgtccgcacggctggtggctgggcagctgcctcggactccaggaaaggcggggagcctgccggctactgagtgctccaggaggacaaggctgacaagcaatccagggacaagatactcaccaggaccaggaaggggactctgggggaccggcttcccctgtgagcagcagagcagcacaataaatgaggccactgtgccaggctccaggtggcctccctggcctgtc

SEQ ID NO: 12260 - DNA, 2632 bp, Homo sapiens
ggcccaccaagcctggggaggtggccacccttccatgatggcatttggatgttccctgtgtgtggggagggcacagggactccattcgtagaccacctctgggacagtgtgtctgcctctgaggtcagacgctctgcactgggacagggtggagtggagggaaatccagcttggggctcattggaggggcttgctggcagacaccgccctttgtgggaaactgactgtgggagaggggaaccccaacctctgtcaccacatccctcttccctgttgtcacacctgtcacctgctgccatagccatgagacttcccaagggtcactgctgccactcactgcacagcctggaagggagtccacaggggacatacagtgagcaagagacctgtgccactcaggcctcctgggggtgtccccagtgcagccatgatgataatcacagctaccattcaccaagccctgcccacagtctaacctactctattcacaacactcccagcagcaaggcaagtgaggtgctgccgtcatccaggctggacagttcagtgatttgcctgaggccccacagcagagttcaactggagacagagaaaccagctagaggcagagggaggtaacacggagtcccccagaaaggtctgggctgcgcgtgcttcagctatttccaccaaatcctcctgtctttcgtggccaacaccccaggcaaggcttggggcccccgtctgctgctggacgcagagccatgaagaagaagttagtggtgctgggcctgctggccgtggtcctggtgctggtcattgtcggcctctgtctctggctgccctcagcctccaaggaacctgacaaccatgtgtacaccagggctgccgtggccgcggatgccaagcagtgctcgaagattgggagggatgcactgcgggacggtggctctgcggtggatgcagccattgcagccctgttgtgtgtggggctcatgaatgcccacagcatgggcatcgggggtggcctcttcctcaccatctacaacagcaccacacgaaaagctgaggtcatcaacgcccgcgaggtggcccccaggctggcctttgccaccatgttcaacagctcggagcagtcccagaagggggggctgtcggtggcggtgcctggggagatccgaggctatgagctggcacaccagcggcatgggcggctgccctgggctcgcctcttccagcccagcatccagctggcccgccagggcttccccgtgggcaagggcttggcggcagccctggaaaacaagcggaccgtcatcgagcagcagcctgtcttgtgtgaggtgttctgccgggatagaaaggtgcttcgggagggggagagactgaccctgccgcagctggctgacacctacgagacgctggccatcgagggtgcccaggccttctacaacggcagcctcacggcccagattgtgaaggacatccaggcggccgggggcattgtgacagctgaggacctgaacaactaccgtgctgagctgatcgagcacccgctgaacatcagcctgggagacgtggtgctgtacatgcccagtgcgccgctcagcgggcccgtgctggccctcatcctcaacatcctcaaagggtacaacttctcccgggagagcgtggagagccccgagcagaagggcctgacgtaccaccgcatcgtagaggctttccggtttgcctacgccaagaggaccctgcttggggaccccaagtttgtggatgtgactgaggccagctctggggtctcggcaggtggtccgcaacatgacctccgagttcttcgctgcccagctccgggcccagatctctgacgacaccactcacccgatctcctactacaagcccgagttctacacgccggatgacgggggcactgctcacctgtctgtcgtcgcagaggacggcagtgctgtgtccgccaccagcaccatcaacctctactttggctccaaggtccgctccccggtcagcgggatcctgttcaataatgaaatggacgacttcagctctcccagcatcaccaacgagtttggggtacccccctcacctgccaatttcatccagccagggaagcagccgctctcgtccatgtgcccgacgatcatggtgggccaggacggccaggtccggatggtggtgggagctgctgggggcacacagatcaccacggccactgcactggccatcatctacaacctctggttcggctatgacgtgaagcgggccgtggaggagccccggctgcacaaccagcttctgcccaacgtcacgacagtggagagaaacattgaccaggcagtgactgcagccctggagacccggcaccatcacacccagatcgcgtccaccttcatcgctgtggtgcaagccatcgtccgcacggctggtggctgggcagctgcctcggactccaggaaaggcggggagcctgccggctactgagtgctccaggaggacaaggctgacaagcaatccagggacaagatactcaccaggaccaggaaggggactctgggggaccggcttcccctgtgagcagcagagcagcacaataaatgaggccactgtgccaggctccaggtggcctccctggcctgtc

SEQ ID NO: 12261 - DNA, 7462 bp, Homo sapiens
accctgtgcagatgcctcccactgtccgccggggctgctgggcacgccctggctggtctcttggactaggtaagctcatgagtcctctggccgctcctgctccttccctgcctctgctcctcctcggaggtggccacccccagatcccagtcccaattcggaggccccctgaggagtgctgcagggggccacaggcgtggctctgagccactctggagagtggcggggggcccagccagttctgtggctgggactttcccaggcagacaagtctgtctcttcctccccagcgggtgcagcccagaactgtcttctgaggaagaggtgctctcctgggcccccactgtccccaggcctcaggtaagcccatcagggtcccaaggaagggggtctgggtttgaggccaaccatggcagctgacctactttctagcctcagtttcccctagtgtgtgcagctctcacgctgtttgggtgagaaccaggcctctgggcttggacattctttcagtgagtttttagggtggagggatgggaaatggaagcccaggacctcagcagggtgtcttcctccgatccggggacatctgcctgtgggaggctgggcccaccctcccttgctgacctgccctgggaggaagggacagggcccagcactgcctactcccctccctgttcttcccagcagtctgagcctggctgggtgtcccctgctcctccagcagcctacttgggcctttgggtagacagattaacagacaggcgaggctgggtcatggttggaccaccccaggaccctgaccgggggctcagctcatgaccctgagcctgggagagatgaggccatgccctccagggcactcagcatgacccggcccagtggacgggactgggtagcttccttggtgcagggggctgtcatgctaggacggggtcactgaccaggccaggcccctgccccatgacttgtggtggaaatgtccttttgtttttgtttttttgcattttttttgagacggagtttcactcttgttgcccaggctggagtgcagtggtgcaatcttgcctcactgcaacctccacctcctgggttcaagcaattctcctgcctcagctcctgagtagctgggattacaggcacctgccaccatgcctggctaattttttgtatttttagtggagatgggggtttcaccatgttggccaggctgttctcaaactcttcacctcaggtgatccacctgcctctgcctcccaaagtgctgggattataggtgtgagccactgcacccggccatgtgatgggaatgttctgtgtccataatagatgctgcatattgctggcccagctcctgaggctctttggacctccaggaatcggtgtctctatcaggaacccttaaccctgacccggactcccagctgggacccggggtgtcggagtggcaagagcgctgtcaggcctggtgaagggtgtgagctgtccaacggggcagggaggaggcagggcctgttctgcagttggacagacagagccctctagctgctttctggaagactgaagggcaggtgatgttggagggagggagtgcaggcaggggctgtgagggagttcaggtcagaaacaggtggcgcctggattcaggctgtggtggtcacggtggggatgaggggctgctttggattgtgctggggatgtggggtggtgcgctgctgcatgactactgccaggtctctctgctcttagtgtctgcatccagggctgggagggggtcaaatgaatcacactatcggccccaggcccaccaagcctggggaggtggccacccttccatgatggcatttggatgttccctgtgtgtggggagggcacagggactccattcgtagaccacctctgggacagtgtgtctgcctctgaggtcagacgctctgcactgggacagggtggagtggagggaaatccagcttggggctcattggaggggcttgctggcagacaccgccctttgtgggaaactgactgtgggagaggggaaccccaacctctgtcaccacatccctcttccctgttgtcacacctgtcacctgctgccatagccatgagacttcccaagggtcactgctgccactcactgcacagcctggaagggagtccacaggggacatacagtgagcaagagacctgtgccactcaggcctcctgggggtgtccccagtgcagccatgatgataatcacagctaccattcaccaagccctgcccacagtctaacctactctattcacaacactcccagcagcaaggcaagtgaggtgctgccgtcatccaggctggacagttcagtgatttgcctgaggccccacagcaggtgagtggcaagtccagcatcagagcagggcaggctggcggtgccccctgagccccctttgccatgctgaccacatgcacatcctgggcttctgcaggaatgccctgtcccctacctgccctgctccgtgcaaaaccctctttgagctgtgcctgggagacatgctgagagaattcatggaaacaaatgtgttactgacagcctctttgcctccagagttcaactggagacagagaaaccagctagaggcagagggaggtaacacggagtcccccagaaaggtctgggctgcgcgtgcttcaggtaacctcccttgaccttcaggagaacgagaaggctgcctgatcagagagtccctgaagaagattctgtggctacaggcttcagcagagtgtgagggagaccccggttatttcctcagctatttccaccaaatcctcctgtctttcgtggccaacaccccaggcaaggcttggggcccccgtctgctgctggacggtaagtcctggccccgtggcagtgaatctgtggggcgctctgattgtgggcactatggaagctaaaccccatgctccaggtggggtggagggtcttcagaggactcctggacagtgccaggctctaggctggggtgggggacacaggagaaaccaggccaggcccatccctactggagcttctccctaagcagtggaggctcagccactgtaaggaggtaggcaaggccctgcagaaagaggggtgtggaaatctgggggctcccaggaagggccgctgctggagatggggttcttaccaggatgggctctgaagataagcagggaggatttgggagggcagagatgaggcccagagcttctggcagagggcatggcctgcgcaaaggtctgggggccggacagcctgcacgtattctgggaagcgggaaggagacacaggccttgtgtttctgaggcccgactttagactgtgccctgttggggaggggccagggaatgtctgaggctaggcctgaccctgcttcttaccccgtgggtgcagcagagccatgaagaagaagttagtggtgctgggcctgctggccgtggtcctggtgctggtcattgtcggcctctgtctctggctgccctcagcctccaaggaacctgacaaccatgtgtacaccagggctgccgtggccgcggatgccaagcagtgctcgaagattgggaggtgagcagggcagggcatgggacatgggccctgaaaactgggcaagtggacctgagcaataccttcacccccctgagactcagtttccccatgtgtaagcttcgcttggactctctcagtagcctttgggaaggggacagtgactccgagagcagggtgtgggtctctagagccaaacagggccccttttctcagttctaagagtctctgtctctttggaataaactgcactgttttgttgtttggttgttatttttacttatttcttcctatctatctatctatctatctatctatcatctatctatctatctatctatctatctatctatctatctatctatctatctatctactatctatctatctatttatttagagatggagttttgctctgttgccaggctggagtgcagtggtgcaatctcagttaactgcaacctccgcctcccaagttcaagtgattctcatgcctaagtctcccaagtagctgggattacaggcgtgcgccaccacgcccaacaaatttgtgtgtgtgtgtgtgtgtgtgtgtgtgtgtgtgtgtgtgtgtgtgtttccaagacagagtatcgctctgttacccaggctggagggcagtggtgcaatcttggcttactgcaacctccacctcccaggttcaagtgattctcctgcctcagcctccacagtagctgagactacaggcatgtgccaccatgcccagctaatttttgtatttttagtagagacagggttttgctatgttggccaggctggtcttgaactcctgaccttgtgatcctcccacctctgcctctcaaagtgctgggattaaggtgtgagccactgctcctggcctaattatggtgtttttagtagagatggggtttcaccatgttggtcaggctggtcttgaactcctgacctcaggtaatccacccacctgggcctcccaaagtgttgggattacaggtgtgagccaccacgcccggcttattctttttttttttttttttttttggttaggagacaatttctttctttctttttttttattttattttattattattatactttaagttttagggtacatgtgcacaatgtgcaggtttgttacatatgtacatatgtacacatgtgccatgttggtgtgctgcacccaccaactcatcatttagcattaggtatatctcccaatgccatccctcccccctccccccaaggaacactgttgcccaaacagggacatgaagggcttattcttttttgttgttgttttgttttgttttgttttttgagacggagtctcacgctgtctcccaggctggagtgcagtggcgcaatctcggctcgctgcaacctccgtctcctggattcaggtgattctcctgcctcagcctcctgagtagctgatattacaggcatccgccaccacgcccggctaatttttgtatttttagtagagacagggtttcaccataatggtctggctggtctcaaactcctgacctcaggtgatccgcctgccttggcctcccaaagtgctgggattacaggcatgagccaccatgcccggccgggcttattctttttttaaggtggagtcttactctgttacccaggctggagtataggggagcgatcatagcccactgcagcctcaaactcttgggtttaagtgatcttcccgcctcagcttcctaaagtgctgggattacaggtgtgagccatggtgcctggcttctactgttttattctattttagactcttatctcatgttatatacaaagatcagttccctcctaaagacttaaacagaaaaaatattatgtttttcatattttgagacagggtcttgttctgtcacccaggctggagtgcagtggcatgatcatagctcactgcagccttgaactcttgggcttaagcgatcctcccacctcagccccctgagtagctaggactacaggcgtgcatcacacctgactaattaaaaaagactgttttctagagatggtctcactctattgcccaggctggtcttgaactcctggcctcaagtgatcctccaccttggcctcccaaagtgctgagattacaggtgtaagccaccatctctagccgggaaaaaaaatgttattaataaagtatagcaatttccctttttgtcccagttataaaagtcatgtacatttgtttgcttgataaagaggaaactgtctgggcaaggtggtccacacctgtaatcccagcactttgggaggttgaggcgggcagaccacccgaggtcaggagttcgagaccagcctggccaacatggtgcactctgtccctactaaaaatataaaaagttagccgggcatggtggtgtgcgcctgtaatcccagctactcaggaggctgaggcaggggaatcacttgaacccaggaggcagaggttgcagtgagctaagatcatgccactgcactccagcctgggcaactgagtgaaactccctctcagaaaaaaaaaaagaaagaaaagaaaagaaaaagaggaaactgtaatcccagcactttgggaggttgaggcgataggattgctttagaccatgagttcgagaccagcttgggcaacatagaaagaccctatctctacaaaaaagacaaaaaattgccaggtgtggtggttcttacctgtagtcccagctactcagcagactgaagtgggaggattgcttgagcccaggaggtcaaagctgcattgagccaagactgtgccactgcacttcatcctgggtgacaaagtgagaccctgtctcataaaacaaaggctgggcacagtggctcatgcctgtaataccagcactttgggaggccaaggtgggtggatcacttgagcacaggagttcttgaccagcctgggcaacatgatgaaaccccatctctacaaaatacacaaacaaacaaaattggctgggcatggtggcatgtgcccatagtcccagctacttgggaggctgagatgggagggtcaattgagcccaggagactgaggctgcagtgatctgagatcacaccactgcactccagcctgagcaacaaagagagactttgtctcaaaaaaaaaaaaaaaaaaaaaaaaaaaaagaggccaaggcaggcggatcatgaggtcaagagatagagaccagcctggccaacatggtgaaaccccgtctctactaaaaatacaaaaattagctgggcgtggtggcatgcacctgtagtcccagctactcaggaggctgaggcaggagaatggcttgaacccgggaggcagaggttgcagtgagctgagatcgtgccactgcactccagcctggcaatagagcaagactccatctcaaaaaaaaaaaaaaaaagaaagaaagaaactaaaaacaaaaaccccaaaactcgaatggacttctcttccatcctcctttgggcaggtgggcagcagggtgtgtatgcggggccagggtggaagcctgcaggttctcatgcctttatgtgccacatggcagggatgcactgcgggacggtggctctgcggtggatgcagccattgcagccctgttgtgtgtggggctcatgaatgcccacagcatgggcatcgggggtggcctcttcctcaccatctacaacagcaccacacgtgagtgcctcgggagaggagagggagaggggcagggggtgtgggttgggccgaggcacagctgggcggtccccaggctcacgtggcataaagggtttgggtgggcgggcctgcctacctgcttctccttctaggaaaagctgaggtcatcaacgcccgcgaggtggcccccaggctggcctttgccaccatgttcaacagctcggagcagtcccagaa

SEQ ID NO: 12262 - DNA, 874 bp, Homo sapiens
accctgtgcagatgcctcccactgtccgccggggctgctgggcacgccctggctggtctcttggactagcgggtgcagcccagaactgtcttctgaggaagaggtgctctcctgggcccccactgtccccaggcctcagcaaggcaagtgaggtgctgccgtcatccaggctggacagttcagtgatttgcctgaggccccacagcagagttcaactggagacagagaaaccagctagaggcagagggaggtaacacggagtcccccagaaaggtctgggctgcgcgtgcttcaggtaacctcccttgaccttcaggagaacgagaaggctgcctgatcagagagtccctgaagaagattctgtggctacaggcttcagcagagtgtgagggagaccccggttatttcctcagctatttccaccaaatcctcctgtctttcgtggccaacaccccaggcaaggcttggggcccccgtctgctgctggacgagccatgaagaagaagttagtggtgctgggcctgctggccgtggtcctggtgctggtcattgtcggcctctgtctctggctgccctcagcctccaaggaacctgacaaccatgtgtacaccagggctgccgtggccgcggatgccaagcagtgctcgaagattgggagggatgcactgcgggacggtggctctgcggtggatgcagccattgcagccctgttgtgtgtggggctcatgaatgcccacagcatgggcatcgggggtggcctcttcctcaccatctacaacagcaccacacgaaaagctgaggtcatcaacgcccgcgaggtggcccccaggctggcctttgccaccatgttcaacagctcggagcagtcccagaa

SEQ ID NO: 12263 - DNA, 11837 bp, Homo sapiens
gcccagaagtgagagcagttggctgtgccccagtgctgtgtgacccagaggcgccgctcaccctctctgagctggtggacatcataggtggggaagctcaggtcagggcactcccatgagtgtctggaggcctgagtcccattctcagctctgccatatgcttgctgcgctctagaggagttcctcttcctctccaagcctcggtttatgtacccgtgcagtgggagtgagttgcacttcggggtgaagggggcaagacttgtgtgggcgcatcctgcagaaggatcccacaggtgggcagagccctgggttctttatccgactgggtctgggctgggggcctctgtttcttggctgatgagtttatgtgagtttgagtgaggtatgcgagtgggtgaaggagggctggggggagtcacctgacttgtgcgaagaagctcttgagagagccgtggcttcttggaattaagaggaaagagtgcagcatgaacagacaggccctggaggatctggcagccctgagtgggggcggggggtcagctctggagtagagccagagctgtgatggggttgggggaccctgtgtccttgggccatgcttgcctcgctcctgggttctgtttgtggctgtggattggggtggggcagggccggttgtgcgaggggtcattgcccaactccagggggcgcctgccacctctcagctatatatatagggatatatatagttctttcgacaggtttccagcaggtagtggttattaaatcttactgaaggggtgttttttctgattctcggctctgtgccgcaagggtggaaactgtgagagacagattccaactccacgtctgggtagtaagcatccagtccagggctgtaggcagtcctggggaagacgccagagatctgtgcattctcatatcgagggatagcgactccaggctgggggctggcagggtaaggggtgggtgggtcctgggcttacccgcaggtctgcagacttcctggggccagctgacctcgtaaaatcccttttgtctaagcttcagtttcctgcctgtgaatggggttggggctgtgctctggtttcacccttgtggctctggggttgtggtgacaaagccatcaagctgggttgaaggattaaccaggaaacttcagactggctgccgtgtctacctcttcctcatactcctctctctgctgcatcctgggaagctgctctgctcagcctaaatgaggctcagttgtgtgtgtgcgcacgtgcttgcacgtgtgttggaagtgggtgatactgacaccagagtctgtgtctctgggtgagtgaggcttgcacatttctcgggacagggaactcactaccttatgtgcccaggacaagagctgtggggtctggagaagacttctaggccagcccctgcagtccttcctcaggtgacatggcttccccagacccacttccccctaggtgccctctctgcattcagggggtagagggctgactgggacagaatgtgacacactcagcatgtgaggaaaagcctccttcattctgtaggccctacctctattaacatgtcctttgataaagtgcctcccctcctgtctcccctctctggaatcctcagctgctgccaggcttcagctgtgccccattgaaggcagctctgtctccctactttccccagcccagggttttccttttggggtcagctgcagggatctgggccatcctttgcccactcagactttctttctgcccacctgctgctgtgaatcctgtatgtcatatatatatataaaatatgtaatatattatatattatatgtaatatataatatataaagtatattatataatatgtattatattatatattatataatatgtaatatattatataatatataatatgtattatattatatattatataatatgtaatatattatataatatataatatgtattatattatatattatataatatgtattatattatatattatataatatgtattatatattatataatatgtattatatattatataatatgtattatatattatataatatgtattatatattatataatatgtattatatattatataatatgtattatatattatataatattataatatgtattatatattatataatattatataatatgtattatatattatataacaatatataatgtgtattatatataatataatattatataatgtgtattatatattatataatattatataatgtgtattatatattatataatattatataatgtgtattatatattatataatattatataatgtgtattatatatataatattatataatgtgtattatatatataatattatataatgtgtattatatatataatattatataatgtgtattatatatttaatattatataatgtgtattatatatttaatattatataatgtgtattatatattatataatattatataatgtgtattatatattatataatattatataatgtgtattatatattatataatatatgatgtgtattatatattatatattatatgatgtgtattatatattatataatatatgatgtgtattatatattatataatatatgatgtgtattatatattatataatattatatgatgtgtattatatattatatataatatataatattatatataatatattacatataatatatcatatattatatttatataatttatataatatatcatatattatatttatataatttatataatatatcatatattatatttatataatttatataatatatcatatattatatttatataatttatataatatatcatataaatatattatatatagtattatatatataaaattatactttaagttctagggtacatgtgcacaacgtacaggtttgttacatatgtatacatgtgccatgttggtgtgctgcacccattaacttgtcatttacattaggtatatctcctaatgctatccctccccgttcccctcaccccacaacaggccccagtgtgtgatgttccccttcctgtgtccaagtgttctcattgtttaattccaacctatgagtgagaacatgcatgtcttatatgctctcaggcagagaggaaactgctgagcaggccggggcaggggacagagccctgtggctctccactttagacccctcctggctgactgccatggaatgcagccacttagcagggccaaatcccctgatgttcctgttggctgtctagccttcagggacaggtcatgggaccttggttcctgccctgtcatcttcccagtcaccctgatcttcacggggaggaatagcctgggaaaggacttggtcacagcacctccaccctagggctattgaggatctcacagttgtgtgtctggtgggttctgtccagagcccatttgagagcagtggatgacaggacaggcctatgtgacccaggcaggcagcaatattgggtcagccttcatgtccccttctgtcagctggggcagcctggaagcatgattgtggggtaggtgttatgggcacggaatagacctcaggtggaggctgcaggggctctccggcaccgtagacacagcaggcccaggagcaggggagggagccatgactcagggagactctggcccatatccttggcagatgagggccacaggggaatgggcagcactgtccaaagtcccctgggctgggtccgcagctgttcctggctcagacttcttggtgggctggtcagaaacatgcagtaacttggggcagttaccaggtggccaagcctgcactgctgggctctgtgagcttgggccagctcaggccctctctgggccctgcctttctgggctgttcgggtggttccttgggcctggggtgctaatgtttctggatgggcagcagaaccagtctgcactcagggccccaggccatgttcccggaacacacctttagcattgacagcagcgtgtggtgaggccccttaggctgggttctggtctagtgccaggggcaccactactccaccgcctccagagccatctctgggacactggctgtgagttcagatgttctgaacagggacagggagagccagagggaaccagcctggggctcactggaggggctcgtgggcagacagcgccctttggagggaactgagtctgaaaggaaggaaaccctttccccggctcatagcacctgccatccagggccctcccagggctgcgtgaactttagtcacgtggtgacaggccgagtcaccatgccaagtcactgtgcgcctccttgctgctgtgacgtcagcttccccatcctcccagccaggctggacctccgtgagaggcctgcctgtcctgcaccctgtgcagatgcctcccactgtccgccggggctgctgggcacgccctggctggtctcttggactaggtaagctcatgagtcctctggccgctcctgctccttccctgcctctgctcctcctcggaggtggccacccccagatcccagtcccaattcggaggccccctgaggagtgctgcagggggccacaggcgtggctctgagccactctggagagtggcggggggcccagccagttctgtggctgggactttcccaggcagacaagtctgtctcttcctccccagcgggtgcagcccagaactgtcttctgaggaagaggtgctctcctgggcccccactgtccccaggcctcaggtaagcccatcagggtcccaaggaagggggtctgggtttgaggccaaccatggcagctgacctactttctagcctcagtttcccctagtgtgtgcagctctcacgctgtttgggtgagaaccaggcctctgggcttggacattctttcagtgagtttttagggtggagggatgggaaatggaagcccaggacctcagcagggtgtcttcctccgatccggggacatctgcctgtgggaggctgggcccaccctcccttgctgacctgccctgggaggaagggacagggcccagcactgcctactcccctccctgttcttcccagcagtctgagcctggctgggtgtcccctgctcctccagcagcctacttgggcctttgggtagacagattaacagacaggcgaggctgggtcatggttggaccaccccaggaccctgaccgggggctcagctcatgaccctgagcctgggagagatgaggccatgccctccagggcactcagcatgacccggcccagtggacgggactgggtagcttccttggtgcagggggctgtcatgctaggacggggtcactgaccaggccaggcccctgccccatgacttgtggtggaaatgtccttttgtttttgtttttttgcattttttttgagacggagtttcactcttgttgcccaggctggagtgcagtggtgcaatcttgcctcactgcaacctccacctcctgggttcaagcaattctcctgcctcagctcctgagtagctgggattacaggcacctgccaccatgcctggctaattttttgtatttttagtggagatgggggtttcaccatgttggccaggctgttctcaaactcttcacctcaggtgatccacctgcctctgcctcccaaagtgctgggattataggtgtgagccactgcacccggccatgtgatgggaatgttctgtgtccataatagatgctgcatattgctggcccagctcctgaggctctttggacctccaggaatcggtgtctctatcaggaacccttaaccctgacccggactcccagctgggacccggggtgtcggagtggcaagagcgctgtcaggcctggtgaagggtgtgagctgtccaacggggcagggaggaggcagggcctgttctgcagttggacagacagagccctctagctgctttctggaagactgaagggcaggtgatgttggagggagggagtgcaggcaggggctgtgagggagttcaggtcagaaacaggtggcgcctggattcaggctgtggtggtcacggtggggatgaggggctgctttggattgtgctggggatgtggggtggtgcgctgctgcatgactactgccaggtctctctgctcttagtgtctgcatccagggctgggagggggtcaaatgaatcacactatcggccccaggcccaccaagcctggggaggtggccacccttccatgatggcatttggatgttccctgtgtgtggggagggcacagggactccattcgtagaccacctctgggacagtgtgtctgcctctgaggtcagacgctctgcactgggacagggtggagtggagggaaatccagcttggggctcattggaggggcttgctggcagacaccgccctttgtgggaaactgactgtgggagaggggaaccccaacctctgtcaccacatccctcttccctgttgtcacacctgtcacctgctgccatagccatgagacttcccaagggtcactgctgccactcactgcacagcctggaagggagtccacaggggacatacagtgagcaagagacctgtgccactcaggcctcctgggggtgtccccagtgcagccatgatgataatcacagctaccattcaccaagccctgcccacagtctaacctactctattcacaacactcccagcagcaaggcaagtgaggtgctgccgtcatccaggctggacagttcagtgatttgcctgaggccccacagcaggtgagtggcaagtccagcatcagagcagggcaggctggcggtgccccctgagccccctttgccatgctgaccacatgcacatcctgggcttctgcaggaatgccctgtcccctacctgccctgctccgtgcaaaaccctctttgagctgtgcctgggagacatgctgagagaattcatggaaacaaatgtgttactgacagcctctttgcctccagagttcaactggagacagagaaaccagctagaggcagagggaggtaacacggagtcccccagaaaggtctgggctgcgcgtgcttcaggtaacctcccttgaccttcaggagaacgagaaggctgcctgatcagagagtccctgaagaagattctgtggctacaggcttcagcagagtgtgagggagaccccggttatttcctcagctatttccaccaaatcctcctgtctttcgtggccaacaccccaggcaaggcttggggcccccgtctgctgctggacggtaagtcctggccccgtggcagtgaatctgtggggcgctctgattgtgggcactatggaagctaaaccccatgctccaggtggggtggagggtcttcagaggactcctggacagtgccaggctctaggctggggtgggggacacaggagaaaccaggccaggcccatccctactggagcttctccctaagcagtggaggctcagccactgtaaggaggtaggcaaggccctgcagaaagaggggtgtggaaatctgggggctcccaggaagggccgctgctggagatggggttcttaccaggatgggctctgaagataagcagggaggatttgggagggcagagatgaggcccagagcttctggcagagggcatggcctgcgcaaaggtctgggggccggacagcctgcacgtattctgggaagcgggaaggagacacaggccttgtgtttctgaggcccgactttagactgtgccctgttggggaggggccagggaatgtctgaggctaggcctgaccctgcttcttaccccgtgggtgcagcagagccatgaagaagaagttagtggtgctgggcctgctggccgtggtcctggtgctggtcattgtcggcctctgtctctggctgccctcagcctccaaggaacctgacaaccatgtgtacaccagggctgccgtggccgcggatgccaagcagtgctcgaagattgggaggtgagcagggcagggcatgggacatgggccctgaaaactgggcaagtggacctgagcaataccttcacccccctgagactcagtttccccatgtgtaagcttcgcttggactctctcagtagcctttgggaaggggacagtgactccgagagcagggtgtgggtctctagagccaaacagggccccttttctcagttctaagagtctctgtctctttggaataaactgcactgttttgttgtttggttgttatttttacttatttcttcctatctatctatctatctatctatctatcatctatctatctatctatctatctatctatctatctatctatctatctatctatctactatctatctatctatttatttagagatggagttttgctctgttgccaggctggagtgcagtggtgcaatctcagttaactgcaacctccgcctcccaagttcaagtgattctcatgcctaagtctcccaagtagctgggattacaggcgtgcgccaccacgcccaacaaatttgtgtgtgtgtgtgtgtgtgtgtgtgtgtgtgtgtgtgtgtgtgtgtttccaagacagagtatcgctctgttacccaggctggagggcagtggtgcaatcttggcttactgcaacctccacctcccaggttcaagtgattctcctgcctcagcctccacagtagctgagactacaggcatgtgccaccatgcccagctaatttttgtatttttagtagagacagggttttgctatgttggccaggctggtcttgaactcctgaccttgtgatcctcccacctctgcctctcaaagtgctgggattaaggtgtgagccactgctcctggcctaattatggtgtttttagtagagatggggtttcaccatgttggtcaggctggtcttgaactcctgacctcaggtaatccacccacctgggcctcccaaagtgttgggattacaggtgtgagccaccacgcccggcttattctttttttttttttttttttttggttaggagacaatttctttctttctttttttttattttattttattattattatactttaagttttagggtacatgtgcacaatgtgcaggtttgttacatatgtacatatgtacacatgtgccatgttggtgtgctgcacccaccaactcatcatttagcattaggtatatctcccaatgccatccctcccccctccccccaaggaacactgttgcccaaacagggacatgaagggcttattcttttttgttgttgttttgttttgttttgttttttgagacggagtctcacgctgtctcccaggctggagtgcagtggcgcaatctcggctcgctgcaacctccgtctcctggattcaggtgattctcctgcctcagcctcctgagtagctgatattacaggcatccgccaccacgcccggctaatttttgtatttttagtagagacagggtttcaccataatggtctggctggtctcaaactcctgacctcaggtgatccgcctgccttggcctcccaaagtgctgggattacaggcatgagccaccatgcccggccgggcttattctttttttaaggtggagtcttactctgttacccaggctggagtataggggagcgatcatagcccactgcagcctcaaactcttgggtttaagtgatcttcccgcctcagcttcctaaagtgctgggattacaggtgtgagccatggtgcctggcttctactgttttattctattttagactcttatctcatgttatatacaaagatcagttccctcctaaagacttaaacagaaaaaatattatgtttttcatattttgagacagggtcttgttctgtcacccaggctggagtgcagtggcatgatcatagctcactgcagccttgaactcttgggcttaagcgatcctcccacctcagccccctgagtagctaggactacaggcgtgcatcacacctgactaattaaaaaagactgttttctagagatggtctcactctattgcccaggctggtcttgaactcctggcctcaagtgatcctccaccttggcctcccaaagtgctgagattacaggtgtaagccaccatctctagccgggaaaaaaaatgttattaataaagtatagcaatttccctttttgtcccagttataaaagtcatgtacatttgtttgcttgataaagaggaaactgtctgggcaaggtggtccacacctgtaatcccagcactttgggaggttgaggcgggcagaccacccgaggtcaggagttcgagaccagcctggccaacatggtgcactctgtccctactaaaaatataaaaagttagccgggcatggtggtgtgcgcctgtaatcccagctactcaggaggctgaggcaggggaatcacttgaacccaggaggcagaggttgcagtgagctaagatcatgccactgcactccagcctgggcaactgagtgaaactccctctcagaaaaaaaaaaagaaagaaaagaaaagaaaaagaggaaactgtaatcccagcactttgggaggttgaggcgataggattgctttagaccatgagttcgagaccagcttgggcaacatagaaagaccctatctctacaaaaaagacaaaaaattgccaggtgtggtggttcttacctgtagtcccagctactcagcagactgaagtgggaggattgcttgagcccaggaggtcaaagctgcattgagccaagactgtgccactgcacttcatcctgggtgacaaagtgagaccctgtctcataaaacaaaggctgggcacagtggctcatgcctgtaataccagcactttgggaggccaaggtgggtggatcacttgagcacaggagttcttgaccagcctgggcaacatgatgaaaccccatctctacaaaatacacaaacaaacaaaattggctgggcatggtggcatgtgcccatagtcccagctacttgggaggctgagatgggagggtcaattgagcccaggagactgaggctgcagtgatctgagatcacaccactgcactccagcctgagcaacaaagagagactttgtctcaaaaaaaaaaaaaaaaaaaaaaaaaaaaagaggccaaggcaggcggatcatgaggtcaagagatagagaccagcctggccaacatggtgaaaccccgtctctactaaaaatacaaaaattagctgggcgtggtggcatgcacctgtagtcccagctactcaggaggctgaggcaggagaatggcttgaacccgggaggcagaggttgcagtgagctgagatcgtgccactgcactccagcctggcaatagagcaagactccatctcaaaaaaaaaaaaaaaaagaaagaaagaaactaaaaacaaaaaccccaaaactcgaatggacttctcttccatcctcctttgggcaggtgggcagcagggtgtgtatgcggggccagggtggaagcctgcaggttctcatgcctttatgtgccacatggcagggatgcactgcgggacggtggctctgcggtggatgcagccattgcagccctgttgtgtgtggggctcatgaatgcccacagcatgggcatcgggggtggcctcttcctcaccatctacaacagcaccacacgtgagtgcctcgggagaggagagggagaggggcagggggtgtgggttgggccgaggcacagctgggcggtccccaggctcacgtggcataaagggtttgggtgggcgggcctgcctacctgcttctccttctaggaaaagctgaggtcatcaacgcccgcgaggt

SEQ ID NO: 12264 - DNA, 929 bp, Homo sapiens
gcccagaagtgagagcagttggctgtgccccagtgctgtgtgacccagaggcgccgctcaccctctctgagctggtggacatcataggtggggaagctcaggtcagggcactcccatgagtgtctggaggcctgagtcccattctcagctctgccatatgcttgctgcgctctagaggagttcctcttcctctccaagcctcggtttatgtacccgtgcagtgggagtgagttgcacttcggggtgaagggggcaagacttgtgtgggcgcatcctgcagaaggatcccacagcgggtgcagcccagaactgtcttctgaggaagaggtgctctcctgggcccccactgtccccaggcctcagcaaggcaagtgaggtgctgccgtcatccaggctggacagttcagtgatttgcctgaggccccacagcagagttcaactggagacagagaaaccagctagaggcagagggaggtaacacggagtcccccagaaaggtctgggctgcgcgtgcttcagctatttccaccaaatcctcctgtctttcgtggccaacaccccaggcaaggcttggggcccccgtctgctgctggacgcagagccatgaagaagaagttagtggtgctgggcctgctggccgtggtcctggtgctggtcattgtcggcctctgtctctggctgccctcagcctccaaggaacctgacaaccatgtgtacaccagggctgccgtggccgcggatgccaagcagtgctcgaagattgggagggatgcactgcgggacggtggctctgcggtggatgcagccattgcagccctgttgtgtgtggggctcatgaatgcccacagcatgggcatcgggggtggcctcttcctcaccatctacaacagcaccacacgaaaagctgaggtcatcaacgcccgcgaggt

SEQ ID NO: 12265 - DNA, 7440 bp, Homo sapiens
tccgtgagaggcctgcctgtcctgcaccctgtgcagatgcctcccactgtccgccggggctgctgggcacgccctggctggtctcttggactaggtaagctcatgagtcctctggccgctcctgctccttccctgcctctgctcctcctcggaggtggccacccccagatcccagtcccaattcggaggccccctgaggagtgctgcagggggccacaggcgtggctctgagccactctggagagtggcggggggcccagccagttctgtggctgggactttcccaggcagacaagtctgtctcttcctccccagcgggtgcagcccagaactgtcttctgaggaagaggtgctctcctgggcccccactgtccccaggcctcaggtaagcccatcagggtcccaaggaagggggtctgggtttgaggccaaccatggcagctgacctactttctagcctcagtttcccctagtgtgtgcagctctcacgctgtttgggtgagaaccaggcctctgggcttggacattctttcagtgagtttttagggtggagggatgggaaatggaagcccaggacctcagcagggtgtcttcctccgatccggggacatctgcctgtgggaggctgggcccaccctcccttgctgacctgccctgggaggaagggacagggcccagcactgcctactcccctccctgttcttcccagcagtctgagcctggctgggtgtcccctgctcctccagcagcctacttgggcctttgggtagacagattaacagacaggcgaggctgggtcatggttggaccaccccaggaccctgaccgggggctcagctcatgaccctgagcctgggagagatgaggccatgccctccagggcactcagcatgacccggcccagtggacgggactgggtagcttccttggtgcagggggctgtcatgctaggacggggtcactgaccaggccaggcccctgccccatgacttgtggtggaaatgtccttttgtttttgtttttttgcattttttttgagacggagtttcactcttgttgcccaggctggagtgcagtggtgcaatcttgcctcactgcaacctccacctcctgggttcaagcaattctcctgcctcagctcctgagtagctgggattacaggcacctgccaccatgcctggctaattttttgtatttttagtggagatgggggtttcaccatgttggccaggctgttctcaaactcttcacctcaggtgatccacctgcctctgcctcccaaagtgctgggattataggtgtgagccactgcacccggccatgtgatgggaatgttctgtgtccataatagatgctgcatattgctggcccagctcctgaggctctttggacctccaggaatcggtgtctctatcaggaacccttaaccctgacccggactcccagctgggacccggggtgtcggagtggcaagagcgctgtcaggcctggtgaagggtgtgagctgtccaacggggcagggaggaggcagggcctgttctgcagttggacagacagagccctctagctgctttctggaagactgaagggcaggtgatgttggagggagggagtgcaggcaggggctgtgagggagttcaggtcagaaacaggtggcgcctggattcaggctgtggtggtcacggtggggatgaggggctgctttggattgtgctggggatgtggggtggtgcgctgctgcatgactactgccaggtctctctgctcttagtgtctgcatccagggctgggagggggtcaaatgaatcacactatcggccccaggcccaccaagcctggggaggtggccacccttccatgatggcatttggatgttccctgtgtgtggggagggcacagggactccattcgtagaccacctctgggacagtgtgtctgcctctgaggtcagacgctctgcactgggacagggtggagtggagggaaatccagcttggggctcattggaggggcttgctggcagacaccgccctttgtgggaaactgactgtgggagaggggaaccccaacctctgtcaccacatccctcttccctgttgtcacacctgtcacctgctgccatagccatgagacttcccaagggtcactgctgccactcactgcacagcctggaagggagtccacaggggacatacagtgagcaagagacctgtgccactcaggcctcctgggggtgtccccagtgcagccatgatgataatcacagctaccattcaccaagccctgcccacagtctaacctactctattcacaacactcccagcagcaaggcaagtgaggtgctgccgtcatccaggctggacagttcagtgatttgcctgaggccccacagcaggtgagtggcaagtccagcatcagagcagggcaggctggcggtgccccctgagccccctttgccatgctgaccacatgcacatcctgggcttctgcaggaatgccctgtcccctacctgccctgctccgtgcaaaaccctctttgagctgtgcctgggagacatgctgagagaattcatggaaacaaatgtgttactgacagcctctttgcctccagagttcaactggagacagagaaaccagctagaggcagagggaggtaacacggagtcccccagaaaggtctgggctgcgcgtgcttcaggtaacctcccttgaccttcaggagaacgagaaggctgcctgatcagagagtccctgaagaagattctgtggctacaggcttcagcagagtgtgagggagaccccggttatttcctcagctatttccaccaaatcctcctgtctttcgtggccaacaccccaggcaaggcttggggcccccgtctgctgctggacggtaagtcctggccccgtggcagtgaatctgtggggcgctctgattgtgggcactatggaagctaaaccccatgctccaggtggggtggagggtcttcagaggactcctggacagtgccaggctctaggctggggtgggggacacaggagaaaccaggccaggcccatccctactggagcttctccctaagcagtggaggctcagccactgtaaggaggtaggcaaggccctgcagaaagaggggtgtggaaatctgggggctcccaggaagggccgctgctggagatggggttcttaccaggatgggctctgaagataagcagggaggatttgggagggcagagatgaggcccagagcttctggcagagggcatggcctgcgcaaaggtctgggggccggacagcctgcacgtattctgggaagcgggaaggagacacaggccttgtgtttctgaggcccgactttagactgtgccctgttggggaggggccagggaatgtctgaggctaggcctgaccctgcttcttaccccgtgggtgcagcagagccatgaagaagaagttagtggtgctgggcctgctggccgtggtcctggtgctggtcattgtcggcctctgtctctggctgccctcagcctccaaggaacctgacaaccatgtgtacaccagggctgccgtggccgcggatgccaagcagtgctcgaagattgggaggtgagcagggcagggcatgggacatgggccctgaaaactgggcaagtggacctgagcaataccttcacccccctgagactcagtttccccatgtgtaagcttcgcttggactctctcagtagcctttgggaaggggacagtgactccgagagcagggtgtgggtctctagagccaaacagggccccttttctcagttctaagagtctctgtctctttggaataaactgcactgttttgttgtttggttgttatttttacttatttcttcctatctatctatctatctatctatctatcatctatctatctatctatctatctatctatctatctatctatctatctatctatctactatctatctatctatttatttagagatggagttttgctctgttgccaggctggagtgcagtggtgcaatctcagttaactgcaacctccgcctcccaagttcaagtgattctcatgcctaagtctcccaagtagctgggattacaggcgtgcgccaccacgcccaacaaatttgtgtgtgtgtgtgtgtgtgtgtgtgtgtgtgtgtgtgtgtgtgtgtttccaagacagagtatcgctctgttacccaggctggagggcagtggtgcaatcttggcttactgcaacctccacctcccaggttcaagtgattctcctgcctcagcctccacagtagctgagactacaggcatgtgccaccatgcccagctaatttttgtatttttagtagagacagggttttgctatgttggccaggctggtcttgaactcctgaccttgtgatcctcccacctctgcctctcaaagtgctgggattaaggtgtgagccactgctcctggcctaattatggtgtttttagtagagatggggtttcaccatgttggtcaggctggtcttgaactcctgacctcaggtaatccacccacctgggcctcccaaagtgttgggattacaggtgtgagccaccacgcccggcttattctttttttttttttttttttttggttaggagacaatttctttctttctttttttttattttattttattattattatactttaagttttagggtacatgtgcacaatgtgcaggtttgttacatatgtacatatgtacacatgtgccatgttggtgtgctgcacccaccaactcatcatttagcattaggtatatctcccaatgccatccctcccccctccccccaaggaacactgttgcccaaacagggacatgaagggcttattcttttttgttgttgttttgttttgttttgttttttgagacggagtctcacgctgtctcccaggctggagtgcagtggcgcaatctcggctcgctgcaacctccgtctcctggattcaggtgattctcctgcctcagcctcctgagtagctgatattacaggcatccgccaccacgcccggctaatttttgtatttttagtagagacagggtttcaccataatggtctggctggtctcaaactcctgacctcaggtgatccgcctgccttggcctcccaaagtgctgggattacaggcatgagccaccatgcccggccgggcttattctttttttaaggtggagtcttactctgttacccaggctggagtataggggagcgatcatagcccactgcagcctcaaactcttgggtttaagtgatcttcccgcctcagcttcctaaagtgctgggattacaggtgtgagccatggtgcctggcttctactgttttattctattttagactcttatctcatgttatatacaaagatcagttccctcctaaagacttaaacagaaaaaatattatgtttttcatattttgagacagggtcttgttctgtcacccaggctggagtgcagtggcatgatcatagctcactgcagccttgaactcttgggcttaagcgatcctcccacctcagccccctgagtagctaggactacaggcgtgcatcacacctgactaattaaaaaagactgttttctagagatggtctcactctattgcccaggctggtcttgaactcctggcctcaagtgatcctccaccttggcctcccaaagtgctgagattacaggtgtaagccaccatctctagccgggaaaaaaaatgttattaataaagtatagcaatttccctttttgtcccagttataaaagtcatgtacatttgtttgcttgataaagaggaaactgtctgggcaaggtggtccacacctgtaatcccagcactttgggaggttgaggcgggcagaccacccgaggtcaggagttcgagaccagcctggccaacatggtgcactctgtccctactaaaaatataaaaagttagccgggcatggtggtgtgcgcctgtaatcccagctactcaggaggctgaggcaggggaatcacttgaacccaggaggcagaggttgcagtgagctaagatcatgccactgcactccagcctgggcaactgagtgaaactccctctcagaaaaaaaaaaagaaagaaaagaaaagaaaaagaggaaactgtaatcccagcactttgggaggttgaggcgataggattgctttagaccatgagttcgagaccagcttgggcaacatagaaagaccctatctctacaaaaaagacaaaaaattgccaggtgtggtggttcttacctgtagtcccagctactcagcagactgaagtgggaggattgcttgagcccaggaggtcaaagctgcattgagccaagactgtgccactgcacttcatcctgggtgacaaagtgagaccctgtctcataaaacaaaggctgggcacagtggctcatgcctgtaataccagcactttgggaggccaaggtgggtggatcacttgagcacaggagttcttgaccagcctgggcaacatgatgaaaccccatctctacaaaatacacaaacaaacaaaattggctgggcatggtggcatgtgcccatagtcccagctacttgggaggctgagatgggagggtcaattgagcccaggagactgaggctgcagtgatctgagatcacaccactgcactccagcctgagcaacaaagagagactttgtctcaaaaaaaaaaaaaaaaaaaaaaaaaaaaagaggccaaggcaggcggatcatgaggtcaagagatagagaccagcctggccaacatggtgaaaccccgtctctactaaaaatacaaaaattagctgggcgtggtggcatgcacctgtagtcccagctactcaggaggctgaggcaggagaatggcttgaacccgggaggcagaggttgcagtgagctgagatcgtgccactgcactccagcctggcaatagagcaagactccatctcaaaaaaaaaaaaaaaaagaaagaaagaaactaaaaacaaaaaccccaaaactcgaatggacttctcttccatcctcctttgggcaggtgggcagcagggtgtgtatgcggggccagggtggaagcctgcaggttctcatgcctttatgtgccacatggcagggatgcactgcgggacggtggctctgcggtggatgcagccattgcagccctgttgtgtgtggggctcatgaatgcccacagcatgggcatcgggggtggcctcttcctcaccatctacaacagcaccacacgtgagtgcctcgggagaggagagggagaggggcagggggtgtgggttgggccgaggcacagctgggcggtccccaggctcacgtggcataaagggtttgggtgggcgggcctgcctacctgcttctccttctaggaaaagctgaggtcatcaacgcccgcgaggtggccccc

SEQ ID NO: 12266 - DNA, 747 bp, Homo sapiens
tccgtgagaggcctgcctgtcctgcaccctgtgcagatgcctcccactgtccgccggggctgctgggcacgccctggctggtctcttggactagcgggtgcagcccagaactgtcttctgaggaagaggtgctctcctgggcccccactgtccccaggcctcagcaaggcaagtgaggtgctgccgtcatccaggctggacagttcagtgatttgcctgaggccccacagcaggagaacgagaaggctgcctgatcagagagtccctgaagaagattctgtggctacaggcttcagcagagtgtgagggagaccccggttatttcctcagctatttccaccaaatcctcctgtctttcgtggccaacaccccaggcaaggcttggggcccccgtctgctgctggacgcagagccatgaagaagaagttagtggtgctgggcctgctggccgtggtcctggtgctggtcattgtcggcctctgtctctggctgccctcagcctccaaggaacctgacaaccatgtgtacaccagggctgccgtggccgcggatgccaagcagtgctcgaagattgggagggatgcactgcgggacggtggctctgcggtggatgcagccattgcagccctgttgtgtgtggggctcatgaatgcccacagcatgggcatcgggggtggcctcttcctcaccatctacaacagcaccacacgaaaagctgaggtcatcaacgcccgcgaggtggccccc

SEQ ID NO: 12267 - DNA, 7980 bp, Homo sapiens
gaccagaccgggcgtcgggtgagcccagaagtgagagcagttggctgtgccccagtgctgtgtgacccagaggcgccgctcaccctctctgagctggtggacatcataggtggggaagctcaggtcagggcactcccatgagtgtctggaggcctgagtcccattctcagctctgccatatgcttgctgcgctctagaggagttcctcttcctctccaagcctcggtttatgtacccgtgcagtgggagtgagttgcacttcggggtgaagggggcaagacttgtgtgggcgcatcctgcagaaggatcccacaggtgggcagagccctgggttctttatccgactgggtctgggctgggggcctctgtttcttggctgatgagtttatgtgagtttgagtgaggtatgcgagtgggtgaaggagggctggggggagtcacctgacttgtgcgaagaagctcttgagagagccgtggcttcttggaattaagaggaaagagtgcagcatgaacagacaggccctggaggatctggcagccctgagtgggggcggggggtcagctctggagtagagccagagctgtgatggggttgggggaccctgtgtccttgggccatgcttgcctcgctcctgggttctgtttgtggctgtggattggggtggggcagggccggttgtgcgaggggtcattgcccaactccagggggcgcctgccacctctcagctatatatatagggatatatatagttctttcgacaggtttccagcaggtagtggttattaaatcttactgaaggggtgttttttctgattctcggctctgtgccgcaagggtggaaactgtgagagacagattccaactccacgtctgggtagtaagcatccagtccagggctgtaggcagtcctggggaagacgccagagatctgtgcattctcatatcgagggatagcgactccaggctgggggctggcagggtaaggggtgggtgggtcctgggcttacccgcaggtctgcagacttcctggggccagctgacctcgtaaaatcccttttgtctaagcttcagtttcctgcctgtgaatggggttggggctgtgctctggtttcacccttgtggctctggggttgtggtgacaaagccatcaagctgggttgaaggattaaccaggaaacttcagactggctgccgtgtctacctcttcctcatactcctctctctgctgcatcctgggaagctgctctgctcagcctaaatgaggctcagttgtgtgtgtgcgcacgtgcttgcacgtgtgttggaagtgggtgatactgacaccagagtctgtgtctctgggtgagtgaggcttgcacatttctcgggacagggaactcactaccttatgtgcccaggacaagagctgtggggtctggagaagacttctaggccagcccctgcagtccttcctcaggtgacatggcttccccagacccacttccccctaggtgccctctctgcattcagggggtagagggctgactgggacagaatgtgacacactcagcatgtgaggaaaagcctccttcattctgtaggccctacctctattaacatgtcctttgataaagtgcctcccctcctgtctcccctctctggaatcctcagctgctgccaggcttcagctgtgccccattgaaggcagctctgtctccctactttccccagcccagggttttccttttggggtcagctgcagggatctgggccatcctttgcccactcagactttctttctgcccacctgctgctgtgaatcctgtatgtcatatatatatataaaatatgtaatatattatatattatatgtaatatataatatataaagtatattatataatatgtattatattatatattatataatatgtaatatattatataatatataatatgtattatattatatattatataatatgtaatatattatataatatataatatgtattatattatatattatataatatgtattatattatatattatataatatgtattatatattatataatatgtattatatattatataatatgtattatatattatataatatgtattatatattatataatatgtattatatattatataatatgtattatatattatataatattataatatgtattatatattatataatattatataatatgtattatatattatataacaatatataatgtgtattatatataatataatattatataatgtgtattatatattatataatattatataatgtgtattatatattatataatattatataatgtgtattatatattatataatattatataatgtgtattatatatataatattatataatgtgtattatatatataatattatataatgtgtattatatatataatattatataatgtgtattatatatttaatattatataatgtgtattatatatttaatattatataatgtgtattatatattatataatattatataatgtgtattatatattatataatattatataatgtgtattatatattatataatatatgatgtgtattatatattatatattatatgatgtgtattatatattatataatatatgatgtgtattatatattatataatatatgatgtgtattatatattatataatattatatgatgtgtattatatattatatataatatataatattatatataatatattacatataatatatcatatattatatttatataatttatataatatatcatatattatatttatataatttatataatatatcatatattatatttatataatttatataatatatcatatattatatttatataatttatataatatatcatataaatatattatatatagtattatatatataaaattatactttaagttctagggtacatgtgcacaacgtacaggtttgttacatatgtatacatgtgccatgttggtgtgctgcacccattaacttgtcatttacattaggtatatctcctaatgctatccctccccgttcccctcaccccacaacaggccccagtgtgtgatgttccccttcctgtgtccaagtgttctcattgtttaattccaacctatgagtgagaacatgcatgtcttatatgctctcaggcagagaggaaactgctgagcaggccggggcaggggacagagccctgtggctctccactttagacccctcctggctgactgccatggaatgcagccacttagcagggccaaatcccctgatgttcctgttggctgtctagccttcagggacaggtcatgggaccttggttcctgccctgtcatcttcccagtcaccctgatcttcacggggaggaatagcctgggaaaggacttggtcacagcacctccaccctagggctattgaggatctcacagttgtgtgtctggtgggttctgtccagagcccatttgagagcagtggatgacaggacaggcctatgtgacccaggcaggcagcaatattgggtcagccttcatgtccccttctgtcagctggggcagcctggaagcatgattgtggggtaggtgttatgggcacggaatagacctcaggtggaggctgcaggggctctccggcaccgtagacacagcaggcccaggagcaggggagggagccatgactcagggagactctggcccatatccttggcagatgagggccacaggggaatgggcagcactgtccaaagtcccctgggctgggtccgcagctgttcctggctcagacttcttggtgggctggtcagaaacatgcagtaacttggggcagttaccaggtggccaagcctgcactgctgggctctgtgagcttgggccagctcaggccctctctgggccctgcctttctgggctgttcgggtggttccttgggcctggggtgctaatgtttctggatgggcagcagaaccagtctgcactcagggccccaggccatgttcccggaacacacctttagcattgacagcagcgtgtggtgaggccccttaggctgggttctggtctagtgccaggggcaccactactccaccgcctccagagccatctctgggacactggctgtgagttcagatgttctgaacagggacagggagagccagagggaaccagcctggggctcactggaggggctcgtgggcagacagcgccctttggagggaactgagtctgaaaggaaggaaaccctttccccggctcatagcacctgccatccagggccctcccagggctgcgtgaactttagtcacgtggtgacaggccgagtcaccatgccaagtcactgtgcgcctccttgctgctgtgacgtcagcttccccatcctcccagccaggctggacctccgtgagaggcctgcctgtcctgcaccctgtgcagatgcctcccactgtccgccggggctgctgggcacgccctggctggtctcttggactaggtaagctcatgagtcctctggccgctcctgctccttccctgcctctgctcctcctcggaggtggccacccccagatcccagtcccaattcggaggccccctgaggagtgctgcagggggccacaggcgtggctctgagccactctggagagtggcggggggcccagccagttctgtggctgggactttcccaggcagacaagtctgtctcttcctccccagcgggtgcagcccagaactgtcttctgaggaagaggtgctctcctgggcccccactgtccccaggcctcaggtaagcccatcagggtcccaaggaagggggtctgggtttgaggccaaccatggcagctgacctactttctagcctcagtttcccctagtgtgtgcagctctcacgctgtttgggtgagaaccaggcctctgggcttggacattctttcagtgagtttttagggtggagggatgggaaatggaagcccaggacctcagcagggtgtcttcctccgatccggggacatctgcctgtgggaggctgggcccaccctcccttgctgacctgccctgggaggaagggacagggcccagcactgcctactcccctccctgttcttcccagcagtctgagcctggctgggtgtcccctgctcctccagcagcctacttgggcctttgggtagacagattaacagacaggcgaggctgggtcatggttggaccaccccaggaccctgaccgggggctcagctcatgaccctgagcctgggagagatgaggccatgccctccagggcactcagcatgacccggcccagtggacgggactgggtagcttccttggtgcagggggctgtcatgctaggacggggtcactgaccaggccaggcccctgccccatgacttgtggtggaaatgtccttttgtttttgtttttttgcattttttttgagacggagtttcactcttgttgcccaggctggagtgcagtggtgcaatcttgcctcactgcaacctccacctcctgggttcaagcaattctcctgcctcagctcctgagtagctgggattacaggcacctgccaccatgcctggctaattttttgtatttttagtggagatgggggtttcaccatgttggccaggctgttctcaaactcttcacctcaggtgatccacctgcctctgcctcccaaagtgctgggattataggtgtgagccactgcacccggccatgtgatgggaatgttctgtgtccataatagatgctgcatattgctggcccagctcctgaggctctttggacctccaggaatcggtgtctctatcaggaacccttaaccctgacccggactcccagctgggacccggggtgtcggagtggcaagagcgctgtcaggcctggtgaagggtgtgagctgtccaacggggcagggaggaggcagggcctgttctgcagttggacagacagagccctctagctgctttctggaagactgaagggcaggtgatgttggagggagggagtgcaggcaggggctgtgagggagttcaggtcagaaacaggtggcgcctggattcaggctgtggtggtcacggtggggatgaggggctgctttggattgtgctggggatgtggggtggtgcgctgctgcatgactactgccaggtctctctgctcttagtgtctgcatccagggctgggagggggtcaaatgaatcacactatcggccccaggcccaccaagcctggggaggtggccacccttccatgatggcatttggatgttccctgtgtgtggggagggcacagggactccattcgtagaccacctctgggacagtgtgtctgcctctgaggtcagacgctctgcactgggacagggtggagtggagggaaatccagcttggggctcattggaggggcttgctggcagacaccgccctttgtgggaaactgactgtgggagaggggaaccccaacctctgtcaccacatccctcttccctgttgtcacacctgtcacctgctgccatagccatgagacttcccaagggtcactgctgccactcactgcacagcctggaagggagtccacaggggacatacagtgagcaagagacctgtgccactcaggcctcctgggggtgtccccagtgcagccatgatgataatcacagctaccattcaccaagccctgcccacagtctaacctactctattcacaacactcccagcagcaaggcaagtgaggtgctgccgtcatccaggctggacagttcagtgatttgcctgaggccccacagcaggtgagtggcaagtccagcatcagagcagggcaggctggcggtgccccctgagccccctttgccatgctgaccacatgcacatcctgggcttctgcaggaatgccctgtcccctacctgccctgctccgtgcaaaaccctctttgagctgtgcctgggagacatgctgagagaattcatggaaacaaatgtgttactgacagcctctttgcctccagagttcaactggagacagagaaaccagctagaggcagagggaggtaacacggagtcccccagaaaggtctgggctgcgcgtgcttcaggtaacctcccttgaccttcaggagaacgagaaggctgcctgatcagagagtccctgaagaagattctgtggctacaggcttcagcagagtgtgagggagaccccggttatttcctcagctatttccaccaaatcctcctgtctttcgtggccaacaccccaggcaaggcttggggcccccgtctgctgctggacggtaagtcctggccccgtggcagtgaatctgtggggcgctctgattgtgggcactatggaagctaaaccccatgctccaggtggggtggagggtcttcagaggactcctggacagtgccaggctctaggctggggtgggggacacaggagaaaccaggccaggcccatccctactggagcttctccctaagcagtggaggctcagccactgtaaggaggtaggcaaggccctgcagaaagaggggtgtggaaatctgggggctcccaggaagggccgctgctggagatggggttcttaccaggatgggctctgaagataagcagggaggatttgggagggcagagatgaggcccagagcttctggcagagggcatggcctgcgcaaaggtctgggggccggacagcctgcacgtattctgggaagcgggaaggagacacaggccttgtgtttctgaggcccgactttagactgtgccctgttggggaggggccagggaatgtctgaggctaggcctgaccctgcttcttaccccgtgggtgcagcagagccatgaagaagaagttagtggtgctgggcctgctggccgtggtcctggtgctggtcattgtcggcctctgtctctggctgccctcagcctccaaggaacctgacaaccatgtg

SEQ ID NO: 12268 - DNA, 537 bp, Homo sapiens
gaccagaccgggcgtcgggtgagcccagaagtgagagcagttggctgtgccccagtgctgtgtgacccagaggcgccgctcaccctctctgagctggtggacatcatagcgggtgcagcccagaactgtcttctgaggaagaggtgctctcctgggcccccactgtccccaggcctcagcaaggcaagtgaggtgctgccgtcatccaggctggacagttcagtgatttgcctgaggccccacagcaggagaacgagaaggctgcctgatcagagagtccctgaagaagattctgtggctacaggcttcagcagagtgtgagggagaccccggttatttcctcagctatttccaccaaatcctcctgtctttcgtggccaacaccccaggcaaggcttggggcccccgtctgctgctggacgagccatgaagaagaagttagtggtgctgggcctgctggccgtggtcctggtgctggtcattgtcggcctctgtctctggctgccctcagcctccaaggaacctgacaaccatgtg

SEQ ID NO: 12269 - DNA, 640 bp, Homo sapiens
ttcgcagcggaccgaagagaagaaaagtaggccagagccgaactctcttcctgccaagatgtctattggtgtgccgattaaagtactgcatgaggccgagggccacattgtgacatgtgagacgaacaccggtgaggtatatcgggggaagctcattgaagcagaggacaacatgaactgccagatgtccaacatcacagtcacatacagagatggccgagtggcacagctggagcaggttatctgagttcattggagtgggtgcttgtgcatatatgctaggctctggctccgctactgcatcgtgtgcttctgtccaagaggcagagagactgaaactatctgctgccgcctggattctcccagagattgcctggaacaccagctcgggtcctcgcacaccatcctgcgggtgcagcccagaactgtcttctgaggaagaggtgctctcctgggcccccactgtccccaggcctcagatgctgcatattgctggcccagctcctgaggctctttggacctccaggaatcggtgtctctatcaggaacccttaaccctgacccggactcccagctgggacccggggtgtcggagtggcaagagcgctgtcaggcctggtgaagggtgtgagctgtccaa

SEQ ID NO: 12270 - DNA, 11631 bp, Homo sapiens
cttagcttggttttggtgtgctgctggatgaccagaccgggcgtcgggtgagcccagaagtgagagcagttggctgtgccccagtgctgtgtgacccagaggcgccgctcaccctctctgagctggtggacatcataggtggggaagctcaggtcagggcactcccatgagtgtctggaggcctgagtcccattctcagctctgccatatgcttgctgcgctctagaggagttcctcttcctctccaagcctcggtttatgtacccgtgcagtgggagtgagttgcacttcggggtgaagggggcaagacttgtgtgggcgcatcctgcagaaggatcccacaggtgggcagagccctgggttctttatccgactgggtctgggctgggggcctctgtttcttggctgatgagtttatgtgagtttgagtgaggtatgcgagtgggtgaaggagggctggggggagtcacctgacttgtgcgaagaagctcttgagagagccgtggcttcttggaattaagaggaaagagtgcagcatgaacagacaggccctggaggatctggcagccctgagtgggggcggggggtcagctctggagtagagccagagctgtgatggggttgggggaccctgtgtccttgggccatgcttgcctcgctcctgggttctgtttgtggctgtggattggggtggggcagggccggttgtgcgaggggtcattgcccaactccagggggcgcctgccacctctcagctatatatatagggatatatatagttctttcgacaggtttccagcaggtagtggttattaaatcttactgaaggggtgttttttctgattctcggctctgtgccgcaagggtggaaactgtgagagacagattccaactccacgtctgggtagtaagcatccagtccagggctgtaggcagtcctggggaagacgccagagatctgtgcattctcatatcgagggatagcgactccaggctgggggctggcagggtaaggggtgggtgggtcctgggcttacccgcaggtctgcagacttcctggggccagctgacctcgtaaaatcccttttgtctaagcttcagtttcctgcctgtgaatggggttggggctgtgctctggtttcacccttgtggctctggggttgtggtgacaaagccatcaagctgggttgaaggattaaccaggaaacttcagactggctgccgtgtctacctcttcctcatactcctctctctgctgcatcctgggaagctgctctgctcagcctaaatgaggctcagttgtgtgtgtgcgcacgtgcttgcacgtgtgttggaagtgggtgatactgacaccagagtctgtgtctctgggtgagtgaggcttgcacatttctcgggacagggaactcactaccttatgtgcccaggacaagagctgtggggtctggagaagacttctaggccagcccctgcagtccttcctcaggtgacatggcttccccagacccacttccccctaggtgccctctctgcattcagggggtagagggctgactgggacagaatgtgacacactcagcatgtgaggaaaagcctccttcattctgtaggccctacctctattaacatgtcctttgataaagtgcctcccctcctgtctcccctctctggaatcctcagctgctgccaggcttcagctgtgccccattgaaggcagctctgtctccctactttccccagcccagggttttccttttggggtcagctgcagggatctgggccatcctttgcccactcagactttctttctgcccacctgctgctgtgaatcctgtatgtcatatatatatataaaatatgtaatatattatatattatatgtaatatataatatataaagtatattatataatatgtattatattatatattatataatatgtaatatattatataatatataatatgtattatattatatattatataatatgtaatatattatataatatataatatgtattatattatatattatataatatgtattatattatatattatataatatgtattatatattatataatatgtattatatattatataatatgtattatatattatataatatgtattatatattatataatatgtattatatattatataatatgtattatatattatataatattataatatgtattatatattatataatattatataatatgtattatatattatataacaatatataatgtgtattatatataatataatattatataatgtgtattatatattatataatattatataatgtgtattatatattatataatattatataatgtgtattatatattatataatattatataatgtgtattatatatataatattatataatgtgtattatatatataatattatataatgtgtattatatatataatattatataatgtgtattatatatttaatattatataatgtgtattatatatttaatattatataatgtgtattatatattatataatattatataatgtgtattatatattatataatattatataatgtgtattatatattatataatatatgatgtgtattatatattatatattatatgatgtgtattatatattatataatatatgatgtgtattatatattatataatatatgatgtgtattatatattatataatattatatgatgtgtattatatattatatataatatataatattatatataatatattacatataatatatcatatattatatttatataatttatataatatatcatatattatatttatataatttatataatatatcatatattatatttatataatttatataatatatcatatattatatttatataatttatataatatatcatataaatatattatatatagtattatatatataaaattatactttaagttctagggtacatgtgcacaacgtacaggtttgttacatatgtatacatgtgccatgttggtgtgctgcacccattaacttgtcatttacattaggtatatctcctaatgctatccctccccgttcccctcaccccacaacaggccccagtgtgtgatgttccccttcctgtgtccaagtgttctcattgtttaattccaacctatgagtgagaacatgcatgtcttatatgctctcaggcagagaggaaactgctgagcaggccggggcaggggacagagccctgtggctctccactttagacccctcctggctgactgccatggaatgcagccacttagcagggccaaatcccctgatgttcctgttggctgtctagccttcagggacaggtcatgggaccttggttcctgccctgtcatcttcccagtcaccctgatcttcacggggaggaatagcctgggaaaggacttggtcacagcacctccaccctagggctattgaggatctcacagttgtgtgtctggtgggttctgtccagagcccatttgagagcagtggatgacaggacaggcctatgtgacccaggcaggcagcaatattgggtcagccttcatgtccccttctgtcagctggggcagcctggaagcatgattgtggggtaggtgttatgggcacggaatagacctcaggtggaggctgcaggggctctccggcaccgtagacacagcaggcccaggagcaggggagggagccatgactcagggagactctggcccatatccttggcagatgagggccacaggggaatgggcagcactgtccaaagtcccctgggctgggtccgcagctgttcctggctcagacttcttggtgggctggtcagaaacatgcagtaacttggggcagttaccaggtggccaagcctgcactgctgggctctgtgagcttgggccagctcaggccctctctgggccctgcctttctgggctgttcgggtggttccttgggcctggggtgctaatgtttctggatgggcagcagaaccagtctgcactcagggccccaggccatgttcccggaacacacctttagcattgacagcagcgtgtggtgaggccccttaggctgggttctggtctagtgccaggggcaccactactccaccgcctccagagccatctctgggacactggctgtgagttcagatgttctgaacagggacagggagagccagagggaaccagcctggggctcactggaggggctcgtgggcagacagcgccctttggagggaactgagtctgaaaggaaggaaaccctttccccggctcatagcacctgccatccagggccctcccagggctgcgtgaactttagtcacgtggtgacaggccgagtcaccatgccaagtcactgtgcgcctccttgctgctgtgacgtcagcttccccatcctcccagccaggctggacctccgtgagaggcctgcctgtcctgcaccctgtgcagatgcctcccactgtccgccggggctgctgggcacgccctggctggtctcttggactaggtaagctcatgagtcctctggccgctcctgctccttccctgcctctgctcctcctcggaggtggccacccccagatcccagtcccaattcggaggccccctgaggagtgctgcagggggccacaggcgtggctctgagccactctggagagtggcggggggcccagccagttctgtggctgggactttcccaggcagacaagtctgtctcttcctccccagcgggtgcagcccagaactgtcttctgaggaagaggtgctctcctgggcccccactgtccccaggcctcaggtaagcccatcagggtcccaaggaagggggtctgggtttgaggccaaccatggcagctgacctactttctagcctcagtttcccctagtgtgtgcagctctcacgctgtttgggtgagaaccaggcctctgggcttggacattctttcagtgagtttttagggtggagggatgggaaatggaagcccaggacctcagcagggtgtcttcctccgatccggggacatctgcctgtgggaggctgggcccaccctcccttgctgacctgccctgggaggaagggacagggcccagcactgcctactcccctccctgttcttcccagcagtctgagcctggctgggtgtcccctgctcctccagcagcctacttgggcctttgggtagacagattaacagacaggcgaggctgggtcatggttggaccaccccaggaccctgaccgggggctcagctcatgaccctgagcctgggagagatgaggccatgccctccagggcactcagcatgacccggcccagtggacgggactgggtagcttccttggtgcagggggctgtcatgctaggacggggtcactgaccaggccaggcccctgccccatgacttgtggtggaaatgtccttttgtttttgtttttttgcattttttttgagacggagtttcactcttgttgcccaggctggagtgcagtggtgcaatcttgcctcactgcaacctccacctcctgggttcaagcaattctcctgcctcagctcctgagtagctgggattacaggcacctgccaccatgcctggctaattttttgtatttttagtggagatgggggtttcaccatgttggccaggctgttctcaaactcttcacctcaggtgatccacctgcctctgcctcccaaagtgctgggattataggtgtgagccactgcacccggccatgtgatgggaatgttctgtgtccataatagatgctgcatattgctggcccagctcctgaggctctttggacctccaggaatcggtgtctctatcaggaacccttaaccctgacccggactcccagctgggacccggggtgtcggagtggcaagagcgctgtcaggcctggtgaagggtgtgagctgtccaacggggcagggaggaggcagggcctgttctgcagttggacagacagagccctctagctgctttctggaagactgaagggcaggtgatgttggagggagggagtgcaggcaggggctgtgagggagttcaggtcagaaacaggtggcgcctggattcaggctgtggtggtcacggtggggatgaggggctgctttggattgtgctggggatgtggggtggtgcgctgctgcatgactactgccaggtctctctgctcttagtgtctgcatccagggctgggagggggtcaaatgaatcacactatcggccccaggcccaccaagcctggggaggtggccacccttccatgatggcatttggatgttccctgtgtgtggggagggcacagggactccattcgtagaccacctctgggacagtgtgtctgcctctgaggtcagacgctctgcactgggacagggtggagtggagggaaatccagcttggggctcattggaggggcttgctggcagacaccgccctttgtgggaaactgactgtgggagaggggaaccccaacctctgtcaccacatccctcttccctgttgtcacacctgtcacctgctgccatagccatgagacttcccaagggtcactgctgccactcactgcacagcctggaagggagtccacaggggacatacagtgagcaagagacctgtgccactcaggcctcctgggggtgtccccagtgcagccatgatgataatcacagctaccattcaccaagccctgcccacagtctaacctactctattcacaacactcccagcagcaaggcaagtgaggtgctgccgtcatccaggctggacagttcagtgatttgcctgaggccccacagcaggtgagtggcaagtccagcatcagagcagggcaggctggcggtgccccctgagccccctttgccatgctgaccacatgcacatcctgggcttctgcaggaatgccctgtcccctacctgccctgctccgtgcaaaaccctctttgagctgtgcctgggagacatgctgagagaattcatggaaacaaatgtgttactgacagcctctttgcctccagagttcaactggagacagagaaaccagctagaggcagagggaggtaacacggagtcccccagaaaggtctgggctgcgcgtgcttcaggtaacctcccttgaccttcaggagaacgagaaggctgcctgatcagagagtccctgaagaagattctgtggctacaggcttcagcagagtgtgagggagaccccggttatttcctcagctatttccaccaaatcctcctgtctttcgtggccaacaccccaggcaaggcttggggcccccgtctgctgctggacggtaagtcctggccccgtggcagtgaatctgtggggcgctctgattgtgggcactatggaagctaaaccccatgctccaggtggggtggagggtcttcagaggactcctggacagtgccaggctctaggctggggtgggggacacaggagaaaccaggccaggcccatccctactggagcttctccctaagcagtggaggctcagccactgtaaggaggtaggcaaggccctgcagaaagaggggtgtggaaatctgggggctcccaggaagggccgctgctggagatggggttcttaccaggatgggctctgaagataagcagggaggatttgggagggcagagatgaggcccagagcttctggcagagggcatggcctgcgcaaaggtctgggggccggacagcctgcacgtattctgggaagcgggaaggagacacaggccttgtgtttctgaggcccgactttagactgtgccctgttggggaggggccagggaatgtctgaggctaggcctgaccctgcttcttaccccgtgggtgcagcagagccatgaagaagaagttagtggtgctgggcctgctggccgtggtcctggtgctggtcattgtcggcctctgtctctggctgccctcagcctccaaggaacctgacaaccatgtgtacaccagggctgccgtggccgcggatgccaagcagtgctcgaagattgggaggtgagcagggcagggcatgggacatgggccctgaaaactgggcaagtggacctgagcaataccttcacccccctgagactcagtttccccatgtgtaagcttcgcttggactctctcagtagcctttgggaaggggacagtgactccgagagcagggtgtgggtctctagagccaaacagggccccttttctcagttctaagagtctctgtctctttggaataaactgcactgttttgttgtttggttgttatttttacttatttcttcctatctatctatctatctatctatctatcatctatctatctatctatctatctatctatctatctatctatctatctatctatctactatctatctatctatttatttagagatggagttttgctctgttgccaggctggagtgcagtggtgcaatctcagttaactgcaacctccgcctcccaagttcaagtgattctcatgcctaagtctcccaagtagctgggattacaggcgtgcgccaccacgcccaacaaatttgtgtgtgtgtgtgtgtgtgtgtgtgtgtgtgtgtgtgtgtgtgtgtttccaagacagagtatcgctctgttacccaggctggagggcagtggtgcaatcttggcttactgcaacctccacctcccaggttcaagtgattctcctgcctcagcctccacagtagctgagactacaggcatgtgccaccatgcccagctaatttttgtatttttagtagagacagggttttgctatgttggccaggctggtcttgaactcctgaccttgtgatcctcccacctctgcctctcaaagtgctgggattaaggtgtgagccactgctcctggcctaattatggtgtttttagtagagatggggtttcaccatgttggtcaggctggtcttgaactcctgacctcaggtaatccacccacctgggcctcccaaagtgttgggattacaggtgtgagccaccacgcccggcttattctttttttttttttttttttttggttaggagacaatttctttctttctttttttttattttattttattattattatactttaagttttagggtacatgtgcacaatgtgcaggtttgttacatatgtacatatgtacacatgtgccatgttggtgtgctgcacccaccaactcatcatttagcattaggtatatctcccaatgccatccctcccccctccccccaaggaacactgttgcccaaacagggacatgaagggcttattcttttttgttgttgttttgttttgttttgttttttgagacggagtctcacgctgtctcccaggctggagtgcagtggcgcaatctcggctcgctgcaacctccgtctcctggattcaggtgattctcctgcctcagcctcctgagtagctgatattacaggcatccgccaccacgcccggctaatttttgtatttttagtagagacagggtttcaccataatggtctggctggtctcaaactcctgacctcaggtgatccgcctgccttggcctcccaaagtgctgggattacaggcatgagccaccatgcccggccgggcttattctttttttaaggtggagtcttactctgttacccaggctggagtataggggagcgatcatagcccactgcagcctcaaactcttgggtttaagtgatcttcccgcctcagcttcctaaagtgctgggattacaggtgtgagccatggtgcctggcttctactgttttattctattttagactcttatctcatgttatatacaaagatcagttccctcctaaagacttaaacagaaaaaatattatgtttttcatattttgagacagggtcttgttctgtcacccaggctggagtgcagtggcatgatcatagctcactgcagccttgaactcttgggcttaagcgatcctcccacctcagccccctgagtagctaggactacaggcgtgcatcacacctgactaattaaaaaagactgttttctagagatggtctcactctattgcccaggctggtcttgaactcctggcctcaagtgatcctccaccttggcctcccaaagtgctgagattacaggtgtaagccaccatctctagccgggaaaaaaaatgttattaataaagtatagcaatttccctttttgtcccagttataaaagtcatgtacatttgtttgcttgataaagaggaaactgtctgggcaaggtggtccacacctgtaatcccagcactttgggaggttgaggcgggcagaccacccgaggtcaggagttcgagaccagcctggccaacatggtgcactctgtccctactaaaaatataaaaagttagccgggcatggtggtgtgcgcctgtaatcccagctactcaggaggctgaggcaggggaatcacttgaacccaggaggcagaggttgcagtgagctaagatcatgccactgcactccagcctgggcaactgagtgaaactccctctcagaaaaaaaaaaagaaagaaaagaaaagaaaaagaggaaactgtaatcccagcactttgggaggttgaggcgataggattgctttagaccatgagttcgagaccagcttgggcaacatagaaagaccctatctctacaaaaaagacaaaaaattgccaggtgtggtggttcttacctgtagtcccagctactcagcagactgaagtgggaggattgcttgagcccaggaggtcaaagctgcattgagccaagactgtgccactgcacttcatcctgggtgacaaagtgagaccctgtctcataaaacaaaggctgggcacagtggctcatgcctgtaataccagcactttgggaggccaaggtgggtggatcacttgagcacaggagttcttgaccagcctgggcaacatgatgaaaccccatctctacaaaatacacaaacaaacaaaattggctgggcatggtggcatgtgcccatagtcccagctacttgggaggctgagatgggagggtcaattgagcccaggagactgaggctgcagtgatctgagatcacaccactgcactccagcctgagcaacaaagagagactttgtctcaaaaaaaaaaaaaaaaaaaaaaaaaaaaagaggccaaggcaggcggatcatgaggtcaagagatagagaccagcctggccaacatggtgaaaccccgtctctactaaaaatacaaaaattagctgggcgtggtggcatgcacctgtagtcccagctactcaggaggctgaggcaggagaatggcttgaacccgggaggcagaggttgcagtgagctgagatcgtgccactgcactccagcctggcaatagagcaagactccatctcaaaaaaaaaaaaaaaaagaaagaaagaaactaaaaacaaaaaccccaaaactcgaatggacttctcttccatcctcctttgggcaggtgggcagcagggtgtgtatgcggggccagggtggaagcctgcaggttctcatgcctttatgtgccacatggcagggatgcactgcgggacggtggctctgcggtggatgcagc

SEQ ID NO: 12271 - DNA, 606 bp, Homo sapiens
cttagcttggttttggtgtgctgctggatgaccagaccgggcgtcgggtgagcccagaagtgagagcagttggctgtgccccagtgctgtgtgacccagaggcgccgctcaccctctctgagctggtggacatcataggtggggaagctcagcgggtgcagcccagaactgtcttctgaggaagaggtgctctcctgggcccccactgtccccaggcctcaggagaacgagaaggctgcctgatcagagagtccctgaagaagattctgtggctacaggcttcagcagagtgtgagggagaccccggttatttcctcagctatttccaccaaatcctcctgtctttcgtggccaacaccccaggcaaggcttggggcccccgtctgctgctggacgcagagccatgaagaagaagttagtggtgctgggcctgctggccgtggtcctggtgctggtcattgtcggcctctgtctctggctgccctcagcctccaaggaacctgacaaccatgtgtacaccagggctgccgtggccgcggatgccaagcagtgctcgaagattgggagggatgcactgcgggacggtggctctgcggtggatgcagc

SEQ ID NO: 12272 - DNA, 7505 bp, Homo sapiens
tcccagccaggctggacctccgtgagaggcctgcctgtcctgcaccctgtgcagatgcctcccactgtccgccggggctgctgggcacgccctggctggtctcttggactaggtaagctcatgagtcctctggccgctcctgctccttccctgcctctgctcctcctcggaggtggccacccccagatcccagtcccaattcggaggccccctgaggagtgctgcagggggccacaggcgtggctctgagccactctggagagtggcggggggcccagccagttctgtggctgggactttcccaggcagacaagtctgtctcttcctccccagcgggtgcagcccagaactgtcttctgaggaagaggtgctctcctgggcccccactgtccccaggcctcaggtaagcccatcagggtcccaaggaagggggtctgggtttgaggccaaccatggcagctgacctactttctagcctcagtttcccctagtgtgtgcagctctcacgctgtttgggtgagaaccaggcctctgggcttggacattctttcagtgagtttttagggtggagggatgggaaatggaagcccaggacctcagcagggtgtcttcctccgatccggggacatctgcctgtgggaggctgggcccaccctcccttgctgacctgccctgggaggaagggacagggcccagcactgcctactcccctccctgttcttcccagcagtctgagcctggctgggtgtcccctgctcctccagcagcctacttgggcctttgggtagacagattaacagacaggcgaggctgggtcatggttggaccaccccaggaccctgaccgggggctcagctcatgaccctgagcctgggagagatgaggccatgccctccagggcactcagcatgacccggcccagtggacgggactgggtagcttccttggtgcagggggctgtcatgctaggacggggtcactgaccaggccaggcccctgccccatgacttgtggtggaaatgtccttttgtttttgtttttttgcattttttttgagacggagtttcactcttgttgcccaggctggagtgcagtggtgcaatcttgcctcactgcaacctccacctcctgggttcaagcaattctcctgcctcagctcctgagtagctgggattacaggcacctgccaccatgcctggctaattttttgtatttttagtggagatgggggtttcaccatgttggccaggctgttctcaaactcttcacctcaggtgatccacctgcctctgcctcccaaagtgctgggattataggtgtgagccactgcacccggccatgtgatgggaatgttctgtgtccataatagatgctgcatattgctggcccagctcctgaggctctttggacctccaggaatcggtgtctctatcaggaacccttaaccctgacccggactcccagctgggacccggggtgtcggagtggcaagagcgctgtcaggcctggtgaagggtgtgagctgtccaacggggcagggaggaggcagggcctgttctgcagttggacagacagagccctctagctgctttctggaagactgaagggcaggtgatgttggagggagggagtgcaggcaggggctgtgagggagttcaggtcagaaacaggtggcgcctggattcaggctgtggtggtcacggtggggatgaggggctgctttggattgtgctggggatgtggggtggtgcgctgctgcatgactactgccaggtctctctgctcttagtgtctgcatccagggctgggagggggtcaaatgaatcacactatcggccccaggcccaccaagcctggggaggtggccacccttccatgatggcatttggatgttccctgtgtgtggggagggcacagggactccattcgtagaccacctctgggacagtgtgtctgcctctgaggtcagacgctctgcactgggacagggtggagtggagggaaatccagcttggggctcattggaggggcttgctggcagacaccgccctttgtgggaaactgactgtgggagaggggaaccccaacctctgtcaccacatccctcttccctgttgtcacacctgtcacctgctgccatagccatgagacttcccaagggtcactgctgccactcactgcacagcctggaagggagtccacaggggacatacagtgagcaagagacctgtgccactcaggcctcctgggggtgtccccagtgcagccatgatgataatcacagctaccattcaccaagccctgcccacagtctaacctactctattcacaacactcccagcagcaaggcaagtgaggtgctgccgtcatccaggctggacagttcagtgatttgcctgaggccccacagcaggtgagtggcaagtccagcatcagagcagggcaggctggcggtgccccctgagccccctttgccatgctgaccacatgcacatcctgggcttctgcaggaatgccctgtcccctacctgccctgctccgtgcaaaaccctctttgagctgtgcctgggagacatgctgagagaattcatggaaacaaatgtgttactgacagcctctttgcctccagagttcaactggagacagagaaaccagctagaggcagagggaggtaacacggagtcccccagaaaggtctgggctgcgcgtgcttcaggtaacctcccttgaccttcaggagaacgagaaggctgcctgatcagagagtccctgaagaagattctgtggctacaggcttcagcagagtgtgagggagaccccggttatttcctcagctatttccaccaaatcctcctgtctttcgtggccaacaccccaggcaaggcttggggcccccgtctgctgctggacggtaagtcctggccccgtggcagtgaatctgtggggcgctctgattgtgggcactatggaagctaaaccccatgctccaggtggggtggagggtcttcagaggactcctggacagtgccaggctctaggctggggtgggggacacaggagaaaccaggccaggcccatccctactggagcttctccctaagcagtggaggctcagccactgtaaggaggtaggcaaggccctgcagaaagaggggtgtggaaatctgggggctcccaggaagggccgctgctggagatggggttcttaccaggatgggctctgaagataagcagggaggatttgggagggcagagatgaggcccagagcttctggcagagggcatggcctgcgcaaaggtctgggggccggacagcctgcacgtattctgggaagcgggaaggagacacaggccttgtgtttctgaggcccgactttagactgtgccctgttggggaggggccagggaatgtctgaggctaggcctgaccctgcttcttaccccgtgggtgcagcagagccatgaagaagaagttagtggtgctgggcctgctggccgtggtcctggtgctggtcattgtcggcctctgtctctggctgccctcagcctccaaggaacctgacaaccatgtgtacaccagggctgccgtggccgcggatgccaagcagtgctcgaagattgggaggtgagcagggcagggcatgggacatgggccctgaaaactgggcaagtggacctgagcaataccttcacccccctgagactcagtttccccatgtgtaagcttcgcttggactctctcagtagcctttgggaaggggacagtgactccgagagcagggtgtgggtctctagagccaaacagggccccttttctcagttctaagagtctctgtctctttggaataaactgcactgttttgttgtttggttgttatttttacttatttcttcctatctatctatctatctatctatctatcatctatctatctatctatctatctatctatctatctatctatctatctatctatctactatctatctatctatttatttagagatggagttttgctctgttgccaggctggagtgcagtggtgcaatctcagttaactgcaacctccgcctcccaagttcaagtgattctcatgcctaagtctcccaagtagctgggattacaggcgtgcgccaccacgcccaacaaatttgtgtgtgtgtgtgtgtgtgtgtgtgtgtgtgtgtgtgtgtgtgtgtttccaagacagagtatcgctctgttacccaggctggagggcagtggtgcaatcttggcttactgcaacctccacctcccaggttcaagtgattctcctgcctcagcctccacagtagctgagactacaggcatgtgccaccatgcccagctaatttttgtatttttagtagagacagggttttgctatgttggccaggctggtcttgaactcctgaccttgtgatcctcccacctctgcctctcaaagtgctgggattaaggtgtgagccactgctcctggcctaattatggtgtttttagtagagatggggtttcaccatgttggtcaggctggtcttgaactcctgacctcaggtaatccacccacctgggcctcccaaagtgttgggattacaggtgtgagccaccacgcccggcttattctttttttttttttttttttttggttaggagacaatttctttctttctttttttttattttattttattattattatactttaagttttagggtacatgtgcacaatgtgcaggtttgttacatatgtacatatgtacacatgtgccatgttggtgtgctgcacccaccaactcatcatttagcattaggtatatctcccaatgccatccctcccccctccccccaaggaacactgttgcccaaacagggacatgaagggcttattcttttttgttgttgttttgttttgttttgttttttgagacggagtctcacgctgtctcccaggctggagtgcagtggcgcaatctcggctcgctgcaacctccgtctcctggattcaggtgattctcctgcctcagcctcctgagtagctgatattacaggcatccgccaccacgcccggctaatttttgtatttttagtagagacagggtttcaccataatggtctggctggtctcaaactcctgacctcaggtgatccgcctgccttggcctcccaaagtgctgggattacaggcatgagccaccatgcccggccgggcttattctttttttaaggtggagtcttactctgttacccaggctggagtataggggagcgatcatagcccactgcagcctcaaactcttgggtttaagtgatcttcccgcctcagcttcctaaagtgctgggattacaggtgtgagccatggtgcctggcttctactgttttattctattttagactcttatctcatgttatatacaaagatcagttccctcctaaagacttaaacagaaaaaatattatgtttttcatattttgagacagggtcttgttctgtcacccaggctggagtgcagtggcatgatcatagctcactgcagccttgaactcttgggcttaagcgatcctcccacctcagccccctgagtagctaggactacaggcgtgcatcacacctgactaattaaaaaagactgttttctagagatggtctcactctattgcccaggctggtcttgaactcctggcctcaagtgatcctccaccttggcctcccaaagtgctgagattacaggtgtaagccaccatctctagccgggaaaaaaaatgttattaataaagtatagcaatttccctttttgtcccagttataaaagtcatgtacatttgtttgcttgataaagaggaaactgtctgggcaaggtggtccacacctgtaatcccagcactttgggaggttgaggcgggcagaccacccgaggtcaggagttcgagaccagcctggccaacatggtgcactctgtccctactaaaaatataaaaagttagccgggcatggtggtgtgcgcctgtaatcccagctactcaggaggctgaggcaggggaatcacttgaacccaggaggcagaggttgcagtgagctaagatcatgccactgcactccagcctgggcaactgagtgaaactccctctcagaaaaaaaaaaagaaagaaaagaaaagaaaaagaggaaactgtaatcccagcactttgggaggttgaggcgataggattgctttagaccatgagttcgagaccagcttgggcaacatagaaagaccctatctctacaaaaaagacaaaaaattgccaggtgtggtggttcttacctgtagtcccagctactcagcagactgaagtgggaggattgcttgagcccaggaggtcaaagctgcattgagccaagactgtgccactgcacttcatcctgggtgacaaagtgagaccctgtctcataaaacaaaggctgggcacagtggctcatgcctgtaataccagcactttgggaggccaaggtgggtggatcacttgagcacaggagttcttgaccagcctgggcaacatgatgaaaccccatctctacaaaatacacaaacaaacaaaattggctgggcatggtggcatgtgcccatagtcccagctacttgggaggctgagatgggagggtcaattgagcccaggagactgaggctgcagtgatctgagatcacaccactgcactccagcctgagcaacaaagagagactttgtctcaaaaaaaaaaaaaaaaaaaaaaaaaaaaagaggccaaggcaggcggatcatgaggtcaagagatagagaccagcctggccaacatggtgaaaccccgtctctactaaaaatacaaaaattagctgggcgtggtggcatgcacctgtagtcccagctactcaggaggctgaggcaggagaatggcttgaacccgggaggcagaggttgcagtgagctgagatcgtgccactgcactccagcctggcaatagagcaagactccatctcaaaaaaaaaaaaaaaaagaaagaaagaaactaaaaacaaaaaccccaaaactcgaatggacttctcttccatcctcctttgggcaggtgggcagcagggtgtgtatgcggggccagggtggaagcctgcaggttctcatgcctttatgtgccacatggcagggatgcactgcgggacggtggctctgcggtggatgcagccattgcagccctgttgtgtgtggggctcatgaatgcccacagcatgggcatcgggggtggcctcttcctcaccatctacaacagcaccacacgtgagtgcctcgggagaggagagggagaggggcagggggtgtgggttgggccgaggcacagctgggcggtccccaggctcacgtggcataaagggtttgggtgggcgggcctgcctacctgcttctccttctaggaaaagctgaggtcatcaacgcccgcgaggtggcccccaggctggcctttgccaccatgttcaacagctcggagcagtcccagaa

SEQ ID NO: 12273 - DNA, 743 bp, Homo sapiens
tcccagccaggctggacctccgtgagaggcctgcctgtcctgcaccctgtgcagatgcctcccactgtccgccggggctgctgggcacgccctggctggtctcttggactagcgggtgcagcccagaactgtcttctgaggaagaggtgctctcctgggcccccactgtccccaggcctcaggagaacgagaaggctgcctgatcagagagtccctgaagaagattctgtggctacaggcttcagcagagtgtgagggagaccccggttatttcctcagctatttccaccaaatcctcctgtctttcgtggccaacaccccaggcaaggcttggggcccccgtctgctgctggacgcagagccatgaagaagaagttagtggtgctgggcctgctggccgtggtcctggtgctggtcattgtcggcctctgtctctggctgccctcagcctccaaggaacctgacaaccatgtgtacaccagggctgccgtggccgcggatgccaagcagtgctcgaagattgggagggatgcactgcgggacggtggctctgcggtggatgcagccattgcagccctgttgtgtgtggggctcatgaatgcccacagcatgggcatcgggggtggcctcttcctcaccatctacaacagcaccacacgaaaagctgaggtcatcaacgcccgcgaggtggcccccaggctggcctttgccaccatgttcaacagctcggagcagtcccagaa

SEQ ID NO: 12274 - DNA, 7435 bp, Homo sapiens
cctgcaccctgtgcagatgcctcccactgtccgccggggctgctgggcacgccctggctggtctcttggactaggtaagctcatgagtcctctggccgctcctgctccttccctgcctctgctcctcctcggaggtggccacccccagatcccagtcccaattcggaggccccctgaggagtgctgcagggggccacaggcgtggctctgagccactctggagagtggcggggggcccagccagttctgtggctgggactttcccaggcagacaagtctgtctcttcctccccagcgggtgcagcccagaactgtcttctgaggaagaggtgctctcctgggcccccactgtccccaggcctcaggtaagcccatcagggtcccaaggaagggggtctgggtttgaggccaaccatggcagctgacctactttctagcctcagtttcccctagtgtgtgcagctctcacgctgtttgggtgagaaccaggcctctgggcttggacattctttcagtgagtttttagggtggagggatgggaaatggaagcccaggacctcagcagggtgtcttcctccgatccggggacatctgcctgtgggaggctgggcccaccctcccttgctgacctgccctgggaggaagggacagggcccagcactgcctactcccctccctgttcttcccagcagtctgagcctggctgggtgtcccctgctcctccagcagcctacttgggcctttgggtagacagattaacagacaggcgaggctgggtcatggttggaccaccccaggaccctgaccgggggctcagctcatgaccctgagcctgggagagatgaggccatgccctccagggcactcagcatgacccggcccagtggacgggactgggtagcttccttggtgcagggggctgtcatgctaggacggggtcactgaccaggccaggcccctgccccatgacttgtggtggaaatgtccttttgtttttgtttttttgcattttttttgagacggagtttcactcttgttgcccaggctggagtgcagtggtgcaatcttgcctcactgcaacctccacctcctgggttcaagcaattctcctgcctcagctcctgagtagctgggattacaggcacctgccaccatgcctggctaattttttgtatttttagtggagatgggggtttcaccatgttggccaggctgttctcaaactcttcacctcaggtgatccacctgcctctgcctcccaaagtgctgggattataggtgtgagccactgcacccggccatgtgatgggaatgttctgtgtccataatagatgctgcatattgctggcccagctcctgaggctctttggacctccaggaatcggtgtctctatcaggaacccttaaccctgacccggactcccagctgggacccggggtgtcggagtggcaagagcgctgtcaggcctggtgaagggtgtgagctgtccaacggggcagggaggaggcagggcctgttctgcagttggacagacagagccctctagctgctttctggaagactgaagggcaggtgatgttggagggagggagtgcaggcaggggctgtgagggagttcaggtcagaaacaggtggcgcctggattcaggctgtggtggtcacggtggggatgaggggctgctttggattgtgctggggatgtggggtggtgcgctgctgcatgactactgccaggtctctctgctcttagtgtctgcatccagggctgggagggggtcaaatgaatcacactatcggccccaggcccaccaagcctggggaggtggccacccttccatgatggcatttggatgttccctgtgtgtggggagggcacagggactccattcgtagaccacctctgggacagtgtgtctgcctctgaggtcagacgctctgcactgggacagggtggagtggagggaaatccagcttggggctcattggaggggcttgctggcagacaccgccctttgtgggaaactgactgtgggagaggggaaccccaacctctgtcaccacatccctcttccctgttgtcacacctgtcacctgctgccatagccatgagacttcccaagggtcactgctgccactcactgcacagcctggaagggagtccacaggggacatacagtgagcaagagacctgtgccactcaggcctcctgggggtgtccccagtgcagccatgatgataatcacagctaccattcaccaagccctgcccacagtctaacctactctattcacaacactcccagcagcaaggcaagtgaggtgctgccgtcatccaggctggacagttcagtgatttgcctgaggccccacagcaggtgagtggcaagtccagcatcagagcagggcaggctggcggtgccccctgagccccctttgccatgctgaccacatgcacatcctgggcttctgcaggaatgccctgtcccctacctgccctgctccgtgcaaaaccctctttgagctgtgcctgggagacatgctgagagaattcatggaaacaaatgtgttactgacagcctctttgcctccagagttcaactggagacagagaaaccagctagaggcagagggaggtaacacggagtcccccagaaaggtctgggctgcgcgtgcttcaggtaacctcccttgaccttcaggagaacgagaaggctgcctgatcagagagtccctgaagaagattctgtggctacaggcttcagcagagtgtgagggagaccccggttatttcctcagctatttccaccaaatcctcctgtctttcgtggccaacaccccaggcaaggcttggggcccccgtctgctgctggacggtaagtcctggccccgtggcagtgaatctgtggggcgctctgattgtgggcactatggaagctaaaccccatgctccaggtggggtggagggtcttcagaggactcctggacagtgccaggctctaggctggggtgggggacacaggagaaaccaggccaggcccatccctactggagcttctccctaagcagtggaggctcagccactgtaaggaggtaggcaaggccctgcagaaagaggggtgtggaaatctgggggctcccaggaagggccgctgctggagatggggttcttaccaggatgggctctgaagataagcagggaggatttgggagggcagagatgaggcccagagcttctggcagagggcatggcctgcgcaaaggtctgggggccggacagcctgcacgtattctgggaagcgggaaggagacacaggccttgtgtttctgaggcccgactttagactgtgccctgttggggaggggccagggaatgtctgaggctaggcctgaccctgcttcttaccccgtgggtgcagcagagccatgaagaagaagttagtggtgctgggcctgctggccgtggtcctggtgctggtcattgtcggcctctgtctctggctgccctcagcctccaaggaacctgacaaccatgtgtacaccagggctgccgtggccgcggatgccaagcagtgctcgaagattgggaggtgagcagggcagggcatgggacatgggccctgaaaactgggcaagtggacctgagcaataccttcacccccctgagactcagtttccccatgtgtaagcttcgcttggactctctcagtagcctttgggaaggggacagtgactccgagagcagggtgtgggtctctagagccaaacagggccccttttctcagttctaagagtctctgtctctttggaataaactgcactgttttgttgtttggttgttatttttacttatttcttcctatctatctatctatctatctatctatcatctatctatctatctatctatctatctatctatctatctatctatctatctatctactatctatctatctatttatttagagatggagttttgctctgttgccaggctggagtgcagtggtgcaatctcagttaactgcaacctccgcctcccaagttcaagtgattctcatgcctaagtctcccaagtagctgggattacaggcgtgcgccaccacgcccaacaaatttgtgtgtgtgtgtgtgtgtgtgtgtgtgtgtgtgtgtgtgtgtgtgtttccaagacagagtatcgctctgttacccaggctggagggcagtggtgcaatcttggcttactgcaacctccacctcccaggttcaagtgattctcctgcctcagcctccacagtagctgagactacaggcatgtgccaccatgcccagctaatttttgtatttttagtagagacagggttttgctatgttggccaggctggtcttgaactcctgaccttgtgatcctcccacctctgcctctcaaagtgctgggattaaggtgtgagccactgctcctggcctaattatggtgtttttagtagagatggggtttcaccatgttggtcaggctggtcttgaactcctgacctcaggtaatccacccacctgggcctcccaaagtgttgggattacaggtgtgagccaccacgcccggcttattctttttttttttttttttttttggttaggagacaatttctttctttctttttttttattttattttattattattatactttaagttttagggtacatgtgcacaatgtgcaggtttgttacatatgtacatatgtacacatgtgccatgttggtgtgctgcacccaccaactcatcatttagcattaggtatatctcccaatgccatccctcccccctccccccaaggaacactgttgcccaaacagggacatgaagggcttattcttttttgttgttgttttgttttgttttgttttttgagacggagtctcacgctgtctcccaggctggagtgcagtggcgcaatctcggctcgctgcaacctccgtctcctggattcaggtgattctcctgcctcagcctcctgagtagctgatattacaggcatccgccaccacgcccggctaatttttgtatttttagtagagacagggtttcaccataatggtctggctggtctcaaactcctgacctcaggtgatccgcctgccttggcctcccaaagtgctgggattacaggcatgagccaccatgcccggccgggcttattctttttttaaggtggagtcttactctgttacccaggctggagtataggggagcgatcatagcccactgcagcctcaaactcttgggtttaagtgatcttcccgcctcagcttcctaaagtgctgggattacaggtgtgagccatggtgcctggcttctactgttttattctattttagactcttatctcatgttatatacaaagatcagttccctcctaaagacttaaacagaaaaaatattatgtttttcatattttgagacagggtcttgttctgtcacccaggctggagtgcagtggcatgatcatagctcactgcagccttgaactcttgggcttaagcgatcctcccacctcagccccctgagtagctaggactacaggcgtgcatcacacctgactaattaaaaaagactgttttctagagatggtctcactctattgcccaggctggtcttgaactcctggcctcaagtgatcctccaccttggcctcccaaagtgctgagattacaggtgtaagccaccatctctagccgggaaaaaaaatgttattaataaagtatagcaatttccctttttgtcccagttataaaagtcatgtacatttgtttgcttgataaagaggaaactgtctgggcaaggtggtccacacctgtaatcccagcactttgggaggttgaggcgggcagaccacccgaggtcaggagttcgagaccagcctggccaacatggtgcactctgtccctactaaaaatataaaaagttagccgggcatggtggtgtgcgcctgtaatcccagctactcaggaggctgaggcaggggaatcacttgaacccaggaggcagaggttgcagtgagctaagatcatgccactgcactccagcctgggcaactgagtgaaactccctctcagaaaaaaaaaaagaaagaaaagaaaagaaaaagaggaaactgtaatcccagcactttgggaggttgaggcgataggattgctttagaccatgagttcgagaccagcttgggcaacatagaaagaccctatctctacaaaaaagacaaaaaattgccaggtgtggtggttcttacctgtagtcccagctactcagcagactgaagtgggaggattgcttgagcccaggaggtcaaagctgcattgagccaagactgtgccactgcacttcatcctgggtgacaaagtgagaccctgtctcataaaacaaaggctgggcacagtggctcatgcctgtaataccagcactttgggaggccaaggtgggtggatcacttgagcacaggagttcttgaccagcctgggcaacatgatgaaaccccatctctacaaaatacacaaacaaacaaaattggctgggcatggtggcatgtgcccatagtcccagctacttgggaggctgagatgggagggtcaattgagcccaggagactgaggctgcagtgatctgagatcacaccactgcactccagcctgagcaacaaagagagactttgtctcaaaaaaaaaaaaaaaaaaaaaaaaaaaaagaggccaaggcaggcggatcatgaggtcaagagatagagaccagcctggccaacatggtgaaaccccgtctctactaaaaatacaaaaattagctgggcgtggtggcatgcacctgtagtcccagctactcaggaggctgaggcaggagaatggcttgaacccgggaggcagaggttgcagtgagctgagatcgtgccactgcactccagcctggcaatagagcaagactccatctcaaaaaaaaaaaaaaaaagaaagaaagaaactaaaaacaaaaaccccaaaactcgaatggacttctcttccatcctcctttgggcaggtgggcagcagggtgtgtatgcggggccagggtggaagcctgcaggttctcatgcctttatgtgccacatggcagggatgcactgcgggacggtggctctgcggtggatgcagccattgcagccctgttgtgtgtggggctcatgaatgcccacagcatgggcatcgggggtggcctcttcctcaccatctacaacagcaccacacgtgagtgcctcgggagaggagagggagaggggcagggggtgtgggttgggccgaggcacagctgggcggtccccaggctcacgtggcataaagggtttgggtgggcgggcctgcctacctgcttctccttctaggaaaagctgaggtcatcaacgcccgcgaggtggcccccaggctggcctttgcc

SEQ ID NO: 12275 - DNA, 853 bp, Homo sapiens
cctgcaccctgtgcagatgcctcccactgtccgccggggctgctgggcacgccctggctggtctcttggactagcgggtgcagcccagaactgtcttctgaggaagaggtgctctcctgggcccccactgtccccaggcctcagcagcaaggcaagtgaggtgctgccgtcatccaggctggacagttcagtgatttgcctgaggccccacagcagagttcaactggagacagagaaaccagctagaggcagagggaggtaacacggagtcccccagaaaggtctgggctgcgcgtgcttcaggtaacctcccttgaccttcaggagaacgagaaggctgcctgatcagagagtccctgaagaagattctgtggctacaggcttcagcagagtgtgagggagaccccggttatttcctcagctatttccaccaaatcctcctgtctttcgtggccaacaccccaggcaaggcttggggcccccgtctgctgctggacgcagagccatgaagaagaagttagtggtgctgggcctgctggccgtggtcctggtgctggtcattgtcggcctctgtctctggctgccctcagcctccaaggaacctgacaaccatgtgtacaccagggctgccgtggccgcggatgccaagcagtgctcgaagattgggagggatgcactgcgggacggtggctctgcggtggatgcagccattgcagccctgttgtgtgtggggctcatgaatgcccacagcatgggcatcgggggtggcctcttcctcaccatctacaacagcaccacacgaaaagctgaggtcatcaacgcccgcgaggtggcccccaggctggcctttgcc

SEQ ID NO: 12276 - DNA, 11915 bp, Homo sapiens
gaccagaccgggcgtcgggtgagcccagaagtgagagcagttggctgtgccccagtgctgtgtgacccagaggcgccgctcaccctctctgagctggtggacatcataggtggggaagctcaggtcagggcactcccatgagtgtctggaggcctgagtcccattctcagctctgccatatgcttgctgcgctctagaggagttcctcttcctctccaagcctcggtttatgtacccgtgcagtgggagtgagttgcacttcggggtgaagggggcaagacttgtgtgggcgcatcctgcagaaggatcccacaggtgggcagagccctgggttctttatccgactgggtctgggctgggggcctctgtttcttggctgatgagtttatgtgagtttgagtgaggtatgcgagtgggtgaaggagggctggggggagtcacctgacttgtgcgaagaagctcttgagagagccgtggcttcttggaattaagaggaaagagtgcagcatgaacagacaggccctggaggatctggcagccctgagtgggggcggggggtcagctctggagtagagccagagctgtgatggggttgggggaccctgtgtccttgggccatgcttgcctcgctcctgggttctgtttgtggctgtggattggggtggggcagggccggttgtgcgaggggtcattgcccaactccagggggcgcctgccacctctcagctatatatatagggatatatatagttctttcgacaggtttccagcaggtagtggttattaaatcttactgaaggggtgttttttctgattctcggctctgtgccgcaagggtggaaactgtgagagacagattccaactccacgtctgggtagtaagcatccagtccagggctgtaggcagtcctggggaagacgccagagatctgtgcattctcatatcgagggatagcgactccaggctgggggctggcagggtaaggggtgggtgggtcctgggcttacccgcaggtctgcagacttcctggggccagctgacctcgtaaaatcccttttgtctaagcttcagtttcctgcctgtgaatggggttggggctgtgctctggtttcacccttgtggctctggggttgtggtgacaaagccatcaagctgggttgaaggattaaccaggaaacttcagactggctgccgtgtctacctcttcctcatactcctctctctgctgcatcctgggaagctgctctgctcagcctaaatgaggctcagttgtgtgtgtgcgcacgtgcttgcacgtgtgttggaagtgggtgatactgacaccagagtctgtgtctctgggtgagtgaggcttgcacatttctcgggacagggaactcactaccttatgtgcccaggacaagagctgtggggtctggagaagacttctaggccagcccctgcagtccttcctcaggtgacatggcttccccagacccacttccccctaggtgccctctctgcattcagggggtagagggctgactgggacagaatgtgacacactcagcatgtgaggaaaagcctccttcattctgtaggccctacctctattaacatgtcctttgataaagtgcctcccctcctgtctcccctctctggaatcctcagctgctgccaggcttcagctgtgccccattgaaggcagctctgtctccctactttccccagcccagggttttccttttggggtcagctgcagggatctgggccatcctttgcccactcagactttctttctgcccacctgctgctgtgaatcctgtatgtcatatatatatataaaatatgtaatatattatatattatatgtaatatataatatataaagtatattatataatatgtattatattatatattatataatatgtaatatattatataatatataatatgtattatattatatattatataatatgtaatatattatataatatataatatgtattatattatatattatataatatgtattatattatatattatataatatgtattatatattatataatatgtattatatattatataatatgtattatatattatataatatgtattatatattatataatatgtattatatattatataatatgtattatatattatataatattataatatgtattatatattatataatattatataatatgtattatatattatataacaatatataatgtgtattatatataatataatattatataatgtgtattatatattatataatattatataatgtgtattatatattatataatattatataatgtgtattatatattatataatattatataatgtgtattatatatataatattatataatgtgtattatatatataatattatataatgtgtattatatatataatattatataatgtgtattatatatttaatattatataatgtgtattatatatttaatattatataatgtgtattatatattatataatattatataatgtgtattatatattatataatattatataatgtgtattatatattatataatatatgatgtgtattatatattatatattatatgatgtgtattatatattatataatatatgatgtgtattatatattatataatatatgatgtgtattatatattatataatattatatgatgtgtattatatattatatataatatataatattatatataatatattacatataatatatcatatattatatttatataatttatataatatatcatatattatatttatataatttatataatatatcatatattatatttatataatttatataatatatcatatattatatttatataatttatataatatatcatataaatatattatatatagtattatatatataaaattatactttaagttctagggtacatgtgcacaacgtacaggtttgttacatatgtatacatgtgccatgttggtgtgctgcacccattaacttgtcatttacattaggtatatctcctaatgctatccctccccgttcccctcaccccacaacaggccccagtgtgtgatgttccccttcctgtgtccaagtgttctcattgtttaattccaacctatgagtgagaacatgcatgtcttatatgctctcaggcagagaggaaactgctgagcaggccggggcaggggacagagccctgtggctctccactttagacccctcctggctgactgccatggaatgcagccacttagcagggccaaatcccctgatgttcctgttggctgtctagccttcagggacaggtcatgggaccttggttcctgccctgtcatcttcccagtcaccctgatcttcacggggaggaatagcctgggaaaggacttggtcacagcacctccaccctagggctattgaggatctcacagttgtgtgtctggtgggttctgtccagagcccatttgagagcagtggatgacaggacaggcctatgtgacccaggcaggcagcaatattgggtcagccttcatgtccccttctgtcagctggggcagcctggaagcatgattgtggggtaggtgttatgggcacggaatagacctcaggtggaggctgcaggggctctccggcaccgtagacacagcaggcccaggagcaggggagggagccatgactcagggagactctggcccatatccttggcagatgagggccacaggggaatgggcagcactgtccaaagtcccctgggctgggtccgcagctgttcctggctcagacttcttggtgggctggtcagaaacatgcagtaacttggggcagttaccaggtggccaagcctgcactgctgggctctgtgagcttgggccagctcaggccctctctgggccctgcctttctgggctgttcgggtggttccttgggcctggggtgctaatgtttctggatgggcagcagaaccagtctgcactcagggccccaggccatgttcccggaacacacctttagcattgacagcagcgtgtggtgaggccccttaggctgggttctggtctagtgccaggggcaccactactccaccgcctccagagccatctctgggacactggctgtgagttcagatgttctgaacagggacagggagagccagagggaaccagcctggggctcactggaggggctcgtgggcagacagcgccctttggagggaactgagtctgaaaggaaggaaaccctttccccggctcatagcacctgccatccagggccctcccagggctgcgtgaactttagtcacgtggtgacaggccgagtcaccatgccaagtcactgtgcgcctccttgctgctgtgacgtcagcttccccatcctcccagccaggctggacctccgtgagaggcctgcctgtcctgcaccctgtgcagatgcctcccactgtccgccggggctgctgggcacgccctggctggtctcttggactaggtaagctcatgagtcctctggccgctcctgctccttccctgcctctgctcctcctcggaggtggccacccccagatcccagtcccaattcggaggccccctgaggagtgctgcagggggccacaggcgtggctctgagccactctggagagtggcggggggcccagccagttctgtggctgggactttcccaggcagacaagtctgtctcttcctccccagcgggtgcagcccagaactgtcttctgaggaagaggtgctctcctgggcccccactgtccccaggcctcaggtaagcccatcagggtcccaaggaagggggtctgggtttgaggccaaccatggcagctgacctactttctagcctcagtttcccctagtgtgtgcagctctcacgctgtttgggtgagaaccaggcctctgggcttggacattctttcagtgagtttttagggtggagggatgggaaatggaagcccaggacctcagcagggtgtcttcctccgatccggggacatctgcctgtgggaggctgggcccaccctcccttgctgacctgccctgggaggaagggacagggcccagcactgcctactcccctccctgttcttcccagcagtctgagcctggctgggtgtcccctgctcctccagcagcctacttgggcctttgggtagacagattaacagacaggcgaggctgggtcatggttggaccaccccaggaccctgaccgggggctcagctcatgaccctgagcctgggagagatgaggccatgccctccagggcactcagcatgacccggcccagtggacgggactgggtagcttccttggtgcagggggctgtcatgctaggacggggtcactgaccaggccaggcccctgccccatgacttgtggtggaaatgtccttttgtttttgtttttttgcattttttttgagacggagtttcactcttgttgcccaggctggagtgcagtggtgcaatcttgcctcactgcaacctccacctcctgggttcaagcaattctcctgcctcagctcctgagtagctgggattacaggcacctgccaccatgcctggctaattttttgtatttttagtggagatgggggtttcaccatgttggccaggctgttctcaaactcttcacctcaggtgatccacctgcctctgcctcccaaagtgctgggattataggtgtgagccactgcacccggccatgtgatgggaatgttctgtgtccataatagatgctgcatattgctggcccagctcctgaggctctttggacctccaggaatcggtgtctctatcaggaacccttaaccctgacccggactcccagctgggacccggggtgtcggagtggcaagagcgctgtcaggcctggtgaagggtgtgagctgtccaacggggcagggaggaggcagggcctgttctgcagttggacagacagagccctctagctgctttctggaagactgaagggcaggtgatgttggagggagggagtgcaggcaggggctgtgagggagttcaggtcagaaacaggtggcgcctggattcaggctgtggtggtcacggtggggatgaggggctgctttggattgtgctggggatgtggggtggtgcgctgctgcatgactactgccaggtctctctgctcttagtgtctgcatccagggctgggagggggtcaaatgaatcacactatcggccccaggcccaccaagcctggggaggtggccacccttccatgatggcatttggatgttccctgtgtgtggggagggcacagggactccattcgtagaccacctctgggacagtgtgtctgcctctgaggtcagacgctctgcactgggacagggtggagtggagggaaatccagcttggggctcattggaggggcttgctggcagacaccgccctttgtgggaaactgactgtgggagaggggaaccccaacctctgtcaccacatccctcttccctgttgtcacacctgtcacctgctgccatagccatgagacttcccaagggtcactgctgccactcactgcacagcctggaagggagtccacaggggacatacagtgagcaagagacctgtgccactcaggcctcctgggggtgtccccagtgcagccatgatgataatcacagctaccattcaccaagccctgcccacagtctaacctactctattcacaacactcccagcagcaaggcaagtgaggtgctgccgtcatccaggctggacagttcagtgatttgcctgaggccccacagcaggtgagtggcaagtccagcatcagagcagggcaggctggcggtgccccctgagccccctttgccatgctgaccacatgcacatcctgggcttctgcaggaatgccctgtcccctacctgccctgctccgtgcaaaaccctctttgagctgtgcctgggagacatgctgagagaattcatggaaacaaatgtgttactgacagcctctttgcctccagagttcaactggagacagagaaaccagctagaggcagagggaggtaacacggagtcccccagaaaggtctgggctgcgcgtgcttcaggtaacctcccttgaccttcaggagaacgagaaggctgcctgatcagagagtccctgaagaagattctgtggctacaggcttcagcagagtgtgagggagaccccggttatttcctcagctatttccaccaaatcctcctgtctttcgtggccaacaccccaggcaaggcttggggcccccgtctgctgctggacggtaagtcctggccccgtggcagtgaatctgtggggcgctctgattgtgggcactatggaagctaaaccccatgctccaggtggggtggagggtcttcagaggactcctggacagtgccaggctctaggctggggtgggggacacaggagaaaccaggccaggcccatccctactggagcttctccctaagcagtggaggctcagccactgtaaggaggtaggcaaggccctgcagaaagaggggtgtggaaatctgggggctcccaggaagggccgctgctggagatggggttcttaccaggatgggctctgaagataagcagggaggatttgggagggcagagatgaggcccagagcttctggcagagggcatggcctgcgcaaaggtctgggggccggacagcctgcacgtattctgggaagcgggaaggagacacaggccttgtgtttctgaggcccgactttagactgtgccctgttggggaggggccagggaatgtctgaggctaggcctgaccctgcttcttaccccgtgggtgcagcagagccatgaagaagaagttagtggtgctgggcctgctggccgtggtcctggtgctggtcattgtcggcctctgtctctggctgccctcagcctccaaggaacctgacaaccatgtgtacaccagggctgccgtggccgcggatgccaagcagtgctcgaagattgggaggtgagcagggcagggcatgggacatgggccctgaaaactgggcaagtggacctgagcaataccttcacccccctgagactcagtttccccatgtgtaagcttcgcttggactctctcagtagcctttgggaaggggacagtgactccgagagcagggtgtgggtctctagagccaaacagggccccttttctcagttctaagagtctctgtctctttggaataaactgcactgttttgttgtttggttgttatttttacttatttcttcctatctatctatctatctatctatctatcatctatctatctatctatctatctatctatctatctatctatctatctatctatctactatctatctatctatttatttagagatggagttttgctctgttgccaggctggagtgcagtggtgcaatctcagttaactgcaacctccgcctcccaagttcaagtgattctcatgcctaagtctcccaagtagctgggattacaggcgtgcgccaccacgcccaacaaatttgtgtgtgtgtgtgtgtgtgtgtgtgtgtgtgtgtgtgtgtgtgtgtttccaagacagagtatcgctctgttacccaggctggagggcagtggtgcaatcttggcttactgcaacctccacctcccaggttcaagtgattctcctgcctcagcctccacagtagctgagactacaggcatgtgccaccatgcccagctaatttttgtatttttagtagagacagggttttgctatgttggccaggctggtcttgaactcctgaccttgtgatcctcccacctctgcctctcaaagtgctgggattaaggtgtgagccactgctcctggcctaattatggtgtttttagtagagatggggtttcaccatgttggtcaggctggtcttgaactcctgacctcaggtaatccacccacctgggcctcccaaagtgttgggattacaggtgtgagccaccacgcccggcttattctttttttttttttttttttttggttaggagacaatttctttctttctttttttttattttattttattattattatactttaagttttagggtacatgtgcacaatgtgcaggtttgttacatatgtacatatgtacacatgtgccatgttggtgtgctgcacccaccaactcatcatttagcattaggtatatctcccaatgccatccctcccccctccccccaaggaacactgttgcccaaacagggacatgaagggcttattcttttttgttgttgttttgttttgttttgttttttgagacggagtctcacgctgtctcccaggctggagtgcagtggcgcaatctcggctcgctgcaacctccgtctcctggattcaggtgattctcctgcctcagcctcctgagtagctgatattacaggcatccgccaccacgcccggctaatttttgtatttttagtagagacagggtttcaccataatggtctggctggtctcaaactcctgacctcaggtgatccgcctgccttggcctcccaaagtgctgggattacaggcatgagccaccatgcccggccgggcttattctttttttaaggtggagtcttactctgttacccaggctggagtataggggagcgatcatagcccactgcagcctcaaactcttgggtttaagtgatcttcccgcctcagcttcctaaagtgctgggattacaggtgtgagccatggtgcctggcttctactgttttattctattttagactcttatctcatgttatatacaaagatcagttccctcctaaagacttaaacagaaaaaatattatgtttttcatattttgagacagggtcttgttctgtcacccaggctggagtgcagtggcatgatcatagctcactgcagccttgaactcttgggcttaagcgatcctcccacctcagccccctgagtagctaggactacaggcgtgcatcacacctgactaattaaaaaagactgttttctagagatggtctcactctattgcccaggctggtcttgaactcctggcctcaagtgatcctccaccttggcctcccaaagtgctgagattacaggtgtaagccaccatctctagccgggaaaaaaaatgttattaataaagtatagcaatttccctttttgtcccagttataaaagtcatgtacatttgtttgcttgataaagaggaaactgtctgggcaaggtggtccacacctgtaatcccagcactttgggaggttgaggcgggcagaccacccgaggtcaggagttcgagaccagcctggccaacatggtgcactctgtccctactaaaaatataaaaagttagccgggcatggtggtgtgcgcctgtaatcccagctactcaggaggctgaggcaggggaatcacttgaacccaggaggcagaggttgcagtgagctaagatcatgccactgcactccagcctgggcaactgagtgaaactccctctcagaaaaaaaaaaagaaagaaaagaaaagaaaaagaggaaactgtaatcccagcactttgggaggttgaggcgataggattgctttagaccatgagttcgagaccagcttgggcaacatagaaagaccctatctctacaaaaaagacaaaaaattgccaggtgtggtggttcttacctgtagtcccagctactcagcagactgaagtgggaggattgcttgagcccaggaggtcaaagctgcattgagccaagactgtgccactgcacttcatcctgggtgacaaagtgagaccctgtctcataaaacaaaggctgggcacagtggctcatgcctgtaataccagcactttgggaggccaaggtgggtggatcacttgagcacaggagttcttgaccagcctgggcaacatgatgaaaccccatctctacaaaatacacaaacaaacaaaattggctgggcatggtggcatgtgcccatagtcccagctacttgggaggctgagatgggagggtcaattgagcccaggagactgaggctgcagtgatctgagatcacaccactgcactccagcctgagcaacaaagagagactttgtctcaaaaaaaaaaaaaaaaaaaaaaaaaaaaagaggccaaggcaggcggatcatgaggtcaagagatagagaccagcctggccaacatggtgaaaccccgtctctactaaaaatacaaaaattagctgggcgtggtggcatgcacctgtagtcccagctactcaggaggctgaggcaggagaatggcttgaacccgggaggcagaggttgcagtgagctgagatcgtgccactgcactccagcctggcaatagagcaagactccatctcaaaaaaaaaaaaaaaaagaaagaaagaaactaaaaacaaaaaccccaaaactcgaatggacttctcttccatcctcctttgggcaggtgggcagcagggtgtgtatgcggggccagggtggaagcctgcaggttctcatgcctttatgtgccacatggcagggatgcactgcgggacggtggctctgcggtggatgcagccattgcagccctgttgtgtgtggggctcatgaatgcccacagcatgggcatcgggggtggcctcttcctcaccatctacaacagcaccacacgtgagtgcctcgggagaggagagggagaggggcagggggtgtgggttgggccgaggcacagctgggcggtccccaggctcacgtggcataaagggtttgggtgggcgggcctgcctacctgcttctccttctaggaaaagctgaggtcatcaacgcccgcgaggtggcccccaggctggcctttgccaccatgttcaacagctcggagcagtcccagaagg

SEQ ID NO: 12277 - DNA, 811 bp, Homo sapiens
gaccagaccgggcgtcgggtgagcccagaagtgagagcagttggctgtgccccagtgctgtgtgacccagaggcgccgctcaccctctctgagctggtggacatcatagcgggtgcagcccagaactgtcttctgaggaagaggtgctctcctgggcccccactgtccccaggcctcagcaaggcaagtgaggtgctgccgtcatccaggctggacagttcagtgatttgcctgaggccccacagcaggagaacgagaaggctgcctgatcagagagtccctgaagaagattctgtggctacaggcttcagcagagtgtgagggagaccccggttatttcctcagctatttccaccaaatcctcctgtctttcgtggccaacaccccaggcaaggcttggggcccccgtctgctgctggacgcagagccatgaagaagaagttagtggtgctgggcctgctggccgtggtcctggtgctggtcattgtcggcctctgtctctggctgccctcagcctccaaggaacctgacaaccatgtgtacaccagggctgccgtggccgcggatgccaagcagtgctcgaagattgggagggatgcactgcgggacggtggctctgcggtggatgcagccattgcagccctgttgtgtgtggggctcatgaatgcccacagcatgggcatcgggggtggcctcttcctcaccatctacaacagcaccacacgaaaagctgaggtcatcaacgcccgcgaggtggcccccaggctggcctttgccaccatgttcaacagctcggagcagtcccagaagg

SEQ ID NO: 12278 - DNA, 11688 bp, Homo sapiens
agaccgggcgtcgggtgagcccagaagtgagagcagttggctgtgccccagtgctgtgtgacccagaggcgccgctcaccctctctgagctggtggacatcataggtggggaagctcaggtcagggcactcccatgagtgtctggaggcctgagtcccattctcagctctgccatatgcttgctgcgctctagaggagttcctcttcctctccaagcctcggtttatgtacccgtgcagtgggagtgagttgcacttcggggtgaagggggcaagacttgtgtgggcgcatcctgcagaaggatcccacaggtgggcagagccctgggttctttatccgactgggtctgggctgggggcctctgtttcttggctgatgagtttatgtgagtttgagtgaggtatgcgagtgggtgaaggagggctggggggagtcacctgacttgtgcgaagaagctcttgagagagccgtggcttcttggaattaagaggaaagagtgcagcatgaacagacaggccctggaggatctggcagccctgagtgggggcggggggtcagctctggagtagagccagagctgtgatggggttgggggaccctgtgtccttgggccatgcttgcctcgctcctgggttctgtttgtggctgtggattggggtggggcagggccggttgtgcgaggggtcattgcccaactccagggggcgcctgccacctctcagctatatatatagggatatatatagttctttcgacaggtttccagcaggtagtggttattaaatcttactgaaggggtgttttttctgattctcggctctgtgccgcaagggtggaaactgtgagagacagattccaactccacgtctgggtagtaagcatccagtccagggctgtaggcagtcctggggaagacgccagagatctgtgcattctcatatcgagggatagcgactccaggctgggggctggcagggtaaggggtgggtgggtcctgggcttacccgcaggtctgcagacttcctggggccagctgacctcgtaaaatcccttttgtctaagcttcagtttcctgcctgtgaatggggttggggctgtgctctggtttcacccttgtggctctggggttgtggtgacaaagccatcaagctgggttgaaggattaaccaggaaacttcagactggctgccgtgtctacctcttcctcatactcctctctctgctgcatcctgggaagctgctctgctcagcctaaatgaggctcagttgtgtgtgtgcgcacgtgcttgcacgtgtgttggaagtgggtgatactgacaccagagtctgtgtctctgggtgagtgaggcttgcacatttctcgggacagggaactcactaccttatgtgcccaggacaagagctgtggggtctggagaagacttctaggccagcccctgcagtccttcctcaggtgacatggcttccccagacccacttccccctaggtgccctctctgcattcagggggtagagggctgactgggacagaatgtgacacactcagcatgtgaggaaaagcctccttcattctgtaggccctacctctattaacatgtcctttgataaagtgcctcccctcctgtctcccctctctggaatcctcagctgctgccaggcttcagctgtgccccattgaaggcagctctgtctccctactttccccagcccagggttttccttttggggtcagctgcagggatctgggccatcctttgcccactcagactttctttctgcccacctgctgctgtgaatcctgtatgtcatatatatatataaaatatgtaatatattatatattatatgtaatatataatatataaagtatattatataatatgtattatattatatattatataatatgtaatatattatataatatataatatgtattatattatatattatataatatgtaatatattatataatatataatatgtattatattatatattatataatatgtattatattatatattatataatatgtattatatattatataatatgtattatatattatataatatgtattatatattatataatatgtattatatattatataatatgtattatatattatataatatgtattatatattatataatattataatatgtattatatattatataatattatataatatgtattatatattatataacaatatataatgtgtattatatataatataatattatataatgtgtattatatattatataatattatataatgtgtattatatattatataatattatataatgtgtattatatattatataatattatataatgtgtattatatatataatattatataatgtgtattatatatataatattatataatgtgtattatatatataatattatataatgtgtattatatatttaatattatataatgtgtattatatatttaatattatataatgtgtattatatattatataatattatataatgtgtattatatattatataatattatataatgtgtattatatattatataatatatgatgtgtattatatattatatattatatgatgtgtattatatattatataatatatgatgtgtattatatattatataatatatgatgtgtattatatattatataatattatatgatgtgtattatatattatatataatatataatattatatataatatattacatataatatatcatatattatatttatataatttatataatatatcatatattatatttatataatttatataatatatcatatattatatttatataatttatataatatatcatatattatatttatataatttatataatatatcatataaatatattatatatagtattatatatataaaattatactttaagttctagggtacatgtgcacaacgtacaggtttgttacatatgtatacatgtgccatgttggtgtgctgcacccattaacttgtcatttacattaggtatatctcctaatgctatccctccccgttcccctcaccccacaacaggccccagtgtgtgatgttccccttcctgtgtccaagtgttctcattgtttaattccaacctatgagtgagaacatgcatgtcttatatgctctcaggcagagaggaaactgctgagcaggccggggcaggggacagagccctgtggctctccactttagacccctcctggctgactgccatggaatgcagccacttagcagggccaaatcccctgatgttcctgttggctgtctagccttcagggacaggtcatgggaccttggttcctgccctgtcatcttcccagtcaccctgatcttcacggggaggaatagcctgggaaaggacttggtcacagcacctccaccctagggctattgaggatctcacagttgtgtgtctggtgggttctgtccagagcccatttgagagcagtggatgacaggacaggcctatgtgacccaggcaggcagcaatattgggtcagccttcatgtccccttctgtcagctggggcagcctggaagcatgattgtggggtaggtgttatgggcacggaatagacctcaggtggaggctgcaggggctctccggcaccgtagacacagcaggcccaggagcaggggagggagccatgactcagggagactctggcccatatccttggcagatgagggccacaggggaatgggcagcactgtccaaagtcccctgggctgggtccgcagctgttcctggctcagacttcttggtgggctggtcagaaacatgcagtaacttggggcagttaccaggtggccaagcctgcactgctgggctctgtgagcttgggccagctcaggccctctctgggccctgcctttctgggctgttcgggtggttccttgggcctggggtgctaatgtttctggatgggcagcagaaccagtctgcactcagggccccaggccatgttcccggaacacacctttagcattgacagcagcgtgtggtgaggccccttaggctgggttctggtctagtgccaggggcaccactactccaccgcctccagagccatctctgggacactggctgtgagttcagatgttctgaacagggacagggagagccagagggaaccagcctggggctcactggaggggctcgtgggcagacagcgccctttggagggaactgagtctgaaaggaaggaaaccctttccccggctcatagcacctgccatccagggccctcccagggctgcgtgaactttagtcacgtggtgacaggccgagtcaccatgccaagtcactgtgcgcctccttgctgctgtgacgtcagcttccccatcctcccagccaggctggacctccgtgagaggcctgcctgtcctgcaccctgtgcagatgcctcccactgtccgccggggctgctgggcacgccctggctggtctcttggactaggtaagctcatgagtcctctggccgctcctgctccttccctgcctctgctcctcctcggaggtggccacccccagatcccagtcccaattcggaggccccctgaggagtgctgcagggggccacaggcgtggctctgagccactctggagagtggcggggggcccagccagttctgtggctgggactttcccaggcagacaagtctgtctcttcctccccagcgggtgcagcccagaactgtcttctgaggaagaggtgctctcctgggcccccactgtccccaggcctcaggtaagcccatcagggtcccaaggaagggggtctgggtttgaggccaaccatggcagctgacctactttctagcctcagtttcccctagtgtgtgcagctctcacgctgtttgggtgagaaccaggcctctgggcttggacattctttcagtgagtttttagggtggagggatgggaaatggaagcccaggacctcagcagggtgtcttcctccgatccggggacatctgcctgtgggaggctgggcccaccctcccttgctgacctgccctgggaggaagggacagggcccagcactgcctactcccctccctgttcttcccagcagtctgagcctggctgggtgtcccctgctcctccagcagcctacttgggcctttgggtagacagattaacagacaggcgaggctgggtcatggttggaccaccccaggaccctgaccgggggctcagctcatgaccctgagcctgggagagatgaggccatgccctccagggcactcagcatgacccggcccagtggacgggactgggtagcttccttggtgcagggggctgtcatgctaggacggggtcactgaccaggccaggcccctgccccatgacttgtggtggaaatgtccttttgtttttgtttttttgcattttttttgagacggagtttcactcttgttgcccaggctggagtgcagtggtgcaatcttgcctcactgcaacctccacctcctgggttcaagcaattctcctgcctcagctcctgagtagctgggattacaggcacctgccaccatgcctggctaattttttgtatttttagtggagatgggggtttcaccatgttggccaggctgttctcaaactcttcacctcaggtgatccacctgcctctgcctcccaaagtgctgggattataggtgtgagccactgcacccggccatgtgatgggaatgttctgtgtccataatagatgctgcatattgctggcccagctcctgaggctctttggacctccaggaatcggtgtctctatcaggaacccttaaccctgacccggactcccagctgggacccggggtgtcggagtggcaagagcgctgtcaggcctggtgaagggtgtgagctgtccaacggggcagggaggaggcagggcctgttctgcagttggacagacagagccctctagctgctttctggaagactgaagggcaggtgatgttggagggagggagtgcaggcaggggctgtgagggagttcaggtcagaaacaggtggcgcctggattcaggctgtggtggtcacggtggggatgaggggctgctttggattgtgctggggatgtggggtggtgcgctgctgcatgactactgccaggtctctctgctcttagtgtctgcatccagggctgggagggggtcaaatgaatcacactatcggccccaggcccaccaagcctggggaggtggccacccttccatgatggcatttggatgttccctgtgtgtggggagggcacagggactccattcgtagaccacctctgggacagtgtgtctgcctctgaggtcagacgctctgcactgggacagggtggagtggagggaaatccagcttggggctcattggaggggcttgctggcagacaccgccctttgtgggaaactgactgtgggagaggggaaccccaacctctgtcaccacatccctcttccctgttgtcacacctgtcacctgctgccatagccatgagacttcccaagggtcactgctgccactcactgcacagcctggaagggagtccacaggggacatacagtgagcaagagacctgtgccactcaggcctcctgggggtgtccccagtgcagccatgatgataatcacagctaccattcaccaagccctgcccacagtctaacctactctattcacaacactcccagcagcaaggcaagtgaggtgctgccgtcatccaggctggacagttcagtgatttgcctgaggccccacagcaggtgagtggcaagtccagcatcagagcagggcaggctggcggtgccccctgagccccctttgccatgctgaccacatgcacatcctgggcttctgcaggaatgccctgtcccctacctgccctgctccgtgcaaaaccctctttgagctgtgcctgggagacatgctgagagaattcatggaaacaaatgtgttactgacagcctctttgcctccagagttcaactggagacagagaaaccagctagaggcagagggaggtaacacggagtcccccagaaaggtctgggctgcgcgtgcttcaggtaacctcccttgaccttcaggagaacgagaaggctgcctgatcagagagtccctgaagaagattctgtggctacaggcttcagcagagtgtgagggagaccccggttatttcctcagctatttccaccaaatcctcctgtctttcgtggccaacaccccaggcaaggcttggggcccccgtctgctgctggacggtaagtcctggccccgtggcagtgaatctgtggggcgctctgattgtgggcactatggaagctaaaccccatgctccaggtggggtggagggtcttcagaggactcctggacagtgccaggctctaggctggggtgggggacacaggagaaaccaggccaggcccatccctactggagcttctccctaagcagtggaggctcagccactgtaaggaggtaggcaaggccctgcagaaagaggggtgtggaaatctgggggctcccaggaagggccgctgctggagatggggttcttaccaggatgggctctgaagataagcagggaggatttgggagggcagagatgaggcccagagcttctggcagagggcatggcctgcgcaaaggtctgggggccggacagcctgcacgtattctgggaagcgggaaggagacacaggccttgtgtttctgaggcccgactttagactgtgccctgttggggaggggccagggaatgtctgaggctaggcctgaccctgcttcttaccccgtgggtgcagcagagccatgaagaagaagttagtggtgctgggcctgctggccgtggtcctggtgctggtcattgtcggcctctgtctctggctgccctcagcctccaaggaacctgacaaccatgtgtacaccagggctgccgtggccgcggatgccaagcagtgctcgaagattgggaggtgagcagggcagggcatgggacatgggccctgaaaactgggcaagtggacctgagcaataccttcacccccctgagactcagtttccccatgtgtaagcttcgcttggactctctcagtagcctttgggaaggggacagtgactccgagagcagggtgtgggtctctagagccaaacagggccccttttctcagttctaagagtctctgtctctttggaataaactgcactgttttgttgtttggttgttatttttacttatttcttcctatctatctatctatctatctatctatcatctatctatctatctatctatctatctatctatctatctatctatctatctatctactatctatctatctatttatttagagatggagttttgctctgttgccaggctggagtgcagtggtgcaatctcagttaactgcaacctccgcctcccaagttcaagtgattctcatgcctaagtctcccaagtagctgggattacaggcgtgcgccaccacgcccaacaaatttgtgtgtgtgtgtgtgtgtgtgtgtgtgtgtgtgtgtgtgtgtgtgtttccaagacagagtatcgctctgttacccaggctggagggcagtggtgcaatcttggcttactgcaacctccacctcccaggttcaagtgattctcctgcctcagcctccacagtagctgagactacaggcatgtgccaccatgcccagctaatttttgtatttttagtagagacagggttttgctatgttggccaggctggtcttgaactcctgaccttgtgatcctcccacctctgcctctcaaagtgctgggattaaggtgtgagccactgctcctggcctaattatggtgtttttagtagagatggggtttcaccatgttggtcaggctggtcttgaactcctgacctcaggtaatccacccacctgggcctcccaaagtgttgggattacaggtgtgagccaccacgcccggcttattctttttttttttttttttttttggttaggagacaatttctttctttctttttttttattttattttattattattatactttaagttttagggtacatgtgcacaatgtgcaggtttgttacatatgtacatatgtacacatgtgccatgttggtgtgctgcacccaccaactcatcatttagcattaggtatatctcccaatgccatccctcccccctccccccaaggaacactgttgcccaaacagggacatgaagggcttattcttttttgttgttgttttgttttgttttgttttttgagacggagtctcacgctgtctcccaggctggagtgcagtggcgcaatctcggctcgctgcaacctccgtctcctggattcaggtgattctcctgcctcagcctcctgagtagctgatattacaggcatccgccaccacgcccggctaatttttgtatttttagtagagacagggtttcaccataatggtctggctggtctcaaactcctgacctcaggtgatccgcctgccttggcctcccaaagtgctgggattacaggcatgagccaccatgcccggccgggcttattctttttttaaggtggagtcttactctgttacccaggctggagtataggggagcgatcatagcccactgcagcctcaaactcttgggtttaagtgatcttcccgcctcagcttcctaaagtgctgggattacaggtgtgagccatggtgcctggcttctactgttttattctattttagactcttatctcatgttatatacaaagatcagttccctcctaaagacttaaacagaaaaaatattatgtttttcatattttgagacagggtcttgttctgtcacccaggctggagtgcagtggcatgatcatagctcactgcagccttgaactcttgggcttaagcgatcctcccacctcagccccctgagtagctaggactacaggcgtgcatcacacctgactaattaaaaaagactgttttctagagatggtctcactctattgcccaggctggtcttgaactcctggcctcaagtgatcctccaccttggcctcccaaagtgctgagattacaggtgtaagccaccatctctagccgggaaaaaaaatgttattaataaagtatagcaatttccctttttgtcccagttataaaagtcatgtacatttgtttgcttgataaagaggaaactgtctgggcaaggtggtccacacctgtaatcccagcactttgggaggttgaggcgggcagaccacccgaggtcaggagttcgagaccagcctggccaacatggtgcactctgtccctactaaaaatataaaaagttagccgggcatggtggtgtgcgcctgtaatcccagctactcaggaggctgaggcaggggaatcacttgaacccaggaggcagaggttgcagtgagctaagatcatgccactgcactccagcctgggcaactgagtgaaactccctctcagaaaaaaaaaaagaaagaaaagaaaagaaaaagaggaaactgtaatcccagcactttgggaggttgaggcgataggattgctttagaccatgagttcgagaccagcttgggcaacatagaaagaccctatctctacaaaaaagacaaaaaattgccaggtgtggtggttcttacctgtagtcccagctactcagcagactgaagtgggaggattgcttgagcccaggaggtcaaagctgcattgagccaagactgtgccactgcacttcatcctgggtgacaaagtgagaccctgtctcataaaacaaaggctgggcacagtggctcatgcctgtaataccagcactttgggaggccaaggtgggtggatcacttgagcacaggagttcttgaccagcctgggcaacatgatgaaaccccatctctacaaaatacacaaacaaacaaaattggctgggcatggtggcatgtgcccatagtcccagctacttgggaggctgagatgggagggtcaattgagcccaggagactgaggctgcagtgatctgagatcacaccactgcactccagcctgagcaacaaagagagactttgtctcaaaaaaaaaaaaaaaaaaaaaaaaaaaaagaggccaaggcaggcggatcatgaggtcaagagatagagaccagcctggccaacatggtgaaaccccgtctctactaaaaatacaaaaattagctgggcgtggtggcatgcacctgtagtcccagctactcaggaggctgaggcaggagaatggcttgaacccgggaggcagaggttgcagtgagctgagatcgtgccactgcactccagcctggcaatagagcaagactccatctcaaaaaaaaaaaaaaaaagaaagaaagaaactaaaaacaaaaaccccaaaactcgaatggacttctcttccatcctcctttgggcaggtgggcagcagggtgtgtatgcggggccagggtggaagcctgcaggttctcatgcctttatgtgccacatggcagggatgcactgcgggacggtggctctgcggtggatgcagccattgcagccctgttgtgtgtggggctcatgaatgcccacagcatgggcatcgggggtggcctcttcctcaccatctacaacagcaccac

SEQ ID NO: 12279 - DNA, 579 bp, Homo sapiens
agaccgggcgtcgggtgagcccagaagtgagagcagttggctgtgccccagtgctgtgtgacccagaggcgccgctcaccctctctgagctggtggacatcataggagaacgagaaggctgcctgatcagagagtccctgaagaagattctgtggctacaggcttcagcagagtgtgagggagaccccggttatttcctcagctatttccaccaaatcctcctgtctttcgtggccaacaccccaggcaaggcttggggcccccgtctgctgctggacgcagagccatgaagaagaagttagtggtgctgggcctgctggccgtggtcctggtgctggtcattgtcggcctctgtctctggctgccctcagcctccaaggaacctgacaaccatgtgtacaccagggctgccgtggccgcggatgccaagcagtgctcgaagattgggagggatgcactgcgggacggtggctctgcggtggatgcagccattgcagccctgttgtgtgtggggctcatgaatgcccacagcatgggcatcgggggtggcctcttcctcaccatctacaacagcaccac

SEQ ID NO: 12280 - DNA, 16361 bp, Homo sapiens
cccggtcagagctttaagctgcagctctgatgccccagggacctctcagacccccctgcccagagcaggcagcccggtaagccctcctcctcttcccctgcagcctcagggctggagccacagctgggagggctcccagatcctgaccatatcctcccagaggctgagccaggcctgggcactgtcccctcaaatgtgagaatactgggcagggggaggggagaaaggagggaatggagggctgagcctggaggcatgaaaggggcaacctaggcagcggtatgggggagtgctcagagcttagagtcctgtggaaggcagagaactgccccagcccctgcctctcatcccccaccctctgtgtccctggccgagaggttcctggaggacatttttccagcaaaagagggagggtggtgtctgggcctagatccttggatgggcttttctctgcctgcttgtggggtgcctagggcgagtgggcttttggagacaatttctggcctaacctgacttggacagcagcccccagaggcacagctctcccctcaggcatgggggcatgattccacctcgctagcccacatgtgttcttcacggagggctgctggcccgtctccctggggttaccctgagcagcagagctgtgtttgttgagactccatggggtggagggattgcgatgttgtcctctcagttcccggggctgatgtggaagctcaagggcttgccctggattcttcagggtagccctgccatccctagtgagtcagtgagttgggaggttgggggctggagaatcaggtagggaggacacagctagacctcaggccctgatgggaacgtactaggctccaagtgggacctgccaggagacaagaattgatgacagccacacctttggagtctcaagccctctgccacccatgcggtggcctagttcaaatgacaggaacacaaggtccagctggcccaatgggcaggtagagggctgcagccagggctggaactggccttgcactgcctctgggcccttctctacccacccagtagtattgttcaagcccaggagggaaaaaggccagctcagggttaatgttacctcagcaagtagctgagtggcactgagcctcctggtagccactgtaaagaaggacacagaatggtttgggggcattcgctaggaggaaggaagcagatggatactctatggagacagaatgtcctctgtgtttgctctacaggaacgggttgtcaaccttctgcagggccaggaattgtcatgaggctgtagtaggcagcagagcttggcggggtgaggcgagatcacaggtataggctcagggcctggattcaaatcccctgggctgccacttgttggatgtgtaaccataggcagagtaaggacctgccatagcaaattaccacaaactcagtggcttaaagcaacagaatagttctggaggctaaaagtctgaaatccaagtataggccaagccacactccctttgaggactccaggggaagatccttccttgtctcttcagcttctggtggctcctggcaatccttggccttccttggctgctgctgcatcactccagtctctgaaaccatctaccctatgtgtctgtgtggccttcacatggcattccttatttttgcagtggggtctcactatgttgcccaggctggtcttgaactcctgggtccaagcagtcctcctgcttcagcctcccaagtagctgggattatgagtgagtgccaccatgcccggctcacatggcctccttgtaataacgctagtgcctgggtgcggtggctcacgcctgtaatcccagcacttttggaggctgcggtggacggaccatgaggtcaggaaattgaggccatcctgtccaacatggtgaaaccctgtctctactaaaatacaaaaaaaaaaaaaaaaaaaaattagcctggtgtggtgacacatgcctgtagtcccagctacttgggaggctgagacaggggaatcgcttgaacccgggacgcagaagttgcagtgagctgagattgcgtggtgacttcactccagcctggtgacagagcgagactctgtctcaaaaaaaaaaaaaaaaaaaaaagaactgaagctactggatttagggctcattcattctttttttaattttaatttttttttttttttgagacagtctcactctgttagcccaggctggagtgcaatggcatgatcttggctcactgcaacctccacctcccaggttcaagcgattctcctgcctcagccttccaagtagctgggattacaggtgcccgccaccacgcccagctaatttttgtatttttagtagagacagcgtttcaccatattggtcaggctggtcttgaactcctgacctcaggtgatccacccctgtcagcctcccagtgttgggattacaggcgtgagccactgtgcccaacagggctcattcattctaatcccgtatgatctcatcttaactaattacttatgtagagactctatttccaaataaggtcgtgtgaggaaaaaccaactcaaactgtgttttttggcctggcgtggtggctcacacctataattccagcactttggggaggctaaggtgggcggatcacttgaggctaggagtttgagaccagcctggccaacatagcaaaaccccatcttcactaaaaaatacaaaacaaaaattagctgggtatggtggcatgtgccagtagtcccagctactcaggaggctgaggcaggagaatcgcttgaacctaggaggcggaggtttcagtgagccgagatagcaccacggcattccagcctgggtgacagagtgagactccatctcaaaaacacacacacacacacacacacaaaacaactgtgtttcgcctctgttctcacaagacaataatcatcacagaagacttcttgtaaccaaatttgtggattctcccacacacccagcaagaatcaattctgcagcagactccagctggtgtcttccaattcaactcaattctggtgctgtctacctggagatggcctcagaaaccacaggttgagggcttggtcccacaagaccaacccccatcccaccagtcacaagtctgggcattgggaacatctgactaactggcttctagttggggttccaaggccccctctttgggttcaattaatttgctagagtagctcacacaactcagggagacctgtttatcggtttatttcaaaggatgttttattttattttctcctcagacatactttatcatcccttaaagtcagtagctcaaaggaaactttaaaagctataaataggccgggcacggtggctcacgcctgtaatcccagcactttgggaggtcgaggcaggtggatcacttgaggtcaggagttggagaccagcctggccaacatggtgaaactccatctctactaaaagtacaaaataagctgggtgtggtggcaggagcctgtaatcccagctacttgggaggctgaggcaggagaatcatcggttgaacccgaggggtgcaagttgcagtgagccaagatcacacctctgcactctagcatgggcaacagagcgagactgagactccgtctcaaaaaaaaaaaaaaaaaaaaagataaaggctacaaataaacagtcagatgaagagatacatagggtaaagactggaagactcctaagtacagaagtttctgtcctggtagagctggacacatggatgagttggttttttttgttgttgcccaggctggagtacagtggcactatctcagctcactgcagcctctgcctcccgtgctcaagtgatcctcccccctcagcctcccaagtagctgggaccacaggcatgtgccactatgcccagctaacttttttatttttgtagagatggggtctctctattttgcccaggctggtcgtgaactcctgggctcaagccatccacccacctcgccctcccaaagcgctgggattataggcatgagccactgcacctggccatggatgagttcttgttccccttcctgtcagcctccacatgaaactccccaaaccctgtcctcttgggccttttttaaaaaaattaattaagaaattaaagacagggtctctctatgtttcccaggctgctcttgaactcctagtctcaagtgatccacccacctcgtcctcccatagtgctgggattacaagattagagatgccagctgtcaggtggctaggtggattcagtgtaaagtcctagaagatgcattttagtaaaaacagctagccacctgacagctggcatccatccattcagtgaagattgttgggcactgtggatactgtggaggaggcagcagtcgcagccggcctgcagagtgagatgcagtgccagagggcttcaggaggaggtggcattgtgattgatgtctgaagagtgtctccatgataatggagtcagtgcaaagtcccaaagactgggaaggagcaagaggaaaggatagctcatatccagctgccccactccaaaaaaaaaaaaaaaaagaggaaaggacgggcaccagcaaggtaggacaaggggggcctctggagtgttttcttctcagttggggaggggtgtgctcagatttgcatgccaagtgcctgggctgcagtagggaaacagcagaggggctgggacctgtgattgggagtctccaggtgagagggttggcctatggggactggaggtcaggtgaggctggtagtgggttatagaggtgggagcagctggacaggcccagtgaggatgcaggggtagctgcccagggctagactctggctgctctggtggcagttgcttagctcaggcttgggcacgtccacctggcgcatctgaaacattagccagcagggcgcagactcgtcagtgagagcattcctgagcccagcatccaagaagcgagggaggtcgggaaggtgctgctatgaggcagggggaggtccccaaaagtccaggtgagagcatggcatgcgtggaaagtgctgcgcagttttggcatcagtgaagtcacagggggctgtgggtgaacaggtgtgcttgggcatgtcaccagggaggccttgagacaggagcgggttggctttcctggagatcaggctgtggcatggtgtcgggactggggcatggacagtcttcctccacccccatcccctccttggagctttcagacactgcagataattaccaggtgatgtgataaatactacctgtggagggtgccttgggcagggaggacagggcggccaggaggggggccctttgggcccctgctctgagctgctcatcaggaaaggggagaagctcctacaggcctggtgttggagcctagccagaccctgtgaggccttgaaagtaggaggtgcattgtctgtgcattgtcatctcaaggaatccacccagcaactgttctagttatccctgctctctaggtaggagactgaggctaggaagggaaaggctgctgtgatacccacactatcagtggctggggttgagtttaaacccagggactctagggcccatgcctctgccatcctgcctctgagttttggagctggacttgttccatcaagtgccaggccagccctgctgctgggtgctcccaggcattcacaagctgacaattctgaagggcccacgcacttggccatgcttcagtctgtgtcctgacatcacaggtgggtgctggaataacaaatgctacaaatggcactgggggtgttggccaggctctgggggcacaggagttctgcccatgcccacagctggcctgtgctgacctccctccatcacagctgagtagcaccagcacttccattgagctgaagtcttcctcccattccttcagtgtggtctttgtggctcagagaggctgtggccaggtacaggatctggagtggcccctgcttctctgctctgtgaccttagacagtgggcaggatctgaggccaggcccacctgcagcaggtgttacaaagaggcaaattggcgcttaatgttggtaagaacttgccagccaaccagagtcccactatctttggaggtagtgagctccccattggggaaggtatgtaagccaacctttctgggatgctggaagatcagagagcaaacacttgagattctgtgatcctaatattgaatccaatgctatgatgtttggatttgaagtcagttctatttagccagtttaccaagtgtctccttggtgcaggacaccaggagacacaaaatgtcctggataatattgggtttctggctcccaggggtccctgagatgttgttccagcggttctggagtatgggccaggcaccgcttgcatctggaccgatccgcattgttcgatcattgtgagcctcatgatggcagttcgggatgtcatgcccccatgcgccccccaaccccaccccgccatggccctcaccatggcccactcagggcatgaggctttctgggtgattgctggtattcagtgttgtcagcttcttggacctgtcagtgggggtggggctgcaatgagatgccagttgcaggaagtggtttgcacagccttcctggtgtcatgggtcactctcttgccgagtggctttgggcaggtcccttcccctctcaggctgcaggttcctatgccaggagctcccttcttgccccaccagggccttgttttcccagatacagaggtggggcagatcccagcccgttgaaacagactgggctttggaggccacagtgggcccatttctcagagggactgtgtggctggatgctgagccaggcactggactggccctttgagcctcctgtctggccaaggcccctgaggcactgtgggctgctggtgccagcacacaagggtgataaggagatgaaagtcactaggatggtggggcggcacccgccccgggctgtgttggcagctgcccctggctggaggccagcttggccctggaaccctcctcaaggaacaaggacacaaaagagccagctcagccagcctctacctagcaccccaatcagcactcccttcttcccatgacccctaccctctgcccagctcctgtaactggccaaggagctaatggacacccaccagggtcttaatgagtgagccagggttaatgggttactgggcccggtgacacattcaccagcctcccagggctctcaaagtccacactggcctggccttgaacgtcttagctcggccacctccttttccagctttgacacctcggggctcaggacgggcctagggtggtcaagaggtcccctgcagccctcacttcctggaaaaggctccatttcctggccttcaggctcaggtggttccttccgcctggcaggtcctccccaaatccaatcccagctcgggctggattcccaaggcccctattctggtgtctgccccttccctagggctcttccccctggggtgaccatactctcatgcccagccaggtcagggctccttgagagaagaatctggaggggccaggatttgatgggagaatgaatgatggaatgaaagaaggaacgtaagcgtgagccttgctaagagtgacaatactggcaggctgcagaccatgtgtggacctcgatctgagggcttagaggcttcggcctgccagcgctgtgggggcacccaccccatctcattgaatggggcagagcaggtgagggcatgagatggacagatgggcctcatccccctgcttccgttgcctggggtcctcggtcagcctgtttgctcagacccctgaaattgggggtcaaggaaggaccctcctggattatgtgactcccttcagtccaggtgaccagggtccttggagtgacagctcctagagccccacctgtagtcctgcaagctggggagagggcctgttaggagaggcatcccctgccctggggttgtagaggtgaactaggctcctcagaccttgtggggcctcagatgcttacatctccagcccctcctggcgtgggcatctggctgcagcccagctctgtggccccatctcccagggaacctttggtctaatctgcctcccgctgaaacccagcctcattcagccccaccgaggctttcagagttcaggtctctcattcagggtttgagaccccaccgggctcagagacacctgcagcctgcagcggtcccagatcacagcctcagggatgggaccaggagccagcccacatcccacctgcagcagttcctgtgcctttaaagcctcccctccccccgccccgcccccaggccactaggggagggaaggaggagctgggtcacagcagggaatcttagcttggttttggtgtgctgctggatgaccagaccgggcgtcgggtgagcccagaagtgagagcagttggctgtgccccagtgctgtgtgacccagaggcgccgctcaccctctctgagctggtggacatcataggtggggaagctcaggtcagggcactcccatgagtgtctggaggcctgagtcccattctcagctctgccatatgcttgctgcgctctagaggagttcctcttcctctccaagcctcggtttatgtacccgtgcagtgggagtgagttgcacttcggggtgaagggggcaagacttgtgtgggcgcatcctgcagaaggatcccacaggtgggcagagccctgggttctttatccgactgggtctgggctgggggcctctgtttcttggctgatgagtttatgtgagtttgagtgaggtatgcgagtgggtgaaggagggctggggggagtcacctgacttgtgcgaagaagctcttgagagagccgtggcttcttggaattaagaggaaagagtgcagcatgaacagacaggccctggaggatctggcagccctgagtgggggcggggggtcagctctggagtagagccagagctgtgatggggttgggggaccctgtgtccttgggccatgcttgcctcgctcctgggttctgtttgtggctgtggattggggtggggcagggccggttgtgcgaggggtcattgcccaactccagggggcgcctgccacctctcagctatatatatagggatatatatagttctttcgacaggtttccagcaggtagtggttattaaatcttactgaaggggtgttttttctgattctcggctctgtgccgcaagggtggaaactgtgagagacagattccaactccacgtctgggtagtaagcatccagtccagggctgtaggcagtcctggggaagacgccagagatctgtgcattctcatatcgagggatagcgactccaggctgggggctggcagggtaaggggtgggtgggtcctgggcttacccgcaggtctgcagacttcctggggccagctgacctcgtaaaatcccttttgtctaagcttcagtttcctgcctgtgaatggggttggggctgtgctctggtttcacccttgtggctctggggttgtggtgacaaagccatcaagctgggttgaaggattaaccaggaaacttcagactggctgccgtgtctacctcttcctcatactcctctctctgctgcatcctgggaagctgctctgctcagcctaaatgaggctcagttgtgtgtgtgcgcacgtgcttgcacgtgtgttggaagtgggtgatactgacaccagagtctgtgtctctgggtgagtgaggcttgcacatttctcgggacagggaactcactaccttatgtgcccaggacaagagctgtggggtctggagaagacttctaggccagcccctgcagtccttcctcaggtgacatggcttccccagacccacttccccctaggtgccctctctgcattcagggggtagagggctgactgggacagaatgtgacacactcagcatgtgaggaaaagcctccttcattctgtaggccctacctctattaacatgtcctttgataaagtgcctcccctcctgtctcccctctctggaatcctcagctgctgccaggcttcagctgtgccccattgaaggcagctctgtctccctactttccccagcccagggttttccttttggggtcagctgcagggatctgggccatcctttgcccactcagactttctttctgcccacctgctgctgtgaatcctgtatgtcatatatatatataaaatatgtaatatattatatattatatgtaatatataatatataaagtatattatataatatgtattatattatatattatataatatgtaatatattatataatatataatatgtattatattatatattatataatatgtaatatattatataatatataatatgtattatattatatattatataatatgtattatattatatattatataatatgtattatatattatataatatgtattatatattatataatatgtattatatattatataatatgtattatatattatataatatgtattatatattatataatatgtattatatattatataatattataatatgtattatatattatataatattatataatatgtattatatattatataacaatatataatgtgtattatatataatataatattatataatgtgtattatatattatataatattatataatgtgtattatatattatataatattatataatgtgtattatatattatataatattatataatgtgtattatatatataatattatataatgtgtattatatatataatattatataatgtgtattatatatataatattatataatgtgtattatatatttaatattatataatgtgtattatatatttaatattatataatgtgtattatatattatataatattatataatgtgtattatatattatataatattatataatgtgtattatatattatataatatatgatgtgtattatatattatatattatatgatgtgtattatatattatataatatatgatgtgtattatatattatataatatatgatgtgtattatatattatataatattatatgatgtgtattatatattatatataatatataatattatatataatatattacatataatatatcatatattatatttatataatttatataatatatcatatattatatttatataatttatataatatatcatatattatatttatataatttatataatatatcatatattatatttatataatttatataatatatcatataaatatattatatatagtattatatatataaaattatactttaagttctagggtacatgtgcacaacgtacaggtttgttacatatgtatacatgtgccatgttggtgtgctgcacccattaacttgtcatttacattaggtatatctcctaatgctatccctccccgttcccctcaccccacaacaggccccagtgtgtgatgttccccttcctgtgtccaagtgttctcattgtttaattccaacctatgagtgagaacatgcatgtcttatatgctctcaggcagagaggaaactgctgagcaggccggggcaggggacagagccctgtggctctccactttagacccctcctggctgactgccatggaatgcagccacttagcagggccaaatcccctgatgttcctgttggctgtctagccttcagggacaggtcatgggaccttggttcctgccctgtcatcttcccagtcaccctgatcttcacggggaggaatagcctgggaaaggacttggtcacagcacctccaccctagggctattgaggatctcacagttgtgtgtctggtgggttctgtccagagcccatttgagagcagtggatgacaggacaggcctatgtgacccaggcaggcagcaatattgggtcagccttcatgtccccttctgtcagctggggcagcctggaagcatgattgtggggtaggtgttatgggcacggaatagacctcaggtggaggctgcaggggctctccggcaccgtagacacagcaggcccaggagcaggggagggagccatgactcagggagactctggcccatatccttggcagatgagggccacaggggaatgggcagcactgtccaaagtcccctgggctgggtccgcagctgttcctggctcagacttcttggtgggctggtcagaaacatgcagtaacttggggcagttaccaggtggccaagcctgcactgctgggctctgtgagcttgggccagctcaggccctctctgggccctgcctttctgggctgttcgggtggttccttgggcctggggtgctaatgtttctggatgggcagcagaaccagtctgcactcagggccccaggccatgttcccggaacacacctttagcattgacagcagcgtgtggtgaggccccttaggctgggttctggtctagtgccaggggcaccactactccaccgcctccagagccatctctgggacactggctgtgagttcagatgttctgaacagggacagggagagccagagggaaccagcctggggctcactggaggggctcgtgggcagacagcgccctttggagggaactgagtctgaaaggaaggaaaccctttccccggctcatagcacctgccatccagggccctcccagggctgcgtgaactttagtcacgtggtgacaggccgagtcaccatgccaagtcactgtgcgcctccttgctgctgtgacgtcagcttccccatcctcccagccaggctggacctccgtgagaggcctgcctgtcctgcaccctgtgcagatgcctcccactgtccgccggggctgctgggcacgccctggctggtctcttggactaggtaagctcatgagtcctctggccgctcctgctccttccctgcctctgctcctcctcggaggtggccacccccagatcccagtcccaattcggaggccccctgaggagtgctgcagggggccacaggcgtggctctgagccactctggagagtggcggggggcccagccagttctgtggctgggactttcccaggcagacaagtctgtctcttcctccccagcgggtgcagcccagaactgtcttctgaggaagaggtgctctcctgggcccccactgtccccaggcctcaggtaagcccatcagggtcccaaggaagggggtctgggtttgaggccaaccatggcagctgacctactttctagcctcagtttcccctagtgtgtgcagctctcacgctgtttgggtgagaaccaggcctctgggcttggacattctttcagtgagtttttagggtggagggatgggaaatggaagcccaggacctcagcagggtgtcttcctccgatccggggacatctgcctgtgggaggctgggcccaccctcccttgctgacctgccctgggaggaagggacagggcccagcactgcctactcccctccctgttcttcccagcagtctgagcctggctgggtgtcccctgctcctccagcagcctacttgggcctttgggtagacagattaacagacaggcgaggctgggtcatggttggaccaccccaggaccctgaccgggggctcagctcatgaccctgagcctgggagagatgaggccatgccctccagggcactcagcatgacccggcccagtggacgggactgggtagcttccttggtgcagggggctgtcatgctaggacggggtcactgaccaggccaggcccctgccccatgacttgtggtggaaatgtccttttgtttttgtttttttgcattttttttgagacggagtttcactcttgttgcccaggctggagtgcagtggtgcaatcttgcctcactgcaacctccacctcctgggttcaagcaattctcctgcctcagctcctgagtagctgggattacaggcacctgccaccatgcctggctaattttttgtatttttagtggagatgggggtttcaccatgttggccaggctgttctcaaactcttcacctcaggtgatccacctgcctctgcctcccaaagtgctgggattataggtgtgagccactgcacccggccatgtgatgggaatgttctgtgtccataatagatgctgcatattgctggcccagctcctgaggctctttggacctccaggaatcggtgtctctatcaggaacccttaaccctgacccggactcccagctgggacccggggtgtcggagtggcaagagcgctgtcaggcctggtgaagggtgtgagctgtccaacggggcagggaggaggcagggcctgttctgcagttggacagacagagccctctagctgctttctggaagactgaagggcaggtgatgttggagggagggagtgcaggcaggggctgtgagggagttcaggtcagaaacaggtggcgcctggattcaggctgtggtggtcacggtggggatgaggggctgctttggattgtgctggggatgtggggtggtgcgctgctgcatgactactgccaggtctctctgctcttagtgtctgcatccagggctgggagggggtcaaatgaatcacactatcggccccaggcccaccaagcctggggaggtggccacccttccatgatggcatttggatgttccctgtgtgtggggagggcacagggactccattcgtagaccacctctgggacagtgtgtctgcctctgaggtcagacgctctgcactgggacagggtggagtggagggaaatccagcttggggctcattggaggggcttgctggcagacaccgccctttgtgggaaactgactgtgggagaggggaaccccaacctctgtcaccacatccctcttccctgttgtcacacctgtcacctgctgccatagccatgagacttcccaagggtcactgctgccactcactgcacagcctggaagggagtccacaggggacatacagtgagcaagagacctgtgccactcaggcctcctgggggtgtccccagtgcagccatgatgataatcacagctaccattcaccaagccctgcccacagtctaacctactctattcacaacactcccagcagcaaggcaagtgaggtgctgccgtcatccaggctggacagttcagtgatttgcctgaggccccacagcaggtgagtggcaagtccagcatcagagcagggcaggctggcggtgccccctgagccccctttgccatgctgaccacatgcacatcctgggcttctgcaggaatgccctgtcccctacctgccctgctccgtgcaaaaccctctttgagctgtgcctgggagacatgctgagagaattcatggaaacaaatgtgttactgacagcctctttgcctccagagttcaactggagacagagaaaccagctagaggcagagggaggtaacacggagtcccccagaaaggtctgggctgcgcgtgcttcaggtaacctcccttgaccttcaggagaacgagaaggctgcctgatcagagagtccctgaagaagattctgtggctacaggcttcagcagagtgtgagggagaccccggttatttcctcagctatttccaccaaatcctcctgtctttcgtggccaacaccccaggcaaggcttggggcccccgtctgctgctggacggtaagtcctggccccgtggcagtgaatctgtggggcgctctgattgtgggcactatggaagctaaaccccatgctccaggtggggtggagggtcttcagaggactcctggacagtgccaggctctaggctggggtgggggacacaggagaaaccaggccaggcccatccctactggagcttctccctaagcagtggaggctcagccactgtaaggaggtaggcaaggccctgcagaaagaggggtgtggaaatctgggggctcccaggaagggccgctgctggagatggggttcttaccaggatgggctctgaagataagcagggaggatttgggagggcagagatgaggcccagagcttctggcagagggcatggcctgcgcaaaggtctgggggccggacagcctgcacgtattctgggaagcgggaaggagacacaggccttgtgtttctgaggcccgactttagactgtgccctgttggggaggggccagggaatgtctgaggctaggcctgaccctgcttcttaccccgtgggtgcagcagagccatgaagaagaagttagtggtgctgggcctgctggccgtggtcctggtgctggtcattgtcggcctctgtctctggctgccctcagcctcc

SEQ ID NO: 12281 - DNA, 597 bp, Homo sapiens
cccggtcagagctttaagctgcagctctgatgccccagggacctctcagacccccctgcccagagcaggcagcccgcgggtgcagcccagaactgtcttctgaggaagaggtgctctcctgggcccccactgtccccaggcctcagcagcaaggcaagtgaggtgctgccgtcatccaggctggacagttcagtgatttgcctgaggccccacagcagagttcaactggagacagagaaaccagctagaggcagagggaggtaacacggagtcccccagaaaggtctgggctgcgcgtgcttcaggtaacctcccttgaccttcaggagaacgagaaggctgcctgatcagagagtccctgaagaagattctgtggctacaggcttcagcagagtgtgagggagaccccggttatttcctcagctatttccaccaaatcctcctgtctttcgtggccaacaccccaggcaaggcttggggcccccgtctgctgctggacgcagagccatgaagaagaagttagtggtgctgggcctgctggccgtggtcctggtgctggtcattgtcggcctctgtctctggctgccctcagcctcc

SEQ ID NO: 12282 - DNA, 8569 bp, Homo sapiens
cgcctcttccagcccagcatccagctggcccgccagggcttccccgtgggcaagggcttggcggcagccctggaaaacaagcggaccgtcatcgagcagcagcctgtcttgtggtatgtctgtgggtgcggccccctgacacaggcagggcaggcacagcccaaggaccttgcaggccgtagcagcagtggagcagccctctgccttcaggaccctgtgctgataatgggatgaggagatacagacccttcccaccacgtgtggggacacattctgagcgtggggtcccagtggccactgtggctggccatgtgtcctgagtggcaagggacactaggaagctcccggaagggacactaggaagacgagcgctgagtgacagggccacccacctgtgacaggcgctgcccctgttctgctccgttctcctgtgtggacgggtgtgaggggtggtctagctgagtccaccccacctgctgcctcacatgagccccctctgccccagtgaggtgttctgccgggatagaaaggtgcttcgggagggggagagactgaccctgccgcagctggctgacacctacgagacgctggccatcgagggtgcccaggccttctacaacggcagcctcacggcccagattgtgaaggacatccaggcggccggtgagtgggtaacctcaggggcctgggtgaggaactctgcagtggaaaccctgagctgtagcccagagctatggggtcctcctgtcttgcctgagcctgcaggaagttcctggtggaggagggtcagtgactggccatgtgggtccacagctcctgcttatatcaaaaccaagagaggccacacagtccaggagagcaagtccctgttggggtaaatgcaggtgtaggcaagagccagggctagggaagcactagaatacagcctgaagatccaggaggacttcttggaggaggtggcggctgggctgcagataactttgttaggcagagagaggaagggattcctagcagaggaacagctgggctaaggcccagtagagggcgctttgattcaccaagagggttacaagggatgagggtctccttgagagaggcatggggaaggggatttgtggggcaggggcctggagcttggctgtggctttcttcaggtaatttttgtcacgtttcatggaggagggtgattagcgtgtcgacctttaccactgaggctggaaattggcatgccaataccctgtctgtctggagctgactccaggagaattaagagcctccctcctctattcattcatcatgaggagaagaggccaagcggcagggagactggcaggaattctccagttagaaaaggccctctgagccaggcgcggtggctcacgtctgtaatcccagcactttgggaggccgaggcgggtggatcacctgaggtcaggagttcaagaccagcctggccaacatggcgaaaccctgtctctactaaaaatgcaaaattagtcaggcatggtaggttgtgcctgtaatcccagctacttgggaggctgtgccaggagaatcgctagaacctggggggctgaggttgcagtgagccgagattgcaccactgcactccacagagtgagattccatctcaaaaaaaaaaaaagaaagaaagaaaaggccctctgaggccaagcttggtgtctcatgcctgtaatcccaacactttgggaggctgaggtagaagttgaggccaggaggtccaagacaagcctgggcaacatagtgagtctacaaaaaaaatattgagaaactacataaatatagtgggggtgggggtggggaacaagaaaacaaaaaattcaaagcatagtgaaaagaaatatagcaaaacccggccgggcatggtggctcacgcctgtaatcccagcactttgagaggccgaggcgtgtggatcacggggtcaggagatcgagaccatcctggctaacacagtgaaacctgtctctactaaaaatacaaaaaaattagccacgtgtggtggcgggcgcctgcagtcccagctacttgggaggctgaggcaggagaatggcgtgaacctgggaggtggagcttgcagtgagccgatatcgcgccactgcactccagcctgggcgatagagcgagactccgtctcaaaaaacaaaaaaaaagtagcaaaacacaacaaaaaaattaaaatttgctgggtgtagttgtgcctttagtctcagctactggggagggtctgctggaggatcacttgagcccaggagttcaaggctgtgattaagccactgcactccagcctgggtgacagagcaagatcctatctctaaaaaaaaaaaagaaaagaaaacactctgtggccacagatgagagaaggcagacaggaagccagtaagccaagcaggcaaagggcaggtggccccagcccggctgttgggtggtgagcagtgtcagggagacaggagtgccggagctgatgaggttcccaaggaggtgaggttgcctgtggccccctcccagggcacagtcccacccctccagtagtgcactctgtcctccctggtaggtacaggcttttccccaccaccatggtgcagccatgcctgcccccaacaccactgctgcagctccatcctccacgcagtggtgcagccccatcccagcacccatttgagctgctgtcccattgcagggggcattgtgacagctgaggacctgaacaactaccgtgctgagctgatcgagcacccgctgaacatcagcctgggagacgtggtgctgtacatgcccagtgcgccgctcagcgggcccgtgctggccctcatcctcaacatcctcaaaggtgagtggtcgcaccacagccgtgtggtaggacccatgacactgcctctctctccccacgccccacccctcctgcatctctgctcgccccccatgccacgtctttccatcactgagctcccgaggtgtgtccctgcgtcacagttcaccatgtcctgaaggaggcagtgcagagcgacagggctgaagcgggcaatgctcaagggttggaggaggaacaggagtcatcaggagggagagaggtgcaggagctcagggctgcagggccggtccagagggtaccccggtccagtgggtgaccctgccacttggtcattgaatggccagagctgatgcgtgacgtgaggtccaggctcgggagccctcaccttacttcactctcaccacagccttctgaagcagctgctgctattggttattaaacgctccttgaggtgggcaaagtggctcaggcaggtgttaaccctctgagcccctcagagcctctggggctcagcaacatgcacctggctctgatcaaccagggtacaacttctcccgggagagcgtggagagccccgagcagaagggcctgacgtaccaccgcatcgtagaggctttccggtttgcctacgccaagaggaccctgcttggggaccccaagtttgtggatgtgactgaggtaaggggcaggggctggcccactgtgggtgtggggcctgccatagaggcatcaggtgggctccccagggtggctacagcctcacatatgctttatgaatccattcctgccacagacttcgattgcgggcctactgtgtgctcggatggactcgtgggtgacccccagtcttggcttctgccgcacagaactgacagtgtggggaattagtggccaccctcctacctcaggtcctttgcacatgctgtggttctcgagtgctcagtgctgagatgaggaatgcatgggggcattgcagccctcgggcatggtgagatggatgggtgaaagggagagggccaggtgaacagagaccttggccacccactccctgtcactccaaactaacgcttcccagatgccaccctcagccctgcaccacctgacccactcactcagtagttgccccagctccacactgggtccctataagaccctgtcatatcccttcccgctgaggatcctcacatccctccttacctacttgggtccttggcattcctgggcggatctgcagacccccccacactgaccagtgacctcccaggaggggcgtcagctgcccaggtggtgtcttctctttccccgtgagcattctgcacctctgactcccgctgcagccagtgacctggtgtcttgtctctctgaggggacagagccactgcagtgtgtccctctgccctcctttttggctaaggccagctccttcatctactcgctggctcggggtgctgttcctacaatgctcctttctgcctctgatgatttacttctttatcacggcttattcccgaaagaaaggcagctgttgttgctctagaaacttctatctgctgcctccttctgtcctttgctcctcttagagcaaacatggctgggctatgtcctctctcccttcagggtatcccctcccctgctctatccccatgccaccagatcgccatgtccagcctcagtttccccatcaggccccactcagcagcatctcacacagctcaccacactctcctcgagttttcattttgcaaattttcgcacctacaaaaatgtaaaaaaaccccaaaactgcccaagcatcaatgctcccttttcctggagtctgcagtgtggatgtttctgtcggatttcctaactctctccgtctccacccacatctattgggattcgtgtttttctgagggattccacagtaggttactgatgtcgcacctcagggtgtgtctcaaaagtgagacttgaacatagcacagcaggatgtcggggtgacacaacctgttgtcccttctctttacctacagtaggctcccttggctgttttgtttttgttgtgtttttgtttgtacacagagtctctgtcatccaggttggagtgcagtggtgtgatcttggctcactgcagcctcaacctccagggctcaagcaatcctcccacttcagccccctgaacagctgggaccagaggcacgtgccaccaaacctggataatttttgtattttttttagagacagggtcttgcccagactggtctcaaactcccgggatcaaactatcttcccacctcagcctcccaaagcgctgggattacaggtgtgtttttttttttgagacagagtctcgctctgttgcccaggctggagtgcagtggcgctatctcggctcactgtaagctccgcctcctgggttcacgccattctcctgcctcagcctcccgagtagctgggattacaggcgcccgccacaccgcccagctaattttttgtatttttagtagagagggggtttcaccgtgatcgcgatctcctgacctcgtgatccgcctgcctcggcctcccaaagtgctgggattacaggcatgagccaccgtgcctggcctgttttgttgatttttaaagcccagggcagtagtcttggaaaatgtcccacatcgtggatttgcctttctgtttccttgagggcagattcagacagaacacctttccctgggattggtcaactaatccgtggggtgttgctgaaactttattttattttattttatttttgagacggagtctcgctctgtcccccaggctgtcccccaggctggagtgcagtggcgggatctccgctcactgcaagctccgcctcccaggttcacgccattctcctgcctcagccccccaagtagctgggactacatgtgcccaccaccgcgcccagctaattttttgtatttttagtagagacggggtttcactgtgttagccaggatggtctcgatctcctgacgtcgtgatccgccctcccaaagtgctgggattacaggcctcggcctcccaaagtgctgggattacaggcgtgagccaccgcgcccggtgttgaaactcccttgaggcattttcttcggccttcgggtccatcctctgtctcctccttgacctcctcatctcctcgccactgccttggggaccttggccaggctcatggcatccagcagccactcaatgtcaatacctccatgttcatctctcagcccgcccttgcccgtgaacccatgcttatttatttattttttttaatacgtgcacccatgctcttcaggtctgatgaagtatccaaaatcaagctcctgaccatccccaaacctgccccttctgcagggtttacctcgctagtcggcgccatccttgattcttctctttctcccacccaggccatcatctcttgcctggttgatacccacagcctcccctttgggctttatccttatccccatcatagctgccagagggatcctgtgaaaacactccccagcctgctcattcctctgccctaagcctgcatggcacagagcaaaagccagttgttatgggacctaggaagtcctgtgggatgggccccagcctgcatcttcatcctcttctccccaccccactccattcactctctgcctatcactcaccagcctataccacctgcctcagggcctttgcactgaccatttaggccacattccaggctcttttcacacgttgcctcctctgagaagccctccctgaccactctgcccatacctcatgcctcttgattccccttacctggcttgtggtttcagcactttccctgtgtgtgtttgtttttcttggcatgagagcaggacctaagtgtctgttccctgttgattccccagtgccaggcatgcagtgcaaactctagaaatattttttgcatgaaggaatgagtgattgaatgcagcaagggtctggaggctgaggaccaggcagacagacattcagagttgctggaacgcgacagagacagggagtcagactggtcatgcaaggtcctgggcctgcccttgggtcctggggagccacggaaggttgtgggtgccagagggttgcggtcagagtcacagtcaagggccttctgagacctgtgccccctccccaccctccctccccacctcctcaggccagctctggggtctcggcaggtggtccgcaacatgacctccgagttcttcgctgcccagctccgggcccagatctctgacgacaccactcacccgatctcctactacaagcccgagttctacacgccggatgacgggggcactgctcacctgtctgtcgtcgcagaggacggcagtgctgtgtccgccaccagcaccatcaacctctagtaggggctgctgggccgcctgggtgggaaagggccaggggcgggtggcccagggactgcccacttatccagtaaggtggctccgtcacctcttttcctggtgggaaactgaggcccaaccttggtagcttatcctgggcctctcagtgagtatgtttgagcctcagtgggtggatagggaccaggctgggccaggcaaggtcgggcactgtctgacctggctgggcggtagctttggctccaaggtccgctccccggtcagcgggatcctgttcaataatgaaatggacgacttcagctctcccagcatcaccaacgagtttggggtacccccctcacctgccaatttcatccagccaggtatggggtggaggtccgggggtgggggactggggtggagaggggcgggtgtcctgggcaggcagctgacgggcatccctgtcttctcccatcggccgcagggaagcagccgctctcgtccatgtgcccgacgatcatggtgggccaggacggccaggtccggatggtggtgggagctgctgggggcacacagatcaccacggccactgcactggtatgtgtcacaccttttctccctggccgtgcccaccctgcacagcccccaagccatgctgatcacactcccatgccccaggccatcatctacaacctctggttcggctatgacgtgaagcgggccgtggaggagccccggctgcacaaccagcttctgcccaacgtcacgacagtggagagaaacattgaccaggtgggccgggggttggagaaactgagtcaaggtgtggggccccagggcatcctgggctggaggcctggatcatcacagagtggacaatggttggtgtcctctctctagtgcctgggccatctggagcccctgtgccatgagggccaagccccctgctccagtgagacccagcaggccccaacctgctcttcctgatgacctggcccgaaatggcaccacctgggctgaggcctgtgaccacacagatgtggttcaggtggcatctggagccctgctcaggcttcccctctcctcccacccccaggcagtgactgcagccctggagacccggcaccatcacacccagatcgcgtccaccttcatcgctgtggtgcaagccatcgtccgcacggctggtggctgggcagctgcctcggactccaggaaaggcggggagcctgccggctactgagtgctccaggaggacaaggctgacaagcaatccagggacaagatactcaccaggaccaggaaggggactctgggggaccggcttcccctgtgagcagcagagcagcacaataaatgaggccactgtgccaggctcca

SEQ ID NO: 12283 - DNA, 1249 bp, Homo sapiens
cgcctcttccagcccagcatccagctggcccgccagggcttccccgtgggcaagggcttggcggcagccctggaaaacaagcggaccgtcatcgagcagcagcctgtcttgtgggggcattgtgacagctgaggacctgaacaactaccgtgctgagctgatcgagcacccgctgaacatcagcctgggagacgtggtgctgtacatgcccagtgcgccgctcagcgggcccgtgctggccctcatcctcaacatcctcaaagggtacaacttctcccgggagagcgtggagagccccgagcagaagggcctgacgtaccaccgcatcgtagaggctttccggtttgcctacgccaagaggaccctgcttggggaccccaagtttgtggatgtgactgaggccagctctggggtctcggcaggtggtccgcaacatgacctccgagttcttcgctgcccagctccgggcccagatctctgacgacaccactcacccgatctcctactacaagcccgagttctacacgccggatgacgggggcactgctcacctgtctgtcgtcgcagaggacggcagtgctgtgtccgccaccagcaccatcaacctctactttggctccaaggtccgctccccggtcagcgggatcctgttcaataatgaaatggacgacttcagctctcccagcatcaccaacgagtttggggtacccccctcacctgccaatttcatccagccagggaagcagccgctctcgtccatgtgcccgacgatcatggtgggccaggacggccaggtccggatggtggtgggagctgctgggggcacacagatcaccacggccactgcactggccatcatctacaacctctggttcggctatgacgtgaagcgggccgtggaggagccccggctgcacaaccagcttctgcccaacgtcacgacagtggagagaaacattgaccaggcagtgactgcagccctggagacccggcaccatcacacccagatcgcgtccaccttcatcgctgtggtgcaagccatcgtccgcacggctggtggctgggcagctgcctcggactccaggaaaggcggggagcctgccggctactgagtgctccaggaggacaaggctgacaagcaatccagggacaagatactcaccaggaccaggaaggggactctgggggaccggcttcccctgtgagcagcagagcagcacaataaatgaggccactgtgccaggctcca

SEQ ID NO: 12284 - DNA, 5607 bp, Homo sapiens
gaaggctgcctgatcagagagtccctgaagaagattctgtggctacaggcttcagcagagtgtgagggagaccccggttatttcctcagctatttccaccaaatcctcctgtctttcgtggccaacaccccaggcaaggcttggggcccccgtctgctgctggacggtaagtcctggccccgtggcagtgaatctgtggggcgctctgattgtgggcactatggaagctaaaccccatgctccaggtggggtggagggtcttcagaggactcctggacagtgccaggctctaggctggggtgggggacacaggagaaaccaggccaggcccatccctactggagcttctccctaagcagtggaggctcagccactgtaaggaggtaggcaaggccctgcagaaagaggggtgtggaaatctgggggctcccaggaagggccgctgctggagatggggttcttaccaggatgggctctgaagataagcagggaggatttgggagggcagagatgaggcccagagcttctggcagagggcatggcctgcgcaaaggtctgggggccggacagcctgcacgtattctgggaagcgggaaggagacacaggccttgtgtttctgaggcccgactttagactgtgccctgttggggaggggccagggaatgtctgaggctaggcctgaccctgcttcttaccccgtgggtgcagcagagccatgaagaagaagttagtggtgctgggcctgctggccgtggtcctggtgctggtcattgtcggcctctgtctctggctgccctcagcctccaaggaacctgacaaccatgtgtacaccagggctgccgtggccgcggatgccaagcagtgctcgaagattgggaggtgagcagggcagggcatgggacatgggccctgaaaactgggcaagtggacctgagcaataccttcacccccctgagactcagtttccccatgtgtaagcttcgcttggactctctcagtagcctttgggaaggggacagtgactccgagagcagggtgtgggtctctagagccaaacagggccccttttctcagttctaagagtctctgtctctttggaataaactgcactgttttgttgtttggttgttatttttacttatttcttcctatctatctatctatctatctatctatcatctatctatctatctatctatctatctatctatctatctatctatctatctatctactatctatctatctatttatttagagatggagttttgctctgttgccaggctggagtgcagtggtgcaatctcagttaactgcaacctccgcctcccaagttcaagtgattctcatgcctaagtctcccaagtagctgggattacaggcgtgcgccaccacgcccaacaaatttgtgtgtgtgtgtgtgtgtgtgtgtgtgtgtgtgtgtgtgtgtgtgtttccaagacagagtatcgctctgttacccaggctggagggcagtggtgcaatcttggcttactgcaacctccacctcccaggttcaagtgattctcctgcctcagcctccacagtagctgagactacaggcatgtgccaccatgcccagctaatttttgtatttttagtagagacagggttttgctatgttggccaggctggtcttgaactcctgaccttgtgatcctcccacctctgcctctcaaagtgctgggattaaggtgtgagccactgctcctggcctaattatggtgtttttagtagagatggggtttcaccatgttggtcaggctggtcttgaactcctgacctcaggtaatccacccacctgggcctcccaaagtgttgggattacaggtgtgagccaccacgcccggcttattctttttttttttttttttttttggttaggagacaatttctttctttctttttttttattttattttattattattatactttaagttttagggtacatgtgcacaatgtgcaggtttgttacatatgtacatatgtacacatgtgccatgttggtgtgctgcacccaccaactcatcatttagcattaggtatatctcccaatgccatccctcccccctccccccaaggaacactgttgcccaaacagggacatgaagggcttattcttttttgttgttgttttgttttgttttgttttttgagacggagtctcacgctgtctcccaggctggagtgcagtggcgcaatctcggctcgctgcaacctccgtctcctggattcaggtgattctcctgcctcagcctcctgagtagctgatattacaggcatccgccaccacgcccggctaatttttgtatttttagtagagacagggtttcaccataatggtctggctggtctcaaactcctgacctcaggtgatccgcctgccttggcctcccaaagtgctgggattacaggcatgagccaccatgcccggccgggcttattctttttttaaggtggagtcttactctgttacccaggctggagtataggggagcgatcatagcccactgcagcctcaaactcttgggtttaagtgatcttcccgcctcagcttcctaaagtgctgggattacaggtgtgagccatggtgcctggcttctactgttttattctattttagactcttatctcatgttatatacaaagatcagttccctcctaaagacttaaacagaaaaaatattatgtttttcatattttgagacagggtcttgttctgtcacccaggctggagtgcagtggcatgatcatagctcactgcagccttgaactcttgggcttaagcgatcctcccacctcagccccctgagtagctaggactacaggcgtgcatcacacctgactaattaaaaaagactgttttctagagatggtctcactctattgcccaggctggtcttgaactcctggcctcaagtgatcctccaccttggcctcccaaagtgctgagattacaggtgtaagccaccatctctagccgggaaaaaaaatgttattaataaagtatagcaatttccctttttgtcccagttataaaagtcatgtacatttgtttgcttgataaagaggaaactgtctgggcaaggtggtccacacctgtaatcccagcactttgggaggttgaggcgggcagaccacccgaggtcaggagttcgagaccagcctggccaacatggtgcactctgtccctactaaaaatataaaaagttagccgggcatggtggtgtgcgcctgtaatcccagctactcaggaggctgaggcaggggaatcacttgaacccaggaggcagaggttgcagtgagctaagatcatgccactgcactccagcctgggcaactgagtgaaactccctctcagaaaaaaaaaaagaaagaaaagaaaagaaaaagaggaaactgtaatcccagcactttgggaggttgaggcgataggattgctttagaccatgagttcgagaccagcttgggcaacatagaaagaccctatctctacaaaaaagacaaaaaattgccaggtgtggtggttcttacctgtagtcccagctactcagcagactgaagtgggaggattgcttgagcccaggaggtcaaagctgcattgagccaagactgtgccactgcacttcatcctgggtgacaaagtgagaccctgtctcataaaacaaaggctgggcacagtggctcatgcctgtaataccagcactttgggaggccaaggtgggtggatcacttgagcacaggagttcttgaccagcctgggcaacatgatgaaaccccatctctacaaaatacacaaacaaacaaaattggctgggcatggtggcatgtgcccatagtcccagctacttgggaggctgagatgggagggtcaattgagcccaggagactgaggctgcagtgatctgagatcacaccactgcactccagcctgagcaacaaagagagactttgtctcaaaaaaaaaaaaaaaaaaaaaaaaaaaaagaggccaaggcaggcggatcatgaggtcaagagatagagaccagcctggccaacatggtgaaaccccgtctctactaaaaatacaaaaattagctgggcgtggtggcatgcacctgtagtcccagctactcaggaggctgaggcaggagaatggcttgaacccgggaggcagaggttgcagtgagctgagatcgtgccactgcactccagcctggcaatagagcaagactccatctcaaaaaaaaaaaaaaaaagaaagaaagaaactaaaaacaaaaaccccaaaactcgaatggacttctcttccatcctcctttgggcaggtgggcagcagggtgtgtatgcggggccagggtggaagcctgcaggttctcatgcctttatgtgccacatggcagggatgcactgcgggacggtggctctgcggtggatgcagccattgcagccctgttgtgtgtggggctcatgaatgcccacagcatgggcatcgggggtggcctcttcctcaccatctacaacagcaccacacgtgagtgcctcgggagaggagagggagaggggcagggggtgtgggttgggccgaggcacagctgggcggtccccaggctcacgtggcataaagggtttgggtgggcgggcctgcctacctgcttctccttctaggaaaagctgaggtcatcaacgcccgcgaggtggcccccaggctggcctttgccaccatgttcaacagctcggagcagtcccagaagggtaagccatgcggcagacttggggcgtgggtgcagagctggctgagccaccgggaaggggccttgcccacaggagcctgctcccgtcagggttcaggggcagttctgtcaccccccatcccttcctgtccccatagcaccctcccacaatgagtggtcaggaccatcatcaccatggtaaagggccgggagcttctgttatttctgctaaggcctccggggccactctgtgcagcacatggagagaataattattatgctagcagacctcatggaccagggctcactggggcccacactctgctctgtgcttttcacccatgagcctctcacaaccctccctgctcctttgggctaggggatgctgtgtggattcccattttacagggtggggatgctgaggctcagacaggtcacgcaaatcagttgaggtcacacagctgggaggtggtgaagctaaaattgaacccaggctgtctataccgtgccttttcaacaggcatcccattcactcatttgttcatttgtggggatggtgctctagaatgtgaggtggagtctctcttttctaatctggtcttaagtggagaggaggcccccaaattccccaggtacctgaagggaagccactgtccatccaggaagccactgtctgtcctcaaaggtggtacagtagattgtgagataaaagttggaggatgggagggtctcaacaactcacgcctctaatcctagcactttaggaggccaagtcaggaggagcgcatgagcccaggagtttgagacctgcctgggcaacatagcaagactccatctctacaaaaaacggaaaaaaaaattagctag

SEQ ID NO: 12285 - DNA, 535 bp, Homo sapiens
gaaggctgcctgatcagagagtccctgaagaagattctgtggctacaggcttcagcagagtgtgagggagaccccggttatttcctcagctatttccaccaaatcctcctgtctttcgtggccaacaccccaggcaaggcttggggcccccgtctgctgctggacgcagagccatgaagaagaagttagtggtgctgggcctgctggccgtggtcctggtgctggtcattgtcggcctctgtctctggctgccctcagcctccaaggaacctgacaaccatgtgtacaccagggctgccgtggccgcggatgccaagcagtgctcgaagattgggaggaaaagctgaggtcatcaacgcccgcgaggtggcccccaggctggcctttgccaccatgttcaacagctcggagcagtcccagaaggcactttaggaggccaagtcaggaggagcgcatgagcccaggagtttgagacctgcctgggcaacatagcaagactccatctctacaaaaaacggaaaaaaaaattagctag

SEQ ID NO: 12286 - DNA, 5972 bp, Homo sapiens
gcatcgggggtggcctcttcctcaccatctacaacagcaccacacgtgagtgcctcgggagaggagagggagaggggcagggggtgtgggttgggccgaggcacagctgggcggtccccaggctcacgtggcataaagggtttgggtgggcgggcctgcctacctgcttctccttctaggaaaagctgaggtcatcaacgcccgcgaggtggcccccaggctggcctttgccaccatgttcaacagctcggagcagtcccagaagggtaagccatgcggcagacttggggcgtgggtgcagagctggctgagccaccgggaaggggccttgcccacaggagcctgctcccgtcagggttcaggggcagttctgtcaccccccatcccttcctgtccccatagcaccctcccacaatgagtggtcaggaccatcatcaccatggtaaagggccgggagcttctgttatttctgctaaggcctccggggccactctgtgcagcacatggagagaataattattatgctagcagacctcatggaccagggctcactggggcccacactctgctctgtgcttttcacccatgagcctctcacaaccctccctgctcctttgggctaggggatgctgtgtggattcccattttacagggtggggatgctgaggctcagacaggtcacgcaaatcagttgaggtcacacagctgggaggtggtgaagctaaaattgaacccaggctgtctataccgtgccttttcaacaggcatcccattcactcatttgttcatttgtggggatggtgctctagaatgtgaggtggagtctctcttttctaatctggtcttaagtggagaggaggcccccaaattccccaggtacctgaagggaagccactgtccatccaggaagccactgtctgtcctcaaaggtggtacagtagattgtgagataaaagttggaggatgggagggtctcaacaactcacgcctctaatcctagcactttaggaggccaagtcaggaggagcgcatgagcccaggagtttgagacctgcctgggcaacatagcaagactccatctctacaaaaaacggaaaaaaaaattagctaggtgtggcggtgtgtgcttatgttcccagctacttgggaggctaaggtgggaggatcacttgagcccaggaggttgaggctgcagtgagccatgattgtaccactacactctagcttgggcaacaaagtgagaccctgccaaaaaaaaaaaaaaggctgggcctttttttcacaggctcacgcctgtaatcccagcactttgggaggctgaggcagatggatcacctaggtcaggagttcaagaccagcctggccaacatagtgaaaccctttctctactaaaagtacaataattagtcaggcgtggtggcacaggcctgtaatcccagctactcaggaggctaaggcaggagaatcgcttgaacccaggaggaggagattgcagtgagccgagatcatgccactgcactccagtctgggcaacaagaatgaagctccgtctcaaaaaaaaaaaaagttggaggatggaggggcaggacacactcaccatagcaggtcttagacttcaggtgggggtcctgggtggtgccctttggagtcttctgcaacatactcaatctttgacttttttcttttttttttcttttttttttttttgtcacccagactgtcgcccaggctggagtgcagtggcacgatctcggctcactgcaagctctgcctcctgagttcacgccattctcctgcctcagcctcccgaatagctgggactacaggcgcctgccaccacgcccagctaattttttgtattttttagtagagacgggttttcactatgttgcccaggctggtctcgatctcctgacctcgtgatcccccggcctcggcctcccaaagtgctggaattacaggcgtgagccactgtgcccgatcaatctttcatttttttttaatactcattgagaaactcagcatttgtagacatgaagttgctcagggtaagagaatgcgggaatcataggcttggcaccttgtggactcttagaatcatttatttaacttgaatgtattgagtattctcttaaagaatcagctgttgttcctgaagctggggtgaaaaacaaagatggcagatgaaatctgtgacactccaggtgggaggagaaactaggcaggtgcaggtgtgttacgggctgtagaaaaacaggtctggagggcctcaaaatctgggactgtatagagggtgacctagtcagggaaggggacatctgagcaaagacccagaggcagagatggggtcaggggagttatctcctggtctgctatccaggtgtgatggcagggacagagccctgtggggagctggggaggctgcagcaagtgatccaagggaaatggcccaggttgtgtgggatctcttaggttatggtgaagcctctgcttcctgtctgagggaagtgggggctcgtggagtatgtgagtggaaggggatggatctggcctatggaccccgtgggttgctgtgtaaggggcagggagcatgtggggacctgtctggaggtcactgcagtaattcgtggagagggtgctgggaagtggctgacgctggacagacacacttggaagtggagtctgtggatttgaggatgggttgggtgtgacgcttgtgtagggagtccccggggacccctgatcttttgtctgtacctggaaggatggggtgaccctaatggagacaggcagggttctcaggaagcaggttgagcagacactcaggagctcggttttgggcacgttgaagtttgagatgctttcttcgagcaggcaggtagatcctcaggtctggtgatcggaggagcagcccaggccagcaggtcaatttgagagttgtcagtgcataaatggaggctgaagctcagatgtcaagcagaccaccaggagagagagcaaagacagaggggagagtaggagctaggatggcaggcgggggagactcgggtggagccaggtgctgggatgcaggggcagctctcagggaaagtgatgagcccagtaaagctgagagggggcactgggtctggcagtgtgggggtcaccagagaacttggcaagtgtgctggcatgagagtctgattggcctgaggtcaggagaagattttttttctgatattgatacatgatattttctatatttatgggtacatgtgagtgcttgttacatgcatagagtgtataatgatcaaggcagggtatttggagtctccgtcaccttgaatatttttcatttctgggtgttagcaccatagtcctctcttcgttactttgaaatatacaaaatactgttgctaagcatcgtcaccctggtctgctatcaaagattagaacttctcctgtcttggctgggcacggtggctcacacctgtcatcccagcaccttggaaggctgaggtgggtggatgacctgaggtcaggagtttgaaaccagcctggccaacatggcaaaaccccatctgtactaaaaatacaaaaattagcctggcgtgctggcctgtgcctgtaataccagctactcgggaggctgaggcaggagaatcgcttgaacctgggaggcggaggttgtagtgagctgagatcatgccactgcactgtagtctgggagacagagcaagactccatctcaaaaacaaacaaagaagaaaaacaaaacaaaacaaaaaataacttctgtctaactacaaggtggaaggaatcatgtgctgggtgtcagaccttccgggatgtatgtgcagcttctaggaattgaaaccaccagctcttggaaacttgtgccaggcttcagggtgggagaggcagttctagagccacagctgccaagccaagccaaatggccccatcatctctcgcaagagcaggagagtccctgggggcagaggccatagttgtacctttctgggcaaagggtcagtgtctgtagtgtccttatgggcagcggggctcaggggggaagcaggcccaggggtgtgtttccaatgacctcctcaaaagtcagaactggaaggcaaaaccccttataggctgagtgcacctgtaatcccagcatgttgggatgctgaggtgggaggattgcttgaggccagagtttgagaccagtcttggcaacgtagcaagacccctgtctctacaaaaaataaaaataaaaaattaggctgggaatggtggctcacgcctgtaatcccagaactctgagaggctgaggaggatggatcacctgatgttaggagttcaagaccagcctgaccaacctggtgaaaccccgtctctactaaaaatacaaaaattagcaaggcatggtggtgcatgcctgtaatcccagctacttgggaggctgaggcaggagaattgcttgaactcgggaggtggaggttggagtgagccaagattgtgccattgcactccagcctgggcaacaagagtgaaactccatctcagaaaaaaaaaaaaaaaaaaaaaagccctgtgtagtggggtatgtctgtagtcttaggtacttcagaggctgaggtaggaggatcgcttgagcctgggaagccaaggctgcagtgagccatgattgcaccactgcactccagctgggacaacagaatgagaccctgtctcaaaacagacaaacaaacaaaaacccttatagttggatggagaaactgaggctgggagaggggacaggacggaggttaaggctcagtcttgcctctctggggccgtagaaaagaggcagggagccctttcttggggctggctgtgtcttgaaggtggcctgtgcttgacctcggtcaaggtgggatctgctcttgttttggcacattctcgtggagcccatgagtcttacaggataaggccttgtggtcagtgagatgggagggggtctggcctggcacaggattttagacatgcaggcacctgcacagacagacacctcatcctgggacagcaaaacccagccgcatgctactgcttcccctgctgtgccctcctcagacatccctggtccatgtacactcctacctgctgagcccctcctaaaaaaaaaaattaaacatcccctcctaaaaaaaaacaattaaaattaaaaaataaatttaaaaattaaaaatccccttctgctaggtgtgctgttcacgcctgtaatctcagcgactcaggaggctgaggtgggaggatcgcttgaatccaggagttcgagatcgggctgggcaagatggcaagaccccaactcaaaaaagaaaaaaaaaaaatctttcctcctaagcctcattgccccatctgtaaaatgagtcagggactgtgcctgggatgctgcctgcgagagatcccgatgtcccccactcagggtcactaactatggctctctctccccaggggggctgtcggtggcggtgcctggggagatccgaggctatgagctggcacaccagcggcatgggcggctgccctgggctcgcctcttccagcccagcatccagctggcccgccagggcttccccgtgggcaagggcttggcggcagccctggaaaacaagcggaccgtcatcgagcagcagcctgtcttgtggtatgtctgtgggtgcggccccctgacacaggcagggcaggcacagcccaaggaccttgcaggccgtagcagcagtggagcagccctctgccttcaggaccctgtgctgataatgggatgaggagatacagacccttcccaccacgtgtggggacacattctgagcgtggggtcccagtggccactgtggctggccatgtgtcctgagtggcaagggacactaggaagctcccggaagggacactaggaagacgagcgctgagtgacagggccacccacctgtgacaggcgctgcccctgttctgctccgttc

SEQ ID NO: 12287 - DNA, 638 bp, Homo sapiens
gcatcgggggtggcctcttcctcaccatctacaacagcaccacacgaaaagctgaggtcatcaacgcccgcgaggtggcccccaggctggcctttgccaccatgttcaacagctcggagcagtcccagaagggggggctgtcggtggcggtgcctggggagatccgaggctatgagctggcacaccagcggcatgggcggctgccctgggctcgcctcttccagcccagcatccagctggcccgccagggcttccccgtgggcaagggcttggcggcagccctggaaaacaagcggaccgtcatcgagcagcagcctgtcttgtggtatgtctgtgggtgcggccccctgacacaggcagggcaggcacagcccaaggaccttgcaggccgtagcagcagtggagcagccctctgccttcaggaccctgtgctgataatgggatgaggagatacagacccttcccaccacgtgtggggacacattctgagcgtggggtcccagtggccactgtggctggccatgtgtcctgagtggcaagggacactaggaagctcccggaagggacactaggaagacgagcgctgagtgacagggccacccacctgtgacaggcgctgcccctgttctgctccgttc

SEQ ID NO: 12288 - DNA, 1101 bp, Homo sapiens
ggtcagcgggatcctgttcaataatgaaatggacgacttcagctctcccagcatcaccaacgagtttggggtacccccctcacctgccaatttcatccagccaggtatggggtggaggtccgggggtgggggactggggtggagaggggcgggtgtcctgggcaggcagctgacgggcatccctgtcttctcccatcggccgcagggaagcagccgctctcgtccatgtgcccgacgatcatggtgggccaggacggccaggtccggatggtggtgggagctgctgggggcacacagatcaccacggccactgcactggtatgtgtcacaccttttctccctggccgtgcccaccctgcacagcccccaagccatgctgatcacactcccatgccccaggccatcatctacaacctctggttcggctatgacgtgaagcgggccgtggaggagccccggctgcacaaccagcttctgcccaacgtcacgacagtggagagaaacattgaccaggtgggccgggggttggagaaactgagtcaaggtgtggggccccagggcatcctgggctggaggcctggatcatcacagagtggacaatggttggtgtcctctctctagtgcctgggccatctggagcccctgtgccatgagggccaagccccctgctccagtgagacccagcaggccccaacctgctcttcctgatgacctggcccgaaatggcaccacctgggctgaggcctgtgaccacacagatgtggttcaggtggcatctggagccctgctcaggcttcccctctcctcccacccccaggcagtgactgcagccctggagacccggcaccatcacacccagatcgcgtccaccttcatcgctgtggtgcaagccatcgtccgcacggctggtggctgggcagctgcctcggactccaggaaaggcggggagcctgccggctactgagtgctccaggaggacaaggctgacaagcaatccagggacaagatactcaccaggaccaggaaggggactctgggggaccggcttcccctgtgagcagcagagcagcacaataaatgaggccactgtgccaggctcca

SEQ ID NO: 12289 - DNA, 538 bp, Homo sapiens
ggtcagcgggatcctgttcaataatgaaatggacgacttcagctctcccagcatcaccaacgagtttggggtacccccctcacctgccaatttcatccagccagcccccaagccatgctgatcacactcccatgccccaggccatcatctacaacctctggttcggctatgacgtgaagcgggccgtggaggagccccggctgcacaaccagcttctgcccaacgtcacgacagtggagagaaacattgaccaggcagtgactgcagccctggagacccggcaccatcacacccagatcgcgtccaccttcatcgctgtggtgcaagccatcgtccgcacggctggtggctgggcagctgcctcggactccaggaaaggcggggagcctgccggctactgagtgctccaggaggacaaggctgacaagcaatccagggacaagatactcaccaggaccaggaaggggactctgggggaccggcttcccctgtgagcagcagagcagcacaataaatgaggccactgtgccaggctcca

SEQ ID NO: 12290 - DNA, 2326 bp, Homo sapiens
gcctggattctcccagagattgcctggaacaccagctcgggtcctcgcacaccatcctgcgggtgcagcccagaactgtcttctgaggaagaggtgctctcctgggcccccactgtccccaggcctcagcaaggcaagtgaggtgctgccgtcatccaggctggacagttcagtgatttgcctgaggccccacagcagagttcaactggagacagagaaaccagctagaggcagagggaggtaacacggagtcccccagaaaggtctgggctgcgcgtgcttcaggtaacctcccttgaccttcaggagaacgagaaggctgcctgatcagagagtccctgaagaagattctgtggctacaggcttcagcagagtgtgagggagaccccggttatttcctcagctatttccaccaaatcctcctgtctttcgtggccaacaccccaggcaaggcttggggcccccgtctgctgctggacgcagagccatgaagaagaagttagtggtgctgggcctgctggccgtggtcctggtgctggtcattgtcggcctctgtctctggctgccctcagcctccaaggaacctgacaaccatgtgtacaccagggctgccgtggccgcggatgccaagcagtgctcgaagattgggagggatgcactgcgggacggtggctctgcggtggatgcagccattgcagccctgttgtgtgtggggctcatgaatgcccacagcatgggcatcgggggtggcctcttcctcaccatctacaacagcaccacacgaaaagctgaggtcatcaacgcccgcgaggtggcccccaggctggcctttgccaccatgttcaacagctcggagcagtcccagaagggggggctgtcggtggcggtgcctggggagatccgaggctatgagctggcacaccagcggcatgggcggctgccctgggctcgcctcttccagcccagcatccagctggcccgccagggcttccccgtgggcaagggcttggcggcagccctggaaaacaagcggaccgtcatcgagcagcagcctgtcttgtgtgaggtgttctgccgggatagaaaggtgcttcgggagggggagagactgaccctgccgcagctggctgacacctacgagacgctggccatcgagggtgcccaggccttctacaacggcagcctcacggcccagattgtgaaggacatccaggcggccgggggcattgtgacagctgaggacctgaacaactaccgtgctgagctgatcgagcacccgctgaacatcagcctgggagacgtggtgctgtacatgcccagtgcgccgctcagcgggcccgtgctggccctcatcctcaacatcctcaaagggtacaacttctcccgggagagcgtggagagccccgagcagaagggcctgacgtaccaccgcatcgtagaggctttccggtttgcctacgccaagaggaccctgcttggggaccccaagtttgtggatgtgactgaggtggtccgcaacatgacctccgagttcttcgctgcccagctccgggcccagatctctgacgacaccactcacccgatctcctactacaagcccgagttctacacgccggatgacgggggcactgctcacctgtctgtcgtcgcagaggacggcagtgctgtgtccgccaccagcaccatcaacctctactttggctccaaggtccgctccccggtcagcgggatcctgttcaataatgaaatggacgacttcagctctcccagcatcaccaacgagtttggggtacccccctcacctgccaatttcatccagccagggaagcagccgctctcgtccatgtgcccgacgatcatggtgggccaggacggccaggtccggatggtggtgggagctgctgggggcacacagatcaccacggccactgcactggccatcatctacaacctctggttcggctatgacgtgaagcgggccgtggaggagccccggctgcacaaccagcttctgcccaacgtcacgacagtggagagaaacattgaccaggcagtgactgcagccctggagacccggcaccatcacacccagatcgcgtccaccttcatcgctgtggtgcaagccatcgtccgcacggctggtggctgggcagctgcctcggactccaggaaaggcggggagcctgccggctactgagtgctccaggaggacaaggctgacaagcaatccagggacaagatactcaccaggaccaggaaggggactctgggggaccggcttcccctgtgagcagcagagcagcacaataaatgaggccactgtgcc

SEQ ID NO: 12291 - DNA, 2834 bp, Homo sapiens
gactcacgccttcgccgtagcatctttcgcagcggaccgaagagaagaaaagtaggccagagccgaactctcttcctgccaagatgtctattggtgtgccgattaaagtactgcatgaggccgagggccacattgtgacatgtgagacgaacaccggtgaggtatatcgggggaagctcattgaagcagaggacaacatgaactgccagatgtccaacatcacagtcacatacagagatggccgagtggcacagctggagcaggtatacatccgtggcagcaaaatccgctttctgattttgcctgacatgctgaagaacgcacccatgttaaagagcatgaaaaataaaaaccaaggctcaggggctggccgaggaaaagctgctattctcaaggcccaagtggccgcaagaggaagaggacgtggaatgggacgtggaaacatctttcaaaagcgaagataattttctaagttgaacagaactttgtccttttttctttcaggctctggctccgctactgcatcgtgtgcttctgtccaagaggcagagagactgaaactatctgctgccgcctggattctcccagagattgcctggaacaccagctcgggtcctcgcacaccatcctgcgggtgcagcccagaactgtcttctgaggaagaggtgctctcctgggcccccactgtccccaggcctcagcagcaaggcaagtgaggtgctgccgtcatccaggctggacagttcagtgatttgcctgaggccccacagcaggagaacgagaaggctgcctgatcagagagtccctgaagaagattctgtggctacaggcttcagcagagtgtgagggagaccccggttatttcctcagctatttccaccaaatcctcctgtctttcgtggccaacaccccaggcaaggcttggggcccccgtctgctgctggacgcagagccatgaagaagaagttagtggtgctgggcctgctggccgtggtcctggtgctggtcattgtcggcctctgtctctggctgccctcagcctccaaggaacctgacaaccatgtgtacaccagggctgccgtggccgcggatgccaagcagtgctcgaagattgggagggatgcactgcgggacggtggctctgcggtggatgcagccattgcagccctgttgtgtgtggggctcatgaatgcccacagcatgggcatcgggggtggcctcttcctcaccatctacaacagcaccacacgaaaagctgaggtcatcaacgcccgcgaggtggcccccaggctggcctttgccaccatgttcaacagctcggagcagtcccagaagggggggctgtcggtggcggtgcctggggagatccgaggctatgagctggcacaccagcggcatgggcggctgccctgggctcgcctcttccagcccagcatccagctggcccgccagggcttccccgtgggcaagggcttggcggcagccctggaaaacaagcggaccgtcatcgagcagcagcctgtcttgtgtgaggtgttctgccgggatagaaaggtgcttcgggagggggagagactgaccctgccgcagctggctgacacctacgagacgctggccatcgagggtgcccaggccttctacaacggcagcctcacggcccagattgtgaaggacatccaggcggccgggggcattgtgacagctgaggacctgaacaactaccgtgctgagctgatcgagcacccgctgaacatcagcctgggagacgtggtgctgtacatgcccagtgcgccgctcagcgggcccgtgctggccctcatcctcaacatcctcaaagggtacaacttctcccgggagagcgtggagagccccgagcagaagggcctgacgtaccaccgcatcgtagaggctttccggtttgcctacgccaagaggaccctgcttggggaccccaagtttgtggatgtgactgaggccagctctggggtctcggcaggtggtccgcaacatgacctccgagttcttcgctgcccagctccgggcccagatctctgacgacaccactcacccgatctcctactacaagcccgagttctacacgccggatgacgggggcactgctcacctgtctgtcgtcgcagaggacggcagtgctgtgtccgccaccagcaccatcaacctctactttggctccaaggtccgctccccggtcagcgggatcctgttcaataatgaaatggacgacttcagctctcccagcatcaccaacgagtttggggtacccccctcacctgccaatttcatccagccagggaagcagccgctctcgtccatgtgcccgacgatcatggtgggccaggacggccaggtccggatggtggtgggagctgctgggggcacacagatcaccacggccactgcactggccatcatctacaacctctggttcggctatgacgtgaagcgggccgtggaggagccccggctgcacaaccagcttctgcccaacgtcacgacagtggagagaaacattgaccaggcagtgactgcagccctggagacccggcaccatcacacccagatcgcgtccaccttcatcgctgtggtgcaagccatcgtccgcacggctggtggctgggcagctgcctcggactccaggaaaggcggggagcctgccggctactgagtgctccaggaggacaaggctgacaagcaatccagggacaagatactcaccaggaccaggaaggggactctgggggaccggcttcccctgtgagcagcagagcagcacaataaatgaggccactgtgccaggctccaggtggcctccc

SEQ ID NO: 12292 - DNA, 2006 bp, Homo sapiens
agaagagcgggctaagacgccggaggaggtggcggcggctgggagaggcgagggttctggccgattttagcatcgaaactaggagaaataagaatggctgtagaggaacttcagtctataataaagagatgtcaaatcctagaagagcaagactttaaagaagaggattttggcctatttcagttagctgggcaaagatgcatagaagaagggcacacagaccagctattagaaattattcaaaatgaaaagaataaggtcatcatcaagaatatgggctggaatctcgttggtcctgttgttcgatgccttttgtgtaaagataaagaggatagtaaaagaaaagtttattttttgatctttgatttattggtaaagttatgcaatccaaaggaattattgttgggtttgcttgaactgattgaagagccctctggaaaacagatatcccaaagtattcttcttttgcttcagccattacaaacagtgattcagaaacttcataacaaggcatattcaattggattagcattgtctaccctttggaatcagctatctcttcttcctgttccatactcaaaagaacaaatacaaatggatgactatggcctttgtcagtgttgcaaggccttaatagagttcactaagccttttgtggaagaagtcattgataacaaagaaaactcactggaaaatgaaaagttaaaggatgaattactgaaattttgtttcaaaagcttgaaatgccctttgctgacagcacaattctttgaacagtctgaagaaggtggaaatgatcctttcaggtattttgcatcagaaataataggttttttatcagcaattggacaccctttccccaaaatgatttttaatcatggaaggaaaaagagaacttggaattaccttgaatttgaagaagaagaaaataaacagttagcagactcaatggcttctctggcatatctagtatttgtacagggcatccatattgatcagcttccaatggtcttaagcccattgtaccttttgcagtttaatatggggcacattgaagtctttttgcaaagaacagaagagtctgttatctccaaaggattggagctgctggagaatagtttattgagaatagaagacaatagtctactttaccagtacttagaaatcaagagttttcttactgtacctcagggcttagtgaaagtaatgacactttgccccattgagacactgaggaaaaagagtttagctatgcttcagctgtatattaacaagttggattcacaaggcaaatatacattatttaggtgcttattgaatacaagtaatcactcaggtgtggaggcttttattattcaaaatatcaaaaatcaaattgacatgtcattaaagagaacacgtaacaacaaatggtttacaggaccacagttgatttcccttcttgatttggtactttttctcccagagggtgcagaaacagatttactgcaaaactcagataggattatggcttcattaaatttattgaggtatttggttatcaaagataatgaaaatgacaatcaaactggattatggacagaacttggaaatattgagaataatttcttaaagccacttcatataggacttaatatgtcaaaagcacattatgaagcagaaattaaaaatagccaagaggcccagaaatctaaagatctttgttctataactgtaagtggagaagagatccctaatatgcctcctgaaatgcagcttaaggtcctgcattcagctcttttcacatttgatttgattgaaagtgttctagctcgagtggaagaactcattgaaataaaaacaaagtctacctctgaagaaaatattgggataaagtgaaagttccatttcctaaataaaaactaataaaatatagtactttccattatgattcatttaatacctttataaaaaatttttctgtaaaaatttactgcttgaaaaataaatgtagcttttctcattta

SEQ ID NO: 12293 - DNA, 23728 bp, Homo sapiens
ttgtttcaaaagcttgaaatgccctttgctgacagcacaattctttgaacagtctgaagaaggtggaaatgatcctttcaggtattttgcatcagaaataatagtaagtacagctaatttaatctgctataatcttaaatgttatcccactatattctcagtactgcacatgtaaattgatacattcattaataaagaaatgtgtattttttgtagaacacacataaacaaaagatggaaaataaaacagcaataattttattatccaaagataaatattaacatcctccaggcttttttcttatatacttatttataataatacatatatataaatttttcaaagattttatatatatatataatcttgtaatctacctttttcctcttcaacagtatattatgaatatttttccattggcttaatagtgttccatggtatggacttagtataatgtatttcacctgtgccatatagttcaacatttggattgtttctaattttccattattgtaggacaactccaagttttctttttttaactgttaagtctatgataagtaacctagtaattaaatttttgcatacttttcaaattatttccttaaaactcctagagtggaaattccatgccctgtgataaatattttcaaaatagctccatatttaagtaaattttattttaaaagcaatttggctttatgcatcaatagtattttaaaatgtgctcagattctgtattagagaaataatctgaaatattaaaaaatttattttaagttgatgtttctgaatttcaaaagagaaagtccatgtggctgtgtagttttcttcagccatgttcagctacatgagtgcaggtgcagcataggagtaacatttggttgaattagggtggggttttaagaacagggtaagttgtagagagcaagaggggggcaagggattgagcatgtatgtaaggtgatttctttttcaattatactttaagttctagggtacatgtgcacaacgtgcaggtttgttacataggtatacatgtgccatgttggtttgctgcacccatcaactcatcatttacattaggtatttgtcctaatgctatccctcccccagccccccacgccccaaccagccatggtgtgtgatgttccccaccctgtgtccatgtgttctcattgttcaactcctaccaatgagtaagaacctgcggtgtttggttttctgttcttgtgatagtttgcttagaatggtggtttccagcttcatccatgtccctgcaaaggacatgaactcatcctttttaatggctgcatagtattccatggtatatatgtgccacattttcttaatctagtctatcattgatggacatttgggttggttccaagtctttgctattgtgagtagtgctgcaagaaacacacatgtgcatgtgtctttatcatagaatgatttataatcctttgggtatatacccagtattgggatggctgggtcaaatggtatttctagttctagatccttgaggaatcgccacactgtcttccacaatggttgaactaatttacactcccaccaacagtgtaaaagcgttcctatttctccacatcctctccagcatctgttgtttcctgactttttaatgatcaccattctaactggcgtgagatggtatctcactggttttgatttgcatttctctgatgaccagtgatgatgagcattttttcatgtctgttggctgtataaatgtcttcttttgagaagtgtctgttcatatcctttgcctactttttgatgggattttttttttcttgtaaatttgtttaagttctttgtagattctggatattagccctttgtgagatgggtagattgcaaagatttttctcccattctgtaggttgcctgttcactctgatgatactttcttttgctgtgcagaagctctttagtttaattaatcccatttgtctattttggcttttgttgacattccttttggtgttttaatcatgaagtccttgcccatgcctatgtcctgaatggtattgcctaggttttcttttagggtttttatggtgttaagtcttacatttaagtctttaatccatcttgagttaatttttgcataaggtgtaaggaagggatccagtttcagctttctacatatggctagccagttttcccagcaccatttattaaatagggaatcctttccccattgcttgtttttgtcaggtttgtcaaagatcagatggttgtagatgtgtagtgttatttctgaggcctctgttctgttccattggtctgtatatctgtttcggtaccagtaccaatctgttttggttactgtgtccttgtagtatagtttgaagtcaggtagcttgatgcctccagctttgttcttttggcttaggattgtcttggctatacgggctcttttttggttccatatcaactttaaaatagttttttccaattctgtgaagaaagtcagtggtagcttgatggggatagcattgaatctgtaaattactttgggcagtatgaccactttcatgatattgattcttcctattcatgagcatggaatgttcttccatttgtttgtgtcctcttttattttgttgaacagtggtttgtagttctccttgaagaggtccttcacatcccgtgtaagttggattcctagctattttattctctttgtagtaattgtgaatgggaattcactcatgatttggctctctgtttgtctattattggtgtataggaatgcttgtgatttttgcacattgattttgtatcctgagactttgctgaagttgcttagcagcttaaggagattttgggctgagacgatggggttttctaaatatacaatcatgtcatctgcaaacagagacaatttgacttcctcttttcctaatcaaataccctttatttctttctcttgcctgattgccctagccagaacttccaacactgtgttgaataggagtggtgagagagggcttccttgtcttgtgccatttttcaaagggaatgcttccaattttttgcctattcagtatgatattggctgtgggtttgtcataaaagctcttattattttgagatacgttccatcaatacctagtttattgagagtttttagcatgaagggctgttgagttttatccaaggccttttctgcatctattaagataatcatgtggtttttgtcattggttctgtttatgtgatagattacgtttattgatttgcatatgttgaaccggccttgcatcccagggaagaagccgacttgattgtggcgcataagatttttgatgtgctgctggattcggtattttattgaggattttctcatcgatgttcatcaaggatattgccctaaaattctctttttttgttgtgtctctgccaggctttggtatcaggatgatgccggcctcctaaaatgagttagggaggattccctctttttctattgattggaatagtttcagaaggaatggtaccatctcctctttgtacctctggtagaattcggctgtgaatctgtctggtcctcgactttttttggttggtaggctattaattattgcctcaatttcagaacctgttattggtctattcagagattcaacttcttttaggtttagtcttgggagggtgtatgtgtctgggaatttacccatttcttctagattttctagtttatttgcatagaggtgtttatactattctctgatggtagtttgtatttctgtgggatcagtggtgatatcccctttatcattttttattgcatctatttgattcttctctcttttcttctttattaatcttgctagaggtctatgtattttgttgatcttttcaaaaaagcagctcctggattcattgattttttttgaagggttttttgtgtctctatctccttcagttctgccctgatcttagttatttcttgccttctgctagcttttgaatttgtttgctcttgcttttccaattcttttaattgtgatgttaggatgtcaattttagctctttcctgctttcttttgtgggcatttagtgctataaatttccctctactcactgctttaaatgtgtcccagagattctggtatattgtgtctttgttctcattggtttcaaagaacatctttgtttctgccttcatttcgttatgtacccagtagtcattcaggagcaggttgttcagtttccatgtagttgtgcagttttgagtgagtttctgaatcctgagttctaatttgattgcactgtggtctgagatacagtttgttgtgatttctgttcttttacatttgctgagtagtattttactaccaattatatggtcaattttagaataagtgcgatatggtgctgagaagaatgtatattctgttgatttggtgtggagagttctgtagatgtctattaggtccacttgttccagagctgagttcaagtcctggatatccttgttaaccttctgtctcattgttctgtgtaatattgacagtggggtgttaaagtctcccattattatcgtgtgggagtctaagtatctttgtaggtctctaaggacttgctttataaacctgggtgctcctgtattgggtgcatatatatttaggatagttagctcttcttgttgaatttatccctttaccattatgtagtggccttctttgtctcttttgatctttgctggtttaaagtctgttttatcagagactaggattgcaacccttgcttttttttttttgctttccatttgcttggtagatctttctccacccctttattttgagcccatgtgcatctttgcatgtgagatgggtctcctgaatacagcacaccaatgggttttgactctttattcaatttgccagtctgtgtcttttaattggagcatttagcccatttacatttaaagttaatattgttatgtttgaatttgatcatgtcattatgatgatagctggttattttttctgttaattgatgcagtttcttcatagtgtcactggtctttaccatttggcatgtttttgcagtagctggtaccggtcgttcctattcatgtttagtaaatccttcaggagcttttgtaaggcaggcctggtggtgacaaaaatctctcaccatttgcttgtctgtaaaggattttatttctccttcacttatgcagcttagtttggctggatatgaaattctgggttgaaaattcttttctttaagaatgttgaattttggcccccactctcttctggcttgtagggtttctgctgagagatctgctgttagtctgatgggcttccttttgtgggtaacctgacctttctctctggctgcccttaacagtttttccttcacttccaccttggtgaatctgacaattatgtgtcttggggttgctcttctcaaggagtatctttgtggtgttctctgtatttcctgaatttgaatgttggcctgccttgctaggttatggaagttctcctggataatatcctgaagagtgttttctaactttgttccattctccctgtcactttccggtgcaccaatcaaacatagatttggtcttttcacatagtcccatatttcttggaggctttgttcgtttctttgcactcttttttctctaatcttgtcttcttgctttatttcattaattggatcttcagtcactgataccctttcttccacttgatcaaatcggctattgaagcttgtgcatgcgtcatgaagttctcgtgccatggttttcagctccatcaggtcatttaagtgcttctctacactgtttattctagttagctatttgtcttaccttttttccaggtttttatcctccttgtgatgggttagaacatgctcctttagctcggagaagtttgttattaccgaccttccgaagcctacttctgtcaactcatcaaactcattctccgtccagttttgttcccttgctggtgaggagctgtgatcctttgaaagagcagaggcgctctgttttttggaattttcagcttttctgctctggtttctccccatctttgtggttttatctacctttggtctttgatgttggtgacctacagatggggttttggtgtagatgtcctttctgttgatgttgatgctattcctttctgtttgttagttttccttctaacagacctctcagctgcaggtatgttggagtttgctagaggtccactccagaccctgtttgcatgggtatcaccagtggaggctgcagaagagcaaatattgctgcctgatccttcctctggaagctttgtcccagaggggcacccgcctgtttgaggtgtctgtcggccccctactggcaggtgtttcccaatcacgctacgcgggggtcagggacccgcttgaggaggcagtctgtctattatcggagctcgaatgctatgctgagagaaccactgctctcttcagagctgtcagacagggatgtttaagtctgcagaagctgtctgctgccttttgttctactgtgccgtccccagaggtagaatctatagaggcagtaggccttgctgagttgcggtgggctccgcccagtttgtgcttccaggcctctttgtttacactgtgagctactcaagcctcagcaatggcggacaccccttcccgtctagctgcagcctcgcaggtcgatctcagactgctgcgctagcagtgcgcaaggctctgtgggtgtgggacccaccaagccaggcatggcagggtatctcctggtctgccggttgctaagactatgggaatagcacagtatttggtcaggagtgtactgtttctccagaaacagtctgtcacggcttcccttggctaggaaggggaaattcgctgacccctcgcacttcccgggtgaggcaatgccccgccctgcctcagcttgccctccgtgggctgcacccactgtccaaccagtcccagtgaggtgaaccaggtacctcagttggaaatgcagaaatcactggtcttctgcgtcgatctcgctgggagctgcagacctgagctgttcctatttggccatcttggaagtgactcctttttttttttttttttttttgtgacagagtctcgctctgttgcccaggctgtcgttcaatggcatgatctcagctcactgcaacctccacctcctaggttcaagcaattctcctgcctcagcctcccaagtagctgggattacaggcacccgccaccacacctggctaattttttgtatttttagtagagttggggtttcgccatgttggccaagctggtctcaaactcctgacctcacgtgatccacccgcctcagcctcccaaagtgcagggattacaggcgtgagccactgtgcccagccgcaaggtgattttaatgtacaaagtgactttaatgatggacatagaatttaagctgggtaaggagtaaagttaggacatgcaagagacagtgaaaaggtgattggatcattaggttgtagaacctggtgtgggtgacagatgtttggagttaggttactaaaaggggtgaactgaaaaaataggtgtaaagaataggatgcttgaaaatagtattatggaaagattatagttactagtatcaatgtctggggtgtgaccatgagagggtgttctaaaggagaggatagaggcaaaggtcattgggctagagaaaatgaaatacttgagatttcagagtatcagaagatctttggttgtacatttaaatcacacagaattataatgttggaaagccatgtgatggggtgaccttggggtctactaactgcaacaaggaggggtagaaatggtaaagtcataaaaaatgagtttcagagttgagggatttttagagaggatggggagagaatggtgtagaagcagcaaggagaacagatgtattcccaggctcagtggtacaatgggtatagatgaaaaatacagtagtcttttgaagggttgcagagaaagcagctgttttcagatgagagccaattttaatttaggagagatggaaaaaggggtcagatgaagggatgctagaagtttatgggaataaattctgaagatgagagatgacttggtgactgatataattaggaatacataatttaataaggttaatgctgatggtcacgataatagtgaagaggctgtgagggatgaagtaggagaggtgacgggttttctctggagcacacaaaagtctgggggctcttcattgttaccagtgctagagcacagtatcatcttctggaggtagtataagcaccatcacatatgatatgtattttgagaagacaactatgaaagttggaaactattaaaggaaatctggtgatgtagaaaaaccaaactcagtttctcctactatagtcataacaagtttctgacaccagatgtatggagttccctgccctgccccctgcccttcacggcaagcaagcaagcagttgtacaacggacaccaattgggtgtcctctaattcaattccaacgttacctacctggagatagtgtcagatttcacaggttgagggctaaatacctcaagactgcccccccttccaatgccagtctcaagccctaggatgttttacctgtgctctaactgactggcaataaatcaggattcccaggaccccctccttgggtttgattaatttgctagattggcttacagaactcagggcactgcttacttacatttagtggtttactataaagaatattaccaaggatacagatgaagagatgcatagggctaggtataggggagggggcaccaagtttccataccctgcctggatgcaccaccctactggaaacttcgtgcgttcagcttccagaagctttctgaatccaatcattttgggtttttatggaggcttcattatgtaggaatgattgattacatcattgaccgttggtaatcaacttaatattcagcccctttcccttactggggtgggatgggggtagggctgtgggactgaaaggtccagccttctaatcacagggttggttcccttggcaaccagctcccatcctgaggctatccaggagacgcagctatcagtcaactcaatagcataaagacacttatcactttggagattccaaggattttaggagttatatcccaggaagtgggaacaaagagcaaatatatatgtcacagtatcacagatgttaaatctgggagtgatgtaatcaaactgtgtttaggattcatcactttaaaggaagatgactaactgggataaaattggaagtagggaagccttgggagttaagtaagcaatgatgggagcctgagtatagatgtatggatattttttgtttgtttcctttttttaattgactaaatttatgacacattctgttagtagggatatagttttaaagatgaagaaagggcagatttgagaactttatagtaggtaaaattggcaaaatttggtcattgattggatttagaataaaacatggatgagggtttttgcttggataactgggcagatgaaggtgccaatacttgagatagagaatacagagcaagaatctgggggtcttgtgcctttaaaacaaatgtattgtaaaaatttacaaacattcagaaaagtactaaaaataatctagcacatgcccatgtacccatcacccagcttcaataattatgaacattttgccaattttgttttatctgtcctcctccttttcttgctgtagtataacaagtcctaaacataattcatctgtaagtctttaaggatgcttccctaatgacaagggcttttttaaaaaaacaaataaccaccaggctattatgacacctaacaagattttattaccttttgttaaaattttttgagacagggtttcactcccattgcccaagctggagtgaagaggcatgatgtcggctcactgaaacctctgcctcccggactcaagcagttctcctgcctcagcctcccaagtagctgggactgcaggcacacatcgtcccacctggccaatttttgtattttgggtagagatggggtttcaccatgttacccaggctggtctcgaactcctgggctcaagcgatctggctgcctttggcctcccaaagtactgggattacaggcgagagccactgttcccagcctaactcctaacaagattaacaataattttttaatatatatctaataaccagagagagaataggtttttaaggaatttaaaatataatattttaatatgtaaatatatgtatatttaatatagaattatatgtaaatgtgtatatatattttttgagatagggtcttgctctgtggcctaggctggagtgcagtggcacaaccatggctcactgcagcctcaacctcccaggctcaagtgatccttccacctcagcctcctgagtagctgggacttacaggcataccccagcatgcctggctaatttaaaatttttgttttgtaaaggtgaagtctcactatgttgtacagactggtcttgaactcctgggctcaagtgatcctcccaccttggcttcccaaagtgctggaattacaggtctgagccaccatacctggccaggagatactttgaatgagagggggtgagattacctaaagaggtgacaagagaaaagggctcaggagtgaactctagagagtaccagcacttaaaatgagcccaagaaggaagtcggaagtggtagaaatacacagaaactggtgtagtagagttttagaaggatagaggtgatcagtactgttaaatgcatagaggtatgctgaaaagcatctgtaggatttaggaagtaagatggcattggtaatcttagcaagaacagtgtaagtacagtgttggagacaaatcagagtggagttgataaaagaatgaatgacagatgagaaaaaggagatgactagtgtaagctattctttaaaagaggttggatgaataaggaaggagaggtaatagctagaagacatgagctaagggtaggaaggtaatggaggtgggaagacttgagcatgtttatagctgttggggtgcaaactgttgagggaaaaatacaagtgtttatgagataactgaaataatgtggcttatgagcaaatggctggacatagtatcaaggccataaggaaagtcctagacaggaagaactagtgggtatcaaggtaagaaaacatgttgagaaatttgtagcaggaatggaatcttacaattgaggggagtcaaacccactggcctcagatttctaggtgaaggagagatgatctcttaataatgaggaggtagaaatgggcattgagtaaaagggcttaaggaaactggtaaaggtttggaatactgaggggaaaggaaagagatggtggaagaccacggaagcatgagtcagtagtactgagcactcaatggtgcttggaaaccacaactatagtggtaacagtctgtatttttttatccagcaatactcagctccctgtgtgtagaagcagagaaggtagattgcagttatttttccaaggctggcattttactgggtagatactgctgaaggaaatacagggtgcagatagttcagctggtcaataatccatgattcaggttggatagggaaagaaggggggttaggagggaatgcctaggtaggtcaaaatgtaggaatcacaggactggagaagtcagaagtagaaaagcagattgctaggagagacaggatgacagattttggtcagaaaatgggatattggagtttaaagtatcaaatacagaatagttccagatgttcagagatccagcatgggattaggtactgaaatggattagaactaaaagtcactagaatttagaaattgagaaccatgagagtggatgcaatgacttgttgcttgattgaaaaataaattaataataataaaggaccatgagactagcctgttataggggttatctccatgaacattgaattttcccaggatcatagcaggaattgggtagagaaaaagattatgagaaggtgccagagtcttcagtgaatgtcaggaaattaccaggaagtcagcatatgacagagaaaaggacagtatgttatctgcatcaaaggaaaatgtgcttttgttgaaaagtacagaaaaagccaatactacaatactgtgctaagcccctacctgtactcctctacccaacagctgcattccaggccctgtggtataaaaggtgtgagaatgagcatctcccaccagaaatcagacaggtttagttaaagcagtgaggcagaacaagcatcctatgaagagactgaggatgtaggtgagtggttctaaaatctcagtagaaggaacattgcaagtagaaagagccagcagtaaggatgcacgtagcagtctagaagtagaggtgagaccagcttggagatgaaatgaggagatgtcttctgttctgtgctggagaagtactggtaagtgtggtgtggttgggattcacaggcctcagccatcctcactttggtacaagttattttggtacagaactactagaatgtcccaaaggctgtagtacaggaacatttctgaaaggacaaaagctgccatgaatattgagaaattgtatggtgccaggtacagcctggatctgagcaagactgctggatggtgtgtggatagatagtgaaggcccagatttgggaacagattggatctcagatatccagagcagcactgtagaatctagttgcatataataatgttttaaaaagggtatcttaggctgggcacggtagctcccgcttgtaggcccaggcctttgggaggccaaggtgggcagatcacttaagcccaggagttcaagaccagcctgggctgcatggcgaaaccccatctctataaaaaataaaaaaaataaaaaaaaaatagcgggcatggtggcatgtaccagtagtcctagctactcaggagactgaggagggtggattgcttgagcctggggaagtcaaggctgcagtaagccatgatcatgccactacactccagcctgagtgacagagtgagaccttgtcgccaaaaaaaaaaaaaaaaaaaacagggctaccttactctggaaaaaacacatgtagcattggctgaataaagaaatggagcttcatgattaaggacatttggaatcagagtgcaataaactttttgtcttgtagctataaccagaatgcatggctttgaaaatcactgcagcagtatatatttagcatctggtcgctgaatagcagtctcttgtgactgaggatgattttccatggttcctttttgtattctgaaatgactaatggaaccatctgggatcagcagattttaagtccctgaaggctggaaaagacttatacttggctttataattccccacaaagtcaggcccagcaccttgcacttaagtgtttattgaataaaagagtgacttgtgtggaagttattcattctgctttagctgtttttgtcattcattcccttttaactcttgtagtttgttgtgactttaactttcttacgctttttttgtggagctgctcgataaatatttgacataggtattatgtcattttatggctcatccagtgtcacacaagtagtaaatggtagagccaaaactcaaaatcaatgtcagtggattctgaaggtaggtgctttctggtacgctagaattagtaccagtataagaggcataggagtgatcttgtttcctgagcggaaagctttatttagccctgtggtcctacccactcatgcaaggatgcttctctttctcgtctcacatgagaaccctgatgactgagagatcaacagtgtttcctcaggcccagctgccctgcccagcgttcctgcatcccactctctacaggcacaatgttagtggagcattgttcctagagtattcttcatcttagttgctttacccttgcttcatatatttgtatgtctcacgtttcagattgctctcaaatatccctgaagcacttttttaaaaaaaattgtggtgaaatatacataaaattcatcattttaaactttttaaactatgattctgaattaatttagaatacttctgatgtataaaatgctatgtaaaatacgattttgctgttggcttctgtattagtttttcattgctgtataacaaattcctgcaaacttagcagtttaaaacagcatacctttgttatctcacagtttctatggatcaggagtccagccacagcttaattgggtcctctgctcagggtctcattgggctacaggccagttgttgactgggtctgtagtcttatcagaagcttaactggggaaagatccactttcaggtttcctccgctggcagaattcatttcctctaagctgtaggactgaggtccccattttcttgctggctgtcagccagggaccacatttagcttctaggagctgcctgtagttggtcccttgccatgtagttctgtccatgagccttctcataacatggcagcttagttctttaaagccagcaagggagagagtcagagagcaaagtttctgactctcagggaaggcctggaccccctttaaaaatatacctgattaagttagggccacccaactcaaaatctactgatttgggaccttaattacatctgcaaaaaccccttcacttttgtcatataatctaatcatgggagtgacatcttggcgcattctgttggttgaaagcaagtctcataggtcccactcacgctcaaagggagtgattacacctccccttggtgagaatgtggagtttgaatacacggggtggggggcattttagagtctgtgtgctatggtttccttttttatccatttcatagggttttttatcagcaattggacaccctttccccaaaatgatttttaatcatggaaggaaaaagagaacttggaattaccttgaatttgaagaagaagaaaataaacagttagcagactcaatggcttctctggcatatctagtatttgtacagggcatccatattgatcagcttccaatggtcttaaggtaagagttagtgtttggtttattcatgtattctaaaaggaatttcataaaattctcatttatctaatgtccaatatatgcatattaacacactaatacattttaaataaatagtaaaggctatttttaataagaatgatcccagctataatctgttaaagatagcagtagacaagtaatgaaagtggggagtgttgaaataggtgtaagggaatggtggggacaagaatcagaagatgataaacagggcttggttttgaagcttttgagaccaccctggaactagccaggtacccaggggtatcatcatcttttcactggattactgctgtaatcctgagtggatttatatatctacttttacttccttttaatttaacacattctcaacataccagaaagcgaagccttaaaagaagtcccttactgaaaaccctccagtggctttttattgctttaagaataaagtcttaatgcctttgcataacttctgagacaaacttgtgcctggtctggtccctgcttaattgacctgattcatctcctaccacctttcctcttgtttactatgctccagtgacacagaccttcttttgtttctagtttaaatgttatgaattttcctatttggcctttgtatatgcttaaaattctctttatccttaaatgtcactttctgaagaaagccttcactcaccacccaatttaggttgaatccttctattataattaccttgaccttgtcttcttttcccacaatgtttattaaaattatttttaaaatatataattttataatgtaatatcttctggactttgagttctatgataataaggattgtgtatttgtcttataggcattgggtatttgtgtgagtttgtgcatttatatatgaatatagctaggagtacattcgtatgtaaatgttgaaatactggctatcatttgcatgttcaccatgtatgaaacattatgctaataactttatatgcattatctcatccttataataagcctgtgaaatagagcattctctcattttacagatgaaaataacaggcttagacaagttaatataccactgaagatctaactactttgtggcataggtgggatgcagatagctctgtctgaccccagagcctatactcttaagcatcacattctatcaccaaaataacttatacagcatatgtatattaacttgctagggctcctgtaaaaaagtgctaccaactggatggttgaaataacagaaatagtttgtctcatagttctggatgctccttctgagggttgtgaaggagaatcttctccatgcctctctcctggcttctggtgatttgctcacaatctttgatggtctttggcttgtagatgcattatcctgttctctgccttcatgttcgtatgctgttctccctgtgtgcttgtgtctgtctccaaactttccttttacataaggacaacagtcatattggattagggcccaccctaataatctcattttaaattgattacctccataaccctatctccaaataaggtcaaattctgaggtactagaggttaggactccaacatatcttttttgggggagatacaattcaacccataacaatatgtatgtgtgtacatatctctgtgtgtgtgtataatatatatatttgttttgtttctattttagcccattgtaccttttgcagtttaatatggggcacattgaagtctttttgcaaaggtaagatcgtttagatggtatctcaaaatgaaatagtagtgttaaaatagtccttgttaagatcagcggagactgccttttctttgctaagctctaattaattaattggttattttataaaacagcgaggcaaataattcacgagagagacagaaatgagtcaaggaggttttacaccaaagtctgttttattttaaacttaagacagtattaagattttgtcttaagggcttttacagtcatctgtttctaaggtttcttctcttactccaaaagttggtaaattaaaacacctctaccccactgcatcctcctccatcttaaggaagggcagtcaataaaagaagttcttccgtatttttccttcatggacacagtctgtgaattgcatcaaaaggaaggaggtgtcttgacttccaccttttataatttagattattgacagtgatgtcattcaattacaacttttctcatttgaggtgctaagcagcaggactttctatttaaaaaaaaaaaaaaaaagccaggcacggtggctcacgcctataatcccagcactttgggagaccaaggcgagaggattgcttgaccccaggagttcgaaaccagtctctctctctacaaaaaatagaaaaaattagccaggagtggtggcgcctgcccgttgtcccagctacttgggaggttgaggtgaaagaatcacctgtgcctgggaggtctgggctgcagtgagcagagatcatgccactgcagtccagcctgggcaacagagtaagaccctgtcgcaaaagaaaaaaaaaaaaaaaaggaaattacagagtaacaggtatacataatttctagacagaaattaaagaatttcacagaactatatgctttgttttctttcactataacatgtaacatgtttaaattatcccctgagatcagttagggctttgcaattatcctctatgaacactagtgacagtttatcagtcccatctcttaccaggtgaaggaagatttgtaacatggcaatgtccaaagcttcagcatacaaggcaggaatttccaagggtctcctggcacaagtagttactaattctgtaaatttgctgtattatgtatgttttaatgattttatattcattacatttagtttctgttattcatacagtgataatatgtattgttttgaatctaagtcctaaattcttgagatttccaaactgcagagtcattgagtctttttttgaataaaaagaattggaaagattttacagaataatcaactggaatatatagcattggttatatcaggtttagttagtttcttagcacttgctgttgaagatctattgttttgaagttaggaaataatccctgagtagatttattttggtcagatttagtggccttagccaaaccgaaagacagatcaaagatggattaaaacttttgatcaagttcttcaacagaatttctccttaatgatatgcattttaaaagtgttaaaatttcagtttttgctgtatttttcataagatgaagtatcattctaaaatagtttacaaattcatgataaattttaatattatttttcagaacagaagagtctgttatctccaaaggattggtaagatgtttgttcccattataacttaaatacatagttatgtcaacaaataacagctgttgacttcactatatatgtatctgcatatattttaatctgtaggagctgctggagaatagtttattgagaatagaagacaatagtctactttaccagtacttagaaatcaagagttttcttactgtacctcaggtaaataaaatatgtattctaatattgaaaatagccctttgcctgttctgaacttaaagtaaggtcttttctgattcctttcccactcttttctctgcaacctttgaaaactctggtgtaatgctgtccagtagaactttgacaatatgaaagccactagccaaactgaacacttgaaatgtgactaaggaactattttttttttttttgaggtgtagtcttgctgtgtcgcccaggttggagtgcagtggtgctatctcagctcactgcaagctccacctcctgggttcattccattctcctgcctcagcctcccgagtagctgggactacaggcgcccgccaccacacccagctaatatttttgtatttatagtagagacggagtttcactgtgttagccaggatggtctcgatctcctgacttcgtgatcagcctgcctcagccccccaaagtgctgggattacaggtgtgagccaccacacccagccggaactaagtttcaaatttaaattttaatttatttaaacacgaatagctattagaggccaccattattgatagcacagcatccagtagaaaagcataactttcttcttttaacactttatttctgtagggatcttggaaaatgaagcttctttatgtttctcataactcaagttctcaggactccatctaaggcatccactgactcattaccagaaagactaatacacattgtgtttttccctcctatggtttattttgcccaatcctctttgttagttatgatatccaaggaaatccttagatttcagtgtgggaactggttttcctaatatttaaatagaaaaacatggtttttgttaacatattgtttgattgtttttaattaataaattatatttctgtagatttgatttcattttcttgccactgtagacataattgaaaattatcgtttgcttttaaaagtacactgtgtgacactctactcaatatcacttaaaaaatcaattgtagttagctttctggaatggaaggcttagggaaaaattaatttacttcacttttaaatctcctaccctcacttctctgaatttttagtatcctattgatgtattatagttgtttgtttgcagtcagtataatctgtttacatctgaattttacatttttttatttccagggcttagtgaaagtaatgacactttgccccattgagacactggtatgtaaatatttggtgactaaagaataatgagttacagtgagaaaatttgacaaataatttaattttctttttaaaaattttaatttgtgaaatttttatttaggaggtacaagtgtggatgtattacatgcataaaatggatagtgatgaagtctgggtaagctttattcattttatataataatattgtttgttccattttagaggaaaaagagtttagctatgcttcagctgtatattaacaagttggattcacaaggcaaatatacattatttaggtatgtatcaagcatggctaattgctaagtgtgtggttgattaaaagtcatgttaatgccatgtaattgttttagggcatagtatgtcggtatgttttacatgtaattcaactctggttggaacccatattataaattctcagtgatggctagagaaagggttaatcaaatatttcagacatactatatatatgtctatattttgtatgactaatagtatatattgcagttcaatcaattggaatactctaaatttgaaatagacttaaaaataattaaactgagattgatgatgctcctgctggaactttatgtatgtcactaatctccattactcacagttcaaattgatggctctggaattacaactttgataggctatgcactatgttaatagtaagagcttactaatactgctctttgaggtggataagattctagcaactctctaagttaaagattggtaaactttctaattaattttctgtgaagagccaaatagtaaatataggttttatgggctatacagtctctgttgcaagtgctcaactttgactttgtattggggatgggtgtgttccagtaaaactttattgataaaattgggcatcaggctggatttgctaaaatgtcttacctgggattggccaatattagtactgttcttttttggcgggtgcagcagtgtgatcatggctcactgcagccttcacccttggccccccagcttcaggtgatcctcccgcttcagcctcccaggtagctgggactacaggtgcatgccatcatgcccagctaatttttttgtggagatggggttttgccatgttgcccaggctggtctcaaactcctgggctcaagcgattcacccacctcagcctcccaaagtgttgagatgacacgcatgagccatcatgcccagccaacactcttgattctatcttttcttgttttctattgatagtaagagcaagtttatgaaatctcaattcttaggtattataccggctttcctgttctgttctatgtgtatctctaccaataaatcccctttttttcttaagctagtcatatctagttttttttttttttttgcaattaagctactctagcactggactactttcacaggaaataatttggggattttttagaccattatgttagtgccctttcttgccatgttaaattattgtaactatgttcataaaaatattcaaattttggtttgatagaaatggcttgttggaagatccagttataaataagtatttaccggccgggtgtggtggctcatgcctgtaatcccagcactttgggaggctgaggcaggcggatcacgaggtcaggagtttgagacaagcctggccaacatggtgaaaccctgtttctactacaaatacaaaaaattagccaggcacggtggcgggcgcctgtaatcacagctactcaggaggctgaggcaggagaatcgcttgaacccgggaggcggaggttgcagtgagccaaaattgtgccactgcactccagcctgggcgacagggcgagactctgtctaaaaaagtaaaataaaataaataagaatttaccatttagtgagagcaataactattacaggtgactttgtaattggttgatgaccttgctaattaccattactgtggggtttttattcctagaagtaacacatggcctctttgaatttgtaaaacttttatcaccatttaattctaatgctgtccaggataatttcacatctattgtaattttgctttcaaggtgcttattgaatacaagtaatcactcaggtgtggaggcttttattattcaaaatatcaaaaatcaaattgacatgtcattaaaggtaagaacatagccaaagtgtcaattaccaatttatttcgtagggtatatttattcatatgtagaatacattaatgtgagttattgctctatctctagtattactattacttaaatattattaaggcatattttttcccctatttctactatgttttaaaaactctgaatttggaaatttagttaactataagtttaaattgtattctttgaggttttggtttttgtttttgttttttttgagacagggtttcacgcctgtcacccagcttggagtgcagtggcatgatctcagctcactgcagcctccacctcctgggctcaagcagttctcccaactcagcctcccgagtaattgggactacaggtgtccaccagtgcgcctggctgaattttgattttgtagagatggagtttcactgtgttgcccaggctcgtcttgaactcctgatctcaagtgatccacccaccttggcctcccaaaatgctgggattacaggtgtgagtcatcactctgggcctctttgagctgatattgtggcttatttttgctttgttatatgcttctcaaaaatgaatggaaacttaagtctcttctgtttctgagtgctcagtaattctaaatggaaaacagagtgaccagtgttctcaaactggcagggttcgttcctggtgtctggaaagtgaatgaaagtacggaaattaaagttaaaaactgtattttaaatgtgcaattcttcatttttgtagtgtcaaggtattagaaaaacacatgaattacatgaattataaagctttctcaatttttcgtttgcttttcagagaacacgtaacaacaaatggtttacaggaccacagttgatttcccttcttgatttggtactttttctcccagagggtgcagaaacagatttactgcaaaactcagataggtgaggtgaccattaccaaagttcacatagtaaattcagaataaaatgtgaaacatctgcttagggaacctaaagtaataaaatgtcttttcctgtgattttatgatctatggctaattcattaagttacataaagatttttcatatttaagtgatttgataatgtgtagaaacaaaattaaaacctcctctttctagatgaatgaccagcactatgatttgatagcttttatgtacccagcattccatagaaatttgcaatgacagcacttgtgacttaaaactaaaaatctgtgtatgtaatttatgtgtttaggttttgttgttttattgttttccaggtcattttttttttcatatagaacatataatttcagtttcagtatactggaatggatattgagaaatggtttaaagcatttaaaaagtaatcttaaaattcagaaagcaagagatgatgctctcaaatattaaagataacaaggctttctttaaacaaggatgataattttcacaattgtatgatttaaacaaatggaaaacagtgataagttattactactcaaaaagatattaatggaaatagtttctattggcaaacctaattataaaaatatgaccaaagttttagcttattgagattgctgttgactatataaaaccatactgtaagtaacatatatttttaattaacaggattatggcttcattaaatttattgaggtatttggttatcaaagataatgaaaatgacaatc

SEQ ID NO: 12294 - DNA, 734 bp, Homo sapiens
ttgtttcaaaagcttgaaatgccctttgctgacagcacaattctttgaacagtctgaagaaggtggaaatgatcctttcaggtattttgcatcagaaataataggttttttatcagcaattggacaccctttccccaaaatgatttttaatcatggaaggaaaaagagaacttggaattaccttgaatttgaagaagaagaaaataaacagttagcagactcaatggcttctctggcatatctagtatttgtacagggcatccatattgatcagcttccaatggtcttaagcccattgtaccttttgcagtttaatatggggcacattgaagtctttttgcaaagaacagaagagtctgttatctccaaaggattggagctgctggagaatagtttattgagaatagaagacaatagtctactttaccagtacttagaaatcaagagttttcttactgtacctcagggcttagtgaaagtaatgacactttgccccattgagacactggaggtacaagtgtggatgtattacatgcataaaatggatagtgatgaagtctggagaacacgtaacaacaaatggtttacaggaccacagttgatttcccttcttgatttggtactttttctcccagagggtgcagaaacagatttactgcaaaactcagataggattatggcttcattaaatttattgaggtatttggttatcaaagataatgaaaatgacaatc

SEQ ID NO: 12295 - DNA, 1917 bp, Homo sapiens
gtaggaaagggaaagcatcctctagaactagatccgtggtgtggatatcaattgaaaggccatacttgggatgaaggcataaataaggtagagtcattgtggagatggctcatagaggaagagacgtctgtgaatttatcctcaaataattttctcataaataaaacttaacaagttaatagatctcaaaacctggagctatccaaatggtgcagtgataagcgtagtgccccaagtacatttttcttttaattggtattcacataactagctatagtaataattattaaatagtgaagtccattgtgaaaagcaagggccatgtttcatttatttttgttttttgagcttttatcgcgtttaatagtaggcaatcaatcattgttgaactaaataactcattctttcattcttaacagactggattatggacagaacttggaaatattgagaataatttcttaaagccacttcatataggacttaatatgtcaaaagcacattatgaagcagaaattaaaaatagccaaggttggtaatgtgcaattttgttttcaattaggtctaaaaagtagtctaattttggaactgtcatattcaaatttaagaactttttaaaaatcttgtactttagagaccataacagctaagccattttatttatagttaaaattcttagcagatctataagctaatttacctaaaatcgggttaatgaagacttaaaccaaatattacattgtaaagcctcaaggtctgattaagaatctgtattacagctatttccgtttgggtaccattcctttggtattgctgggtccactctccatctcactctcaagtaaatccatacaaattatgaaaagaatcttagatccagaatttttttaagtcaataattctataataatcgtgtgatctcttccgtatatctgtggtggtgcttttataggcattaccggaaattttgtttttagtataatggctataattctgattatatactgaagaaaacagtttcatgaatcctatacatgccaaaataatgctatttatctaaagaagcattaatttacatgttgcagaattttgatatttcattctgtttgcttatagcttaagtataccctgagctgttaaacaatggacttaataatttatacaaataactgacatgttttaagttagtgaatgaaagtagcttatacctttgttattgaaatctgagagttaagtgtcacacatgatttttcttctcttacagaggcccagaaatctaaagatctttgttctataactgtaagtggagaagagatccctaatatgcctcctgaaatgcagcttaaggtgatctgaaattttcttttctttcctttttcttctttagaaacggggtcttgctatcttgcccaagctggagtgcagtggcatgattgtggctcactgcagcttcaactccctgggctcaagtgatccacccacctcagattcctgattagccaggactgcaggtgcacaccaccatgcctggctaatttttagtagagatagggtctcactatgttgctcaggctggtctccaactcctggcctctagtaatcctctcagctcagcctcccaaagcacaggaattacaggtgcaaaccactgtacctggtcttaaatattcctaagctacctccagctgaaatcttttctgtgttttgctttgttttgctttaaaggcagcattaataacattactttttcttggcattgcaggtcctgcattcagctcttttcacatttgatttgattgaaagtgttctagctcgagtggaagaactcattgaaataaaaacaaagtctacctctgaagaaaatattgggataaagtgaaagttccatttcctaaataaaaactaataaaatatagt

SEQ ID NO: 12296 - DNA, 769 bp, Homo sapiens
gtaggaaagggaaagcatcctctagaactagatccgtggtgtggatatcaattgaaaggccatacttgggatgaaggcataaataaggtagagtcattgtggagatggctcatagaggaagagacgtctgtgaatttatcctcaaataattttctcataaataaaacttaacaagttaatagatctcaaaacctggagctatccaaatggtgcagtgataagcgtagtgccccaagtacatttttcttttaattggtattcacataactagctatagtaataattattaaatagtgaagtccattgtgaaaagcaagggccatgtttcatttatttttgttttttgagcttttatcgcgtttaatagtaggcaatcaatcattgttgaactaaataactcattctttcattcttaacagactggattatggacagaacttggaaatattgagaataatttcttaaagccacttcatataggacttaatatgtcaaaagcacattatgaagcagaaattaaaaatagccaagaggcccagaaatctaaagatctttgttctataactgtaagtggagaagagatccctaatatgcctcctgaaatgcagcttaaggtcctgcattcagctcttttcacatttgatttgattgaaagtgttctagctcgagtggaagaactcattgaaataaaaacaaagtctacctctgaagaaaatattgggataaagtgaaagttccatttcctaaataaaaactaataaaatatagt

SEQ ID NO: 12297 - DNA, 1467 bp, Homo sapiens
agaagagcgggctaagacgccggaggaggtggcggcggctgggagaggcgagggttctggccggtaagtggagttgtggagaggttcagggtggccagggctcgcggttggccgtgagccgcggcggacttggtgctgcgggccgactaggccacgcgaggtggtggagcctgcccacctaggcgagcaggaatcggaagacatggcttcctctgatgcagcccgcacgcgcgctggggtgttcactcgccttccagcgcgctgccctgaggaccgggctgactcgcgcccctactgagggcttggggccgagccttgccgccaggagaagcgatggtctcctcctgaaggccgccgttgtcttgtctccgtgtgatacagtgatttcactagctggattgatcactttggggactgcaactcctagagagaaatggaatggagggcatctgaatcttcaccccctatagataagcttgtgttgcaccccaatttttgtgaggtgagacattaaaaatgaaaaatcccctgatgattagaattttgatttcaggtccaccttttggaaattttttttcagaaaagaagtgctttgctttttaaaagccctttagttcgtatatgcctcgcctcttgggagtgctcgagaggttttttttgtttttttttccttcaaagtagctttcaaaactatgctcctagaaaacttaaaacatgcaataagggcttctaaaaaaacactttattttcttaggcaaacatactaagattcagtaataacatttcaactttaaaactttacattttctcctagcatgctattggaccaaaaaacacaacaacaaaaactttccattttctttattgtatttactaataatttatcacactgaaacataacttttgaatacttaagtgtaatatcacggatagttaacagtgtgttttgtatttgtagattttagcatcgaaactaggagaaataagaatggctgtagaggaacttcagtctataataaagagatgtgtaagtattaatttttgtaaaattaaatacctttcaaaatatgggaagggcacagattgtttttaattatatttgtggtcactcaaattgtttatcttctttaatccttgctttttttgacctgtaaagagcatgagtgggggaggcagattggattatttctccaggtgacatacttatctaaataaccttttacattttaatcctgatccttttcatagatttcactggtacagtagatttcaaggtcacttattaaagtatttattagggtaatcctaattttgatacgtgtgttatttacgttacatttatctagaatttaaacagatttccttttttcatagataaatcaagaagttattgtatttaatttttatttgcatatacttttttttgtttgttttttgggttttttttttttttgccagcaaatccta

SEQ ID NO: 12298 - DNA, 572 bp, Homo sapiens
agaagagcgggctaagacgccggaggaggtggcggcggctgggagaggcgagggttctggccgattttagcatcgaaactaggagaaataagaatggctgtagaggaacttcagtctataataaagagatgtgtaagtattaatttttgtaaaattaaatacctttcaaaatatgggaagggcacagattgtttttaattatatttgtggtcactcaaattgtttatcttctttaatccttgctttttttgacctgtaaagagcatgagtgggggaggcagattggattatttctccaggtgacatacttatctaaataaccttttacattttaatcctgatccttttcatagatttcactggtacagtagatttcaaggtcacttattaaagtatttattagggtaatcctaattttgatacgtgtgttatttacgttacatttatctagaatttaaacagatttccttttttcatagataaatcaagaagttattgtatttaatttttatttgcatatacttttttttgtttgttttttgggttttttttttttttgccagcaaatccta

SEQ ID NO: 12299 - DNA, 1833 bp, Homo sapiens
agaagagcgggctaagacgccggaggaggtggcggcggctgggagaggcgagggttctggccgattttagcatcgaaactaggagaaataagaatggctgtagaggaacttcagtctataataaagagatgtcaaatcctagaagagcaagactttaaagaagaggattttggcctatttcagttagctgggcaaagatgcatagaagaagggcacacagaccagctattagaaattattcaaaatgaaaagaataaggtcatcatcaagaatatgggctggaatctcgttggtcctgttgttcgatgccttttgtgtaaagataaagaggatagtaaaagaaaagtttattttttgatctttgatttattggtaaagttatgcaatccaaaggaattattgttgggtttgcttgaactgattgaagagccctctggaaaacagatatcccaaagtattcttcttttgcttcagccattacaaacagtgattcagaaacttcataacaaggcatattcaattggattagcattgtctaccctttggaatcagctatctcttcttcctgttccatactcaaaagaacaaatacaaatggatgactatggcctttgtcagtgttgcaaggccttaatagagttcactaagccttttgtggaagaagtcattgataacaaagaaaactcactggaaaatgaaaagttaaaggatgaattactgaaattttgtttcaaaagcttgaaatgccctttgctgacagcacaattctttgaacagtctgaagaaggtggaaatgatcctttcaggtattttgcatcagaaataataggttttttatcagcaattggacaccctttccccaaaatgatttttaatcatggaaggaaaaagagaacttggaattaccttgaatttgaagaagaagaaaataaacagttagcagactcaatggcttctctggcatatctagtatttgtacagggcatccatattgatcagcttccaatggtcttaagcccattgtaccttttgcagtttaatatggggcacattgaagtctttttgcaaagaacagaagagtctgttatctccaaaggattggagctgctggagaatagtttattgagaatagaagacaatagtctactttaccagtacttagaaatcaagagttttcttactgtacctcagggcttagtgaaagtaatgacactttgccccattgagacactgaggaaaaagagtttagctatgcttcagctgtatattaacaagttggattcacaaggcaaatatacattatttagagaacacgtaacaacaaatggtttacaggaccacagttgatttcccttcttgatttggtactttttctcccagagggtgcagaaacagatttactgcaaaactcagataggattatggcttcattaaatttattgaggtatttggttatcaaagataatgaaaatgacaatcaaactggattatggacagaacttggaaatattgagaataatttcttaaagccacttcatataggacttaatatgtcaaaagcacattatgaagcagaaattaaaaatagccaagaggcccagaaatctaaagatctttgttctataactgtaagtggagaagagatccctaatatgcctcctgaaatgcagcttaaggtcctgcattcagctcttttcacatttgatttgattgaaagtgttctagctcgagtggaagaactcattgaaataaaaacaaagtctacctctgaagaaaatattgggataaagtgaaagttccatttcctaaataaaaactaataaaatatagtac

SEQ ID NO: 12300 - DNA, 24591 bp, Homo sapiens
ggttttttatcagcaattggacaccctttccccaaaatgatttttaatcatggaaggaaaaagagaacttggaattaccttgaatttgaagaagaagaaaataaacagttagcagactcaatggcttctctggcatatctagtatttgtacagggcatccatattgatcagcttccaatggtcttaaggtaagagttagtgtttggtttattcatgtattctaaaaggaatttcataaaattctcatttatctaatgtccaatatatgcatattaacacactaatacattttaaataaatagtaaaggctatttttaataagaatgatcccagctataatctgttaaagatagcagtagacaagtaatgaaagtggggagtgttgaaataggtgtaagggaatggtggggacaagaatcagaagatgataaacagggcttggttttgaagcttttgagaccaccctggaactagccaggtacccaggggtatcatcatcttttcactggattactgctgtaatcctgagtggatttatatatctacttttacttccttttaatttaacacattctcaacataccagaaagcgaagccttaaaagaagtcccttactgaaaaccctccagtggctttttattgctttaagaataaagtcttaatgcctttgcataacttctgagacaaacttgtgcctggtctggtccctgcttaattgacctgattcatctcctaccacctttcctcttgtttactatgctccagtgacacagaccttcttttgtttctagtttaaatgttatgaattttcctatttggcctttgtatatgcttaaaattctctttatccttaaatgtcactttctgaagaaagccttcactcaccacccaatttaggttgaatccttctattataattaccttgaccttgtcttcttttcccacaatgtttattaaaattatttttaaaatatataattttataatgtaatatcttctggactttgagttctatgataataaggattgtgtatttgtcttataggcattgggtatttgtgtgagtttgtgcatttatatatgaatatagctaggagtacattcgtatgtaaatgttgaaatactggctatcatttgcatgttcaccatgtatgaaacattatgctaataactttatatgcattatctcatccttataataagcctgtgaaatagagcattctctcattttacagatgaaaataacaggcttagacaagttaatataccactgaagatctaactactttgtggcataggtgggatgcagatagctctgtctgaccccagagcctatactcttaagcatcacattctatcaccaaaataacttatacagcatatgtatattaacttgctagggctcctgtaaaaaagtgctaccaactggatggttgaaataacagaaatagtttgtctcatagttctggatgctccttctgagggttgtgaaggagaatcttctccatgcctctctcctggcttctggtgatttgctcacaatctttgatggtctttggcttgtagatgcattatcctgttctctgccttcatgttcgtatgctgttctccctgtgtgcttgtgtctgtctccaaactttccttttacataaggacaacagtcatattggattagggcccaccctaataatctcattttaaattgattacctccataaccctatctccaaataaggtcaaattctgaggtactagaggttaggactccaacatatcttttttgggggagatacaattcaacccataacaatatgtatgtgtgtacatatctctgtgtgtgtgtataatatatatatttgttttgtttctattttagcccattgtaccttttgcagtttaatatggggcacattgaagtctttttgcaaaggtaagatcgtttagatggtatctcaaaatgaaatagtagtgttaaaatagtccttgttaagatcagcggagactgccttttctttgctaagctctaattaattaattggttattttataaaacagcgaggcaaataattcacgagagagacagaaatgagtcaaggaggttttacaccaaagtctgttttattttaaacttaagacagtattaagattttgtcttaagggcttttacagtcatctgtttctaaggtttcttctcttactccaaaagttggtaaattaaaacacctctaccccactgcatcctcctccatcttaaggaagggcagtcaataaaagaagttcttccgtatttttccttcatggacacagtctgtgaattgcatcaaaaggaaggaggtgtcttgacttccaccttttataatttagattattgacagtgatgtcattcaattacaacttttctcatttgaggtgctaagcagcaggactttctatttaaaaaaaaaaaaaaaaagccaggcacggtggctcacgcctataatcccagcactttgggagaccaaggcgagaggattgcttgaccccaggagttcgaaaccagtctctctctctacaaaaaatagaaaaaattagccaggagtggtggcgcctgcccgttgtcccagctacttgggaggttgaggtgaaagaatcacctgtgcctgggaggtctgggctgcagtgagcagagatcatgccactgcagtccagcctgggcaacagagtaagaccctgtcgcaaaagaaaaaaaaaaaaaaaaggaaattacagagtaacaggtatacataatttctagacagaaattaaagaatttcacagaactatatgctttgttttctttcactataacatgtaacatgtttaaattatcccctgagatcagttagggctttgcaattatcctctatgaacactagtgacagtttatcagtcccatctcttaccaggtgaaggaagatttgtaacatggcaatgtccaaagcttcagcatacaaggcaggaatttccaagggtctcctggcacaagtagttactaattctgtaaatttgctgtattatgtatgttttaatgattttatattcattacatttagtttctgttattcatacagtgataatatgtattgttttgaatctaagtcctaaattcttgagatttccaaactgcagagtcattgagtctttttttgaataaaaagaattggaaagattttacagaataatcaactggaatatatagcattggttatatcaggtttagttagtttcttagcacttgctgttgaagatctattgttttgaagttaggaaataatccctgagtagatttattttggtcagatttagtggccttagccaaaccgaaagacagatcaaagatggattaaaacttttgatcaagttcttcaacagaatttctccttaatgatatgcattttaaaagtgttaaaatttcagtttttgctgtatttttcataagatgaagtatcattctaaaatagtttacaaattcatgataaattttaatattatttttcagaacagaagagtctgttatctccaaaggattggtaagatgtttgttcccattataacttaaatacatagttatgtcaacaaataacagctgttgacttcactatatatgtatctgcatatattttaatctgtaggagctgctggagaatagtttattgagaatagaagacaatagtctactttaccagtacttagaaatcaagagttttcttactgtacctcaggtaaataaaatatgtattctaatattgaaaatagccctttgcctgttctgaacttaaagtaaggtcttttctgattcctttcccactcttttctctgcaacctttgaaaactctggtgtaatgctgtccagtagaactttgacaatatgaaagccactagccaaactgaacacttgaaatgtgactaaggaactattttttttttttttgaggtgtagtcttgctgtgtcgcccaggttggagtgcagtggtgctatctcagctcactgcaagctccacctcctgggttcattccattctcctgcctcagcctcccgagtagctgggactacaggcgcccgccaccacacccagctaatatttttgtatttatagtagagacggagtttcactgtgttagccaggatggtctcgatctcctgacttcgtgatcagcctgcctcagccccccaaagtgctgggattacaggtgtgagccaccacacccagccggaactaagtttcaaatttaaattttaatttatttaaacacgaatagctattagaggccaccattattgatagcacagcatccagtagaaaagcataactttcttcttttaacactttatttctgtagggatcttggaaaatgaagcttctttatgtttctcataactcaagttctcaggactccatctaaggcatccactgactcattaccagaaagactaatacacattgtgtttttccctcctatggtttattttgcccaatcctctttgttagttatgatatccaaggaaatccttagatttcagtgtgggaactggttttcctaatatttaaatagaaaaacatggtttttgttaacatattgtttgattgtttttaattaataaattatatttctgtagatttgatttcattttcttgccactgtagacataattgaaaattatcgtttgcttttaaaagtacactgtgtgacactctactcaatatcacttaaaaaatcaattgtagttagctttctggaatggaaggcttagggaaaaattaatttacttcacttttaaatctcctaccctcacttctctgaatttttagtatcctattgatgtattatagttgtttgtttgcagtcagtataatctgtttacatctgaattttacatttttttatttccagggcttagtgaaagtaatgacactttgccccattgagacactggtatgtaaatatttggtgactaaagaataatgagttacagtgagaaaatttgacaaataatttaattttctttttaaaaattttaatttgtgaaatttttatttaggaggtacaagtgtggatgtattacatgcataaaatggatagtgatgaagtctgggtaagctttattcattttatataataatattgtttgttccattttagaggaaaaagagtttagctatgcttcagctgtatattaacaagttggattcacaaggcaaatatacattatttaggtatgtatcaagcatggctaattgctaagtgtgtggttgattaaaagtcatgttaatgccatgtaattgttttagggcatagtatgtcggtatgttttacatgtaattcaactctggttggaacccatattataaattctcagtgatggctagagaaagggttaatcaaatatttcagacatactatatatatgtctatattttgtatgactaatagtatatattgcagttcaatcaattggaatactctaaatttgaaatagacttaaaaataattaaactgagattgatgatgctcctgctggaactttatgtatgtcactaatctccattactcacagttcaaattgatggctctggaattacaactttgataggctatgcactatgttaatagtaagagcttactaatactgctctttgaggtggataagattctagcaactctctaagttaaagattggtaaactttctaattaattttctgtgaagagccaaatagtaaatataggttttatgggctatacagtctctgttgcaagtgctcaactttgactttgtattggggatgggtgtgttccagtaaaactttattgataaaattgggcatcaggctggatttgctaaaatgtcttacctgggattggccaatattagtactgttcttttttggcgggtgcagcagtgtgatcatggctcactgcagccttcacccttggccccccagcttcaggtgatcctcccgcttcagcctcccaggtagctgggactacaggtgcatgccatcatgcccagctaatttttttgtggagatggggttttgccatgttgcccaggctggtctcaaactcctgggctcaagcgattcacccacctcagcctcccaaagtgttgagatgacacgcatgagccatcatgcccagccaacactcttgattctatcttttcttgttttctattgatagtaagagcaagtttatgaaatctcaattcttaggtattataccggctttcctgttctgttctatgtgtatctctaccaataaatcccctttttttcttaagctagtcatatctagttttttttttttttttgcaattaagctactctagcactggactactttcacaggaaataatttggggattttttagaccattatgttagtgccctttcttgccatgttaaattattgtaactatgttcataaaaatattcaaattttggtttgatagaaatggcttgttggaagatccagttataaataagtatttaccggccgggtgtggtggctcatgcctgtaatcccagcactttgggaggctgaggcaggcggatcacgaggtcaggagtttgagacaagcctggccaacatggtgaaaccctgtttctactacaaatacaaaaaattagccaggcacggtggcgggcgcctgtaatcacagctactcaggaggctgaggcaggagaatcgcttgaacccgggaggcggaggttgcagtgagccaaaattgtgccactgcactccagcctgggcgacagggcgagactctgtctaaaaaagtaaaataaaataaataagaatttaccatttagtgagagcaataactattacaggtgactttgtaattggttgatgaccttgctaattaccattactgtggggtttttattcctagaagtaacacatggcctctttgaatttgtaaaacttttatcaccatttaattctaatgctgtccaggataatttcacatctattgtaattttgctttcaaggtgcttattgaatacaagtaatcactcaggtgtggaggcttttattattcaaaatatcaaaaatcaaattgacatgtcattaaaggtaagaacatagccaaagtgtcaattaccaatttatttcgtagggtatatttattcatatgtagaatacattaatgtgagttattgctctatctctagtattactattacttaaatattattaaggcatattttttcccctatttctactatgttttaaaaactctgaatttggaaatttagttaactataagtttaaattgtattctttgaggttttggtttttgtttttgttttttttgagacagggtttcacgcctgtcacccagcttggagtgcagtggcatgatctcagctcactgcagcctccacctcctgggctcaagcagttctcccaactcagcctcccgagtaattgggactacaggtgtccaccagtgcgcctggctgaattttgattttgtagagatggagtttcactgtgttgcccaggctcgtcttgaactcctgatctcaagtgatccacccaccttggcctcccaaaatgctgggattacaggtgtgagtcatcactctgggcctctttgagctgatattgtggcttatttttgctttgttatatgcttctcaaaaatgaatggaaacttaagtctcttctgtttctgagtgctcagtaattctaaatggaaaacagagtgaccagtgttctcaaactggcagggttcgttcctggtgtctggaaagtgaatgaaagtacggaaattaaagttaaaaactgtattttaaatgtgcaattcttcatttttgtagtgtcaaggtattagaaaaacacatgaattacatgaattataaagctttctcaatttttcgtttgcttttcagagaacacgtaacaacaaatggtttacaggaccacagttgatttcccttcttgatttggtactttttctcccagagggtgcagaaacagatttactgcaaaactcagataggtgaggtgaccattaccaaagttcacatagtaaattcagaataaaatgtgaaacatctgcttagggaacctaaagtaataaaatgtcttttcctgtgattttatgatctatggctaattcattaagttacataaagatttttcatatttaagtgatttgataatgtgtagaaacaaaattaaaacctcctctttctagatgaatgaccagcactatgatttgatagcttttatgtacccagcattccatagaaatttgcaatgacagcacttgtgacttaaaactaaaaatctgtgtatgtaatttatgtgtttaggttttgttgttttattgttttccaggtcattttttttttcatatagaacatataatttcagtttcagtatactggaatggatattgagaaatggtttaaagcatttaaaaagtaatcttaaaattcagaaagcaagagatgatgctctcaaatattaaagataacaaggctttctttaaacaaggatgataattttcacaattgtatgatttaaacaaatggaaaacagtgataagttattactactcaaaaagatattaatggaaatagtttctattggcaaacctaattataaaaatatgaccaaagttttagcttattgagattgctgttgactatataaaaccatactgtaagtaacatatatttttaattaacaggattatggcttcattaaatttattgaggtatttggttatcaaagataatgaaaatgacaatcaagtaagtgaagtatttgaaaagaaactgtgagtatattcaaaaggcataaggaatgtttcagatattcagtacctaaagccaatatttaatatcttacccagatataaaggccgggaagagtgccaacaattattctgaaacctgaagttaattcccaggagcatttaccaccccacatccagctttcctttccctttccatttcctattgtacgtctgctttcttgctgaaagcacttagtcctgttgggtggataagttgcaggtcctaagtcaactaaccttgtggagctcaacgtacatatggtgtcttgttcagtttcctccacctatagctcatgagctgtataaaatcatctgatattttaatattgcctcatcagacatgacaaattgaagcattttcagcactaaaacagaatttgttaacagcaccttttagatatgtttaggaagttggattttttaaaaatagcacatcattagaagtattcaataaatagagaagtattcaataaatagaaaactatttgagggagatttgtcatacagtaaaattatatttgctttttatcttctctttctaccctgttctgatcattgctttccctatatgtgtcacctctattagctagaactacctgaatcatgtgttgttaattggtttttttttagtaattcatttttatataaagatgccaaagaaaattttttttaaattaggtaaatcgtgatttgggatgaaggtttatgagaaaagtagcagtctctttccttcctgacagatctatagtagattcagtgatttgaacccccgttcatccctcttcagctgaaaatagctatttgccatcattgactagtgcttactctgtatcaggtgctatttttttttaacattttgttgtgaaacttttcaaatgtacagcaaagttgaaagaattttatagtgatcattggtttacccaccacctagagtctatgattctactgtactaacttcatcatgtatctatcactccaccctctgtctatcactccgtcagtctattttttgatgtatttcaaagtaaactgcagacgtcagcatactttctccgaaatatttcagcatgtatttcattacattgattaaatatttgtctgtagtttttctttgaagtaaaatttacataatgaaatgttcaaattttaagtgtatattcactgaattttaactaatacatagatctatattactcaaacccatatcaatatagaacatttccagcatcacaagaggttcctcataccccttcctagttaattctgacctcgttgtgctactcacccctgccagggacaaccactattctgcccaagtgctgtatatcattcattcttcagagagcgtctcgttctcttgcccaggctggattacagtggtacaatcatggctcactgcagcctcgacctcctgggctcaagagatcctcccacctcggcctcccaaagtgctggggtaacttccaggcatgggccaccatggaaaaccaagaaaagtactctttatttttcacttttcatagataatgtaggtgaaaaaagttcattaacttgcacaagggcaaacatctggaaagtggtagaaatagctatgaccccaggcagtggccagaactttctaaatcacaaactaaatcctgattcctgaaggagcttgtgataaaaattgaaaagctacaatataaaattcagcagcagtagaggccctgagacttcaggaaggtggccttagggtagggtatgagtttttatttttttagtaatcaagaaaggctgtacctacttgagagattatctgacttgcctgacaaaaagaaaaggaatcttgttgattaggattgataggtgtgttagatatggaacacagagtaatacaaaggcagcagattggtctctgcttagagagggaagacctgagagcagtttagcattgtgcaatgtctgctatactatccatagataattcctcacttttgtttgtcatgtacattttatggtgaagaaaaggatacagccagcctataggactgcctttttttttttttttttttttccatctcaaagagacagtgtctcactgtattgcccaggctggagtacagtggcagtcatggctcactgctgcctcaaactccccagctcaaacaatcctcccacgtcagcctcccaaagtgctgggattacaggcacttcttttttttcttgagatggagtctcactctgtcgcccaggctggagtgcagtggcacgatctctgctcactgcatcgtccacctcctgggttcaaatgattctcctgcctcagtctcccgagtagctgggactacagccaggcaccaccacaccagctaatttttgtatttttactagagatggggtttcatcatgttgcccaggctggtctcaaacttctgacctcaagtgatcctctctcctcagcctcccaaagtgctgggattacaggtgtgtgccaccacacccagccaacaggcatctctcatttaatggtttttaataatttttctaagggatcaaatattctaaattattgctttataagttaccataagaattataccagggaaattagcaaaaacccagtccaagctggcagcctcacatcttttaggcgcttaaaagcctgtctatcttgaaaacatttctcctgagtgcaatgacaataggtcgtgtcaataactgagaggcaaatatgtctactgtggttaataaaaaatgacacttcctgagtttttggaagattttggttaaagaaaaaacaaaatgggctgggcgtggtggctcacacctgtaatcccagctctttggaaggccaaggcgggcggttcatgaagtcaggagatcaagaccatcctggctaacacagtgaaaccccgtctctactaaaaatacaaacaaaattagccaggcatggtggcgggtgcctatagttccagctactcgggaggctgaggcaggagaatggcgtgaaccgggaggcggagcttgcagtgagccgagatcatgccactgcactccccactgggtgacagagcaagagtctgtctcaaaaaaaaaaaaaaaaaaaagaaagaaaaaaaagaaaaaacaaaatgatggtctggtgatgctgaaatatggggcattttattcaaaaggactcctaccagtacctatttttgagcacttaagtgtgctaagagggtaattagtcagatgaaaagcagacacacagtcagaaatatgaacaggaagattaagaagagaatcacattcaaatacaaagacaacaaagtgattcataattgagtaataatccatttcttttcttgctattttgggttactgtcaactgacttattctcttcgtaagccctccttcctcaccctactatttcatgcctcttgtatctccttggttaagtttcaggcaccttctcttactcttgaatttcatataacttttcttgaatattatagtacaaacatgctcccatctttactggtaaaaccaacttagtttttataccaaatattatctatttaatagatatttaatagagtatctttaaataattattagttgtttcgaattacaataatttattctaatacatatccaataatcatgttatcccttaccttctgtcctgtgtactcatatcctttcccatccatctgtttactcatctttttttctaaaaagtttgtaattatagtatgtagaatgaaagctgggacaagggaaacaatgagatggcaaaggccacaggtaaatatcaggaattttaaaattgaattgcttagtctgtgtgagtgtgcttttcatttaggaaaaaactgtatcttgtataataaatacacatacacaaaattctatataatccatattttgggtgctcatttaagttttggttttttttcaatacttttaagttctgggatacatgtgcagaacgtgcaggtttgttacataggtatacacgtgccatggtggtttgctgtacccatcaactcaccatctatattaggtatttctcctaatacccctcccctagcccccgaaccctgacaggccccggtgtgtgatgttccccatcctgtgtccatgtgttcaaattgttcaactcctacttatgagtgagaacatgtggtgtttggttttctgttcctgtgttagtttgctgagaatgatggtttccagcttcatccgtgtccctgcaaaggacatgaactcatccttttttatggctgcacagtattccatgatatatatgtgccacattttcttaatccagtctatcattgatgggcatttgggttggttccaagtctttgctattgtgaatagtgctgcagtaaacatacatgtgcatgtgtctttatagtagaatgatttataatcttttgggtatatacccagtaatgggattgctgggtcaaatggtatttctggttctagatccttgaggaatcgccacactgtcttccacaatggttgaactaatttagactcccaccaacagtgtaaaagcgttcctatttctccacatcctctccagcatctgttgtttcctgactttttaatgatcgccattctaactggcatgagatggtatctcattgtggttttgatttgcatttctctaatgaccagtgatgagctttttttcatgtttgttggctgcataaatatcttcttttgagaagtgtctgttcatatcctttgcccactttttgatgggtttttttttcttataaatttgtttaagttccttgtagattctggatattagccctttgtcagatggatagattgcaaaaattttctcccattctgtaggttgcctgtttactctgatgatagtttcttttgttgtgcagaagctctttagtttaattagatcccatttgtccattttggcttttgttgccatttcttttggtgttttagtcatgaagtctttgcccatgtctatgtcctgaatggtattgcctaggttttcttctagggtttttatggttttgggtttttatggttttagattttatgtttaagtctttaatccatgtcaagttaatttttgtatagggggtaaggaaggagtccaatttcagttttctgcatatggctagccagttttcccagcaccatttattaaatagggaatcctttccccatttcttgtttttgtcaggtttgtcaaagatcagatggttgtagatgtgtggcgttatttctgaggcctctgttctgttccattgatctatgtatctgttttggtaccagtaccatgctgtcttggttactttagccctgtagtatagtttgaagtcaggtagcatgatgcctccagctttgttctttttgcttaggattgtcctggctatccggacactttttggttctatatgaaatttaaagtagttttttctaattttgtgaagaaagtcagtggtagcttgatggggatagcattgaatctataaattactttgggcggtatggccattttcacaatattgattcttcctaccgatgagcatggaatgtttttccatttgtgtcctctcttatttctttgagtggtggtttgtagttctccttgaagaggtctttcacatcccttgcaagttggattcttaggtattttattctctttgtagcaattgtgaatgggagttcactcatgatttggctctctgtttattattggtgtataggaatgcttgtgatttttgcacattgattttgtatcctgagactttgccaaagttgcttatcagcttaaggagattttgcactgggatgatggggttttctaaatatacaatcacgttatctgcaaacagagacaatttgacctcctttcttcctatttgaatacgctttatttctttctcttgcctgattgccctgagcagaacttccaatactatgttgaataggagtggtgagagagggcatccctgtcttgtgccagttttcaaagggaatgcttccagtttttgcccattcagtatgatattggctgtgggtttgtcataaatagctcttattattttgagatacgttccatcaatacctagtttattgagagtttttagcatgaagggctgttgaattttatccaaggccttttctgcatctgttgagataatcatgtggtttttgtcattggttctgtttatggaatggattacgtttattgatttgtgtatgttgaaccagccttgaatcacagggatgaagccaacttgatcatggtggataagctttttgatgtgctgctatatttggtttgccagtattttattaaggatttttgcattgatgttcatcagggatattggcctgaaattttcttttttttgttgtgtctctgccaggttttggtatcaggatgatgctggcctcataaaatgagttagggaggagtccctctttttctattgtttggaaaagtttcagaaggaatggtaccacctcctctttgtacctctggtagaatgcggctgtgaatctgtctggtcctgggcttttttttttattgtaggctattaattactgcctcaatttcagaacttattattggtctattcagggattcgacttcttcctggtttagtcttgggagggtgtgtatgtccaggaatttatccattttttttctagattttctagttaatttgcatagaggtgtttatagtattctctgatggtagtttgtatttctgtgggatcagtggtgatataccctttatcaatttttattgtgtctatttgattcttctctctttattagtctggctagtggtctgttttgttagtcttttcaaaaaagcagcttctggattcactgattttttttgaagggttttttgcgtctctatctccagttgtgctctgatcttagttgtttcttgtcttctgctagcttttgaatttgtttgcttttgcctctctatttcttttaattgtgatgttaggtcgtcgattttagatctttcccactttctcctttgggcatttagtgctaaaaatttccctctaaacactgctttagctgtgtccaagagattctggtatgttgtgtctttgttcccattggttgcaaagaacttatttatttctgccttaatttcgttatttacccagtagtcattcaggagcaggttgttcagtttccatgtagttctgtggttttgagtgagtttcttaatcctgagttctactttgattgcactgtggtctaagagacagtttgttacaatttctgttcttttgcatttgctgaggagggagtgttttacttccaattatgtggtcaattttagaataagtgctgtgtggtgctgagaagaatgtatcttctgttgatttggggtggagagttctgtagatgtctgttaggtctgcttggtccagagctgagttgaaatcctgaatatcgttgttaattttctgtcttgttgatctgtctgatattgacagtggagtcttaaagtctcccactattattgtgtgggagtctaagtctctgtaggtctctaagagcttgctttatgaatctgggtgtttctgtattggctttatatatatttaagatagttagctcttcttgttgcattgatccctttaccattatgtaatgcccttctttgtcttttttgatctttgatggtttaaagtctgttttatcagacactaggactgcaacctctgctttttttttttctttccgtttgcttggtaaataatccttcatccctttattttgagcctatgtgtgtcttttcacatgagatgggtctcctgaatacagcacactgatgggtcttgactctttattcaatttgccagtctgtgctttttaattggggcatttagcccatttacatttaaagttaatatcgttatctgtgaatttgatcctgtcattatgctagctggttattttgccaattagttatgcagtttcttcatagtgtcgatggtctttacattttgggttgttcttgcagtagctggtactggtttttcctttccatatttagtgcttccttcaggagctcttgtaaggcaggcctggtggtgacaaaaatctctcagcatttccttgtctgtaaaggattttatttctccttcacttatgaagcttaatctggctggatatgaaattctgggttgaaaattcttttttttaagatattggcccccactgtcttctggcttctagggtttctgcagagagaaccgctgttagtctgatgggcttcccgttgtgggtaacccagcctttctctctggctgcacttaacattttttccttcatttcaaccttggtgaatctgatgattatgtgtcttggggttgctcttcccgaggagtatctttgtggtgttctctgtattttctgaatttgactgttggcctgtcttcctaggttgggaagttctcctggataataccctgaagtgtgttttccaccttggttccattgtccccatcactttcaggtacaccagtcaaacataggtttggtcttttcacatagtcccatatttcttggaagctttgttcattccttttcattctttttttctctaatcttgtcttcacactttatttcattaagttgatcttcaatctctgatattctttcttccacttgatcgattcagctattgatacttgcatatgcttcacgaagttcttgtgctgtgtttttcagctccatcaggtcatttatgttcttctctaaactgcttattctagttggcaattactctaaccttttatcaaggttcttagctccttgcattgggttagaacatgctcctttagcttggaggagtttgttattactcaacttctgaagcctacttctgtcagttcatcaaactcattctctgtccagttttgttcccttgctggcaaggagttgtgatcctttggagaagaggtgttcgtgtgcttggaattttcagcccttttccgctgctttttcctcgtcttcgtggatttctacctttggtctttgctgttggtgacctttgggtggagtttttgcttgggtcatcctttttgttgacgttaatgctattgctttgtgtttgttagttttccttctaacagtcaggcccctcttctgcaggtctgctgcagtttgctgggggtccactccagaccctgtttgcccgggtatcaccattggaggctgcagaacagcaaagattgctgcctgctccttcctctggaagcttcatcccagaggggcacccgccagatgccagccggagctctcctgtatgaggtggctgttgacccctgctgggaggtgtctccctatcaggaagcacgaggggtcagggacccatttgaggaagcagtctgtcccttagcagagctcaagcgctgtgctgagagatctgctgctctcttcagagctggcaggcaggaatgtttgtctgctgaagctgcacccacagccaccctttccccaaggtgctctgtcccagggagatggaagttttatctataagcccctgactggagctgctgcctttctttcagagatgccctgcccagagagaggaggaatctagagcttaagttttttttcaatttccatttctatttaagattcaggggtgcaggtttggtacaggggcatattgtgtaagttgtttctttctctaagataaaacatatccatgaaatatttgcagagccggatgacttctatatgaattagaagaaaggggaaacctgggtcttgttcatggctttttatttcttcattaccatcactgactgtattctttgcagggttcctgactgttctggcaataaatttcattgtagtgtagaactgcctagtcttccttttgtgagagagatatgctacagtgaattttgaaatgtatagttttaagccttagaactggaaatcagtaagcctccttgggtatgaaattaaaagcaggtatttgtgaacatttcaaatttttaattataactattttaaaactcttaatttactttttctagacactgaaagattttaagaaatcttaaaatgtgattttctttgtagtatttattatttctttaaaaacgatctggtaaccttgagagaaaaaatattcttattctcacagcttcttcactcctacatgcttctaaaaatattacagtttatcatctgaaaaatttgtggaattatgctgaacagaatatgtaaaaaatttctttaggctacttttggcatgtgtttttattacctgaagttttatgattatgggctattgccattgaaaacagctaaggttttaacattcaaagatctagatttgcactgtccaatacagtagacagtagacacatgtgactatttaaatttatattaatttttttttccttttgagttggggtctcactctatagcccaggctggagtgcagtggcgcaatcacggcacattgcaataacaacctcctgtactcaggtgatcctcccatctgggattacaggcatgagctactgcgctgggccagtactctttattaatatgtgattatttccatttgagaaatttgaaacattaaaagaaaacgtttggttagagatacatttgctttttaaagtcctgatttagtaatttggttaaaatttttggctgaagagaattagtgaagcttaattgtatatttgtaccaatgaatgattataaaactttatcactgtaatcccagcactttgggaggctgaggcgggcagatcacctgaggttaggagttagagaccagccagtccaacatggcgaaaccccatctctactaaaactacaaaaaaattagctgggcatggtggcagacgcttataatcccagctactctggaggctgaggcaggagaattgcttgaacccagtaggtggaggctgcagtgagctcagatcatgcctctgcactccagcctgggcaacagagcaagaagacaccatcttaaaaaaaaaaaaaaaagttttgggaatcagatttaaaagaatttccattacaaagtaaaactgaaaggatgaaagaaaaaaattttcaacttagaacttctacaagaggaaagtttttcatggatacaaattctttggttatatttttgcaaatattccagtctgtggcttgtgttttaatagtatttttcaaagaacagaaattttaatatttatggagtccaacttatcaattttattcttttatgattcattatttatgggttctaagaagtctttgttaacccagatcacaaaggtaatttcttgtagaaattgtatagttttaggttttacacttaggtcaatgaccccatttcaagtaaactttttatgatatgagatatgggttgagagatttttttttcttttattttgacctcaacactatttgtagaaaaggttatccttaatttactgaattatcttggcaactttatcaaaaatcattttataagtatgggtctatttttggactctattccatttacctgtatctattcttttaccaataccacactgtcttgattcctttataggaagaaattattctgttttattcctttataggaagtcttgacctcaagtaatgtgagtctgccaactttgttcttctttttcaaaattgtattggctatttttaaatcctttaccttttctgtataaattttagaattttgtcaatttctgccacaaagagttttaattccacttatggcattctggaaaaggcaaaaattaccttaacaaaaatcagattgctggttgctggaggtgggaggaaactgactacaaaggggcacaaagaaatttctgggtcatgggaatatctttacagcagcagtggttacatgactttatatcactatatatctttgtcaaagctcagaattgtatagctagaaggttatattttactgtatgtaaacaatatctcaacaaacctgactttgaaaaataataaaaagaaaagaactaggctcaatagtgaattagactgaaattacctcatgaacaggcaagcacactgattatgtaaaaatctttctgatgtttacttttgaattgtttattctccatttttctacattaaagtattaagattaaatgtgttatatggaaaggatttgagggaaaacttttatttcaactatataaataaacgtgtgagttgtgatgtaaaacctagtttttactgagagtcatggcaaaaataatttgaaaaacagtatcctagaaaaacttttaccccgtgtgaatgggaaaacatacagcaatgtaaatgctgcattattttgaaatactaaaaacttaggataaattccatataatggaatgcttatgcaccaattaaaattagagctacaacacaaataactctcaaaaacataagattgacaaagaaaaaggaagctgaagcaggttatatacagtataccatttatgtgcttttaaacatgaaaaattatattgtttaagtgatacattaggaatgcaaaacattcaagttttagataatggctacctcttgaataaaggggatttcagccatatctagtatttattttttaaaagtaaatatgataaaatgtttccttttgtcaaaggtttccttttgtcaaagctaggtgttttccctatactctttatgttcaaatgtgctttagtgggtaacagagagtcatcagtaacctagtcttgaaagccatcagttgcagtgggttctgcctataaacccagaggtgaatgcaaagtaaaaagaaaaaaaaaaagttggggggcagggaataaatggtgaagaaaaggctggacgtaaaaaggaataaaagcctgttatttgcagcaacgtggatggacctacatgtcattacattgaaatatgccaggcccagaaagacagtatcacatattctcacatgtgtgagctaacaaacttgatctcgtggatacagaatatagaatgattgattgataccagagtgtgagcatgggaggaggaaatgtagagcaactggtgaatgggtacaaaaagagttagataaaagacaagctgtattgcttgatagcacattacagtgactataattagcaacaatatattgtatatttcaatgtagctaggagagaggacaggaaatgttaccaacccatagaaatgatgaatactcaagaggatggataccccaaatactctgacattattatacattttatacgtgtaacaaatacatgtacccataaatatgtaaaatatcatgtatcagtaaaagaaaaaggctggatagagagaggtaaaaataggagaaatgagagcagtcagtgcacataagagtaatatgcttgttatactgtgtggctacactggttaaggaaattcctgctgcatataacccaaatttgccattagaggttaagaaaactttccacttaacaatttaaaaattatacaactaaaacatccattatttaaaaatcaacataaagaagcaaaaaaaaaaaaaaaagaatagtaatcaaaattacaccgttgttgatatactgtattcccttctaggttttgggttaatacgtctgtacattttttcttttttaaaaagaaaatgagatcatactaaaagaatcacactgttttataaccttttttcccattcaccaatatgtactgaaaaacagtattttaatggctgtatagtttttccattatgttaatatgtcataatttactatgaatctcctgttgagttattttaattctaatgtttcactaaacatttttaaaaaacatctgcagtagaatcataacatacatctttatttccccaagataagttgatagatgctaagtgaaaaggtatgcatatttttgagggttttagatcctctctagtattctacttttcctattagtataggataaataagacaagatgactgaaatgaaaaggataggtgtgagacattaatattatcaattattcagcatagacatgtgtagattttatttggaatgctgcaagtaacatgtactacttgggtcaaaataagctcattacaaaataggttatcaagtagttcattattctagttaagaataaattgggtccctacgtttccctttttgacctaagacattttcctttgtaaagagtacttggaaactggaagtaccaatggattttcttttctctattttttaaaataaagacttcatgagtcctctccattagtactgtaagagaaaatgctcttggaataaactctaagatacatgacaaaataagctgccctcaacagataaaatcttcacctactttggtcaccagggaggttcaaattagccgggtattagaaaagtttccatcagtaggaaagggaaagcatcctctagaactagatccgtggtgtggatatcaattgaaaggccatacttgggatgaaggcataaataaggtagagtcattgtggagatggctcatagaggaagagacgtctgtgaatttatcctcaaataattttctcataaataaaacttaacaagttaatagatctcaaaacctggagctatccaaatggtgcagtgataagcgtagtgccccaagtacatttttcttttaattggtattcacataactagctatagtaataattattaaatagtgaagtccattgtgaaaagcaagggccatgtttcatttatttttgttttttgagcttttatcgcgtttaatagtaggcaatcaatcattgttgaactaaataactcattctttcattcttaacagactggattatggacagaacttggaaatattgagaataatttcttaaagccacttcatataggacttaatatgtcaaaagcacattatgaagcagaaattaaaaatagccaaggttggtaatgtgcaattttgttttcaattaggtctaaaaagtagtctaattttggaactgtcatattcaaatttaagaactttttaaaaatcttgtactttagagaccataacagctaagccattttatttatagttaaaattcttagcagatctataagctaatttacctaaaatcgggttaatgaagacttaaaccaaatattacattgtaaagcctcaaggtctgattaagaatctgtattacagctatttccgtttgggtaccattcctttggtattgctgggtccactctccatctcactctcaagtaaatccatacaaattatgaaaagaatcttagatccagaatttttttaagtcaataattctataataatcgtgtgatctcttccgtatatctgtggtggtgcttttataggcattaccggaaattttgtttttagtataatggctataattctgattatatactgaagaaaacagtttcatgaatcctatacatgccaaaataatgctatttatctaaagaagcattaatttacatgttgcagaattttgatatttcattctgtttgcttatagcttaagtataccctgagctgttaaacaatggacttaataatttatacaaataactgacatgttttaagttagtgaatgaaagtagcttatacctttgttattgaaatctgagagttaagtgtcacacatgatttttcttctcttacagaggcccagaaatctaaagatctttgttctataactgtaagtggagaagagatccctaatatgcctcctgaaatgcagcttaag

SEQ ID NO: 12301 - DNA, 891 bp, Homo sapiens
ggttttttatcagcaattggacaccctttccccaaaatgatttttaatcatggaaggaaaaagagaacttggaattaccttgaatttgaagaagaagaaaataaacagttagcagactcaatggcttctctggcatatctagtatttgtacagggcatccatattgatcagcttccaatggtcttaagcccattgtaccttttgcagtttaatatggggcacattgaagtctttttgcaaagaacagaagagtctgttatctccaaaggattggagctgctggagaatagtttattgagaatagaagacaatagtctactttaccagtacttagaaatcaagagttttcttactgtacctcagaggaaaaagagtttagctatgcttcagctgtatattaacaagttggattcacaaggcaaatatacattatttaggtgcttattgaatacaagtaatcactcaggtgtggaggcttttattattcaaaatatcaaaaatcaaattgacatgtcattaaagagaacacgtaacaacaaatggtttacaggaccacagttgatttcccttcttgatttggtactttttctcccagagggtgcagaaacagatttactgcaaaactcagataggattatggcttcattaaatttattgaggtatttggttatcaaagataatgaaaatgacaatcaaactggattatggacagaacttggaaatattgagaataatttcttaaagccacttcatataggacttaatatgtcaaaagcacattatgaagcagaaattaaaaatagccaagaggcccagaaatctaaagatctttgttctataactgtaagtggagaagagatccctaatatgcctcctgaaatgcagcttaag

SEQ ID NO: 12302 - DNA, 7138 bp, Homo sapiens
tggcgcatagtgttaggcgcatgctccttgatgcactgcggcgcggcgctccgaggctcggggacgcgcacgcaattcgctgttgttggctgacttccggtggtgccaaagccgtttccgtggaatcaggccggctgaatggaacaaaagtgggacttttaaaatgttgccctgtaagaagagaagaactacagtgacagagtccctacagcataaaggcaatcaagaggaaaacaacgtagacctagaatcagccgttaaaccagaatctgaccaggttaaggacttgagttcggtgtcactatcctgggatccaagtcatggcagagtagctggcttcgaagtacagtctttgcaggatgcaggaaatcagcttggtatggaggatacatctctgagctctggaatgctcacccagaacacaaatgtaccaattctagaaggtgttgatgtggccatctctcagggaatcaccctaccttccttggagtcttttcacccccttaatatacacattggtaaaggaaaactccacgctactggctcaaagagagggaaaaaaatgacactcaggcctgggccagttacccaagaagacagatgtgatcatcttaccctaaaggagcctttttcaggagagcctagtgaagaagtcaaggaagaaggagggaaacctcaaatgaattctgaaggggagataccttccctgccatcaggcagccaatctgcaaaaccagtaagccagcccaggaaatcaacccagccagatgtttgtgcctctcctcaagaaaagccactcaggactctgtttcaccaacctgaggaagagatagaagatggtggactcttcattccaatggaagaacaagacaatgaagaaagtgagaaaaggagaaaaaagaaaaagggtaccaagaggaaacgagatggaaggggtcaagaagggaccttggcatatgacctgaaactggatgacatgcttgaccgtaccttggaggatggtgccaagcagcacaatctaacagcagtcaatgtccgaaacatccttcatgaagtaatcacaaatgaacacgtggtagctatgatgaaagcagccatcagtgagacggaagatatgccaatgtttgagcctaaaatgacacgctctaaactgaaggaagtagtggaaaaaggagtggtaattccaacatggaatatttcaccaattaagaaggccaatgaaattaagcctcctcagtttgtggatatccaccttgaagaagatgattcctcagatgaagaataccagccggatgatgaagaagaagatgaaactgctgaagagagcttattggaaagtgatgttgaaagcactgcttcatctccacgtggggcaaagaaatccagattgaggcagtcttctgagatgactgaaacagatgaggagagtggcatattatcagaggctgagaaagtcaccacaccagccatcaggcacatcagtgctgaggtagtgcccatggggcccccgccccctccaaagccgaaacagaccagagatagtactttcatggagaagttacatgcggtagatgaggagctggcttccagtccagtctgcatggattctttccagcccatggatgacagtctcattgcatttcgaacgcgttctaagatgcccctgaaagatgttcccctgggccaattagaggcagagctccaagctccagacatcactccagatatgtatgaccccaatacggcagatgatgaggactggaagatgtggctggggggacttatgaatgatgatgtggggaatgaagatgaagcagatgatgatgatgatccagaatataatttcctggaagacctcgatgaaccagacacagaggatttccggactgaccgggcagtgagaatcaccaaaaaggaagtaaatgagctgatggaagagctgtttgaaactttccaagatgagatgggattctccaacatggaagatgatggcccagaagaggaggagtgtgtagctgagcctcgtcctaactttaacacccctcaagctctacggtttgaggaaccactggccaacctgttaaatgaacaacatcggacagtgaaggagctatttgaacagctgaagatgaagaaatcttcagccaaacagctgcaggaagtagagaaggttaaaccccagagtgagaaagttcatcagactctgattctggacccagcacagaggaagagactccagcagcagatgcagcagcacgttcagctcttgacccaaatccaccttcttgccacctgcaaccccaacctcaatccggaggccactaccaccaggatatttcttaaagagctgggaacctttgctcaaagctccatcgcccttcaccatcagtacaaccccaagtttcagaccctgttccaaccctgtaacttgatgggagctatgcagctgattgaagacttcagcacacatgtcagcattgactgcagccctcataaaactgtcaagaagactgcgaatgaatttccctgtttgccaaagcaagtggcttggattctggccacaagcaaggttttcatgtatccagagttacttccagtgtgttccctgaaggcaaagaatccccaggataagatcgtcttcaccaaggctgaggacaatttgttagctttaggactgaagcattttgaaggaactgagtttcctaatcctctaatcagcaagtaccttctaacctgcaaaactgcccaccaactgacagtgagaatcaagaacctcaacatgaacagagctcctgacaacatcattaaattttataagaagaccaaacagctgccagtcctaggaaaatgctgtgaagagatccagccacatcagtggaagccacctatagagagagaagaacaccggctcccattctggttaaaggccagtctgccatccatccaggaagaactgcggcacatggctgatggtgctagagaggtaggaaatatgactggaaccactgagatcaactcagatcgaagcctagaaaaagacaatttggagttggggagtgaatctcggtacccactgctattgcctaagggtgtagtcctgaaactgaagccagttgccacccgtttccccaggaaggcttggagacagaagcgttcatcagtcctgaagcccctccttatccaacccagcccctctctccagcccagcttcaaccctgggaaaacaccagcccgatcaactcattcagaagcccctccgagcaaaatggtgctccggattcctcacccaatacagccagccactgttttacagacagttccaggtgtccctccactgggggtcagtggaggtgagagttttgagtctcctgcagcactgcctgctgtgccccctgaggccaggacaagcttccctctgtctgagtcccagactttgctctcttctgcccctgtgcccaaggtaatgctgccctcccttgccccttctaagtttcgaaagccatatgtgagacggagaccctcaaagagaagaggagtcaaggcctctccctgtatgaaacctgcccctgttatccaccaccctgcatctgttatcttcactgttcctgctaccactgtgaagattgtgagccttggcggtggctgtaacatgatccagcctgtcaatgcggctgtggcccagagtccccagactattcccatcactaccctcttggttaaccctacttccttcccctgtccattgaaccagtcccttgtggcctcctctgtctcacccttaattgtttctggcaattctgtgaatcttcctataccatccacccctgaagataaggcccacgtgaatgtggacattgcttgtgctgtggctgatggggaaaatgcctttcagggcctagaacccaaattagagccccaggaactatctcctctctctgctactgttttcccgaaagtggaacatagcccagggcctccactagcagatgcagagtgccaagaaggattgtcagagaatagtgcctgtcgctggaccgttgtgaaaacagaggaggggaggcaagctctggagccgctccctcagggcatccaggagtctctaaacaaccctacccctggggatttagaggaaattgtcaagatggaacctgaagaagctagagaggaaatcagtggatcccctgagcgtgatatttgtgatgacatcaaagtggaacatgctgtggaattggacactggtgccccaagcgaggagttgagcagtgctggagaagtaacgaaacagacagtcttacagaaggaagaggagaggagtcagccaactaaaaccccttcatcttctcaagagccccctgatgaaggaacctcagggacagatgtgaacaaaggatcatcaaagaatgctttgtcctcaatggatcctgaagtgaggcttagtagccccccagggaagccagaagattcatccagtgttgatggtcagtcagtggggactccagttgggccagaaactggaggagagaagaatgggccagaagaagaggaagaagaggactttgatgacctcacccaagatgaggaagatgaaatgtcatcagcttctgaggaatctgtgctttctgtcccagaactccaggaaacaatggagaaactgacttggctggcatctgaaaggcgcatgagtcaggagggtgagtctgaagaagagaattctcaggaggagaactctgagccagaagaagaggaggaagaagaagcagaaggaatggaaagcctgcagaaagaggatgaaatgacggatgaagcagttggagactctgctgagaagcctcctacttttgcttcacctgagactgctccagaagtggagaccagcagaactccaccaggagagagcatcaaagctgctggaaaaggccggaacaatcatcgagctcgcaacaagcggggaagtcgggctcgggccagcaaggacacctccaagctgctgttgctgtatgatgaggacattctcgagcgagatccactcagggagcagaaggacttggcctttgcccaagcttatctgaccagggtgcgagaagccctacaacatatccctggcaagtatgaagacttccttcaagtcatctatgaatttgagtcaagtacccagagacggacggctgtagatctctacaaaagcctgcaaattctgctccaagactggcctcagctgttgaaagactttgctgctttcctgttacctgagcaagctctggcctgtggattatttgaggagcagcaggcttttgagaagagccgcaagttccttcggcagctggagatttgctttgcagagaacccctcacaccaccagaagattatcaaggtcctccaaggctgtgcagactgccttccccaggagatcaccgagctcaagacacagatgtggcagctcctcaagggccacgaccacctgcaggatgagttttctatcttctttgaccacttgcgcccagcagctagccggatgggtgactttgaagagatcaattggactgaggaaaaggagtatgagtttgatggctttgaagaagtggccctgcctgatgtggaagaagaggaggagcctcccaagatacccacagcctcaaagaacaagaggaaaaaagagatcggggtccaaaatcatgataaggagactgaatggccagatggggccaaggactgtgcctgctcctgccatgaaggaggtccagattccaagctgaagaagagcaaaaggcggagctgtagccactgtagcagcaaggtctgtgacagcaaatcctacaagagcaaggagccccatgagttggtgggcagcagcccccaccgagaggctagtcctatgcctggtgctaaggaagctgggcagggcaaggatatgatggaagaggaagccccagaggagcgggagagcactgaggccacccagagcaggactgtcaggaccaccagaaagggagagatgcctgtttcaggattggcagtggggagcactttgccatcccctcgagaagtgactgttacagaacggctcctcctggatggcccaccacctcattcaccagagactcctcaatttccccccacaactggagctgtactgtacactgttaagagaaaccaggttgggcctgaggttcgctcctgccccaaggcatcccccagacttcagaaagagagggagggccaaaaggcagtgagtgagtcagaggctttgatgctggtctgggatgcatcagaaactgagaaattgcctggtaccgtggaaccccctgcttccttcctgagtcctgtttcctcaaagaccagagatgcagggagaagacatgtgtccgggaaaccagacactcaagagagatggctgccctcaagcagagctcgggtgaagacaagagacaggacgtgccctgtccatgaatctccatcaggaattgacacctcagagacttctcccaaagcccctagagggggtttggctaaagacagtggaacacaggccaagggtccagagggggagcagcagccaaaggccgcagaagctacggtgtgtgccaacaacagcaaggtcagctccactggggaaaaggttgtcctgtggacaagggaagctgaccgtgtgatcctcaccatgtgccaggagcaaggggcacagccacagaccttcaacatcatctcccagcagctgggaaataagacccctgctgaggtttcccaccgttttcgagaactcatgcagctcttccacactgcctgtgaagccagctctgaggatgaggatgatgcaaccagtaccagcaatgcagaccagctgtctgaccatggggaccttctgtctgaagaggagctggatgaatgagactctgggaatcatctacacaggaccaaacccaacaggcgccctggcaccggggagggggtagttgtactctgcttgtacagtccttgagcccagtttacagatctggagagcaggaggccaggacaaggacaaaggctggaggatggagtaggacccaggggctctgccatcctaggcatcattcaaggtcttttatgaagactttacagatgtcctctgtaaatagcatcgagagtggagttcagctcc

SEQ ID NO: 12303 - DNA, 5118 bp, Homo sapiens
gacttccggtggtgccaaagccgtttccgtggaatcaggccggctgaatggaacaaaagtgggacttttaaaatgttgccctgtaagaagagaagaactacagtgacagagtccctacagcataaaggcaatcaagaggaaaacaacgtagacctagaatcagccgttaaaccagaatctgaccaggttaaggacttgagttcggtgtcactatcctgggatccaagtcatggcagagtagctggcttcgaagtacagtctttgcaggatgcaggaaatcagcttggtatggaggatacatctctgagctctggaatgctcacccagaacacaaatgtaccaattctagaaggtgttgatgtggccatctctcagggaatcaccctaccttccttggagtcttttcacccccttaatatacacattggtaaaggaaaactccacgctactggctcaaagagagggaaaaaaatgacactcaggcctgggccagttacccaagaagacagatgtgatcatcttaccctaaaggagcctttttcaggagagcctagtgaagaagtcaaggaagaaggagggaaacctcaaatgaattctgaaggggagataccttccctgccatcaggcagccaatctgcaaaaccagtaagccagcccaggaaatcaacccagccagatgtttgtgcctctcctcaagaaaagccactcaggactctgtttcaccaacctgaggaagagatagaagatggtggactcttcattccaatggaagaacaagacaatgaagaaagtgagaaaaggagaaaaaagaaaaagggtaccaagaggaaacgagatggaaggggtcaagaagggaccttggcatatgacctgaaactggatgacatgcttgaccgtaccttggaggatggtgccaagcagcacaatctaacagcagtcaatgtccgaaacatccttcatgaagtaatcacaaatgaacacgtggtagctatgatgaaagcagccatcagtgagacggaagatatgccaatgtttgagcctaaaatgacacgctctaaactgaaggaagtagtggaaaaaggagtggtaattccaacatggaatatttcaccaattaagaaggccaatgaaattaagcctcctcagtttgtggatatccaccttgaagaagatgattcctcagatgaagaataccagccggatgatgaagaagaagatgaaactgctgaagagagcttattggaaagtgatgttgaaagcactgcttcatctccacgtggggcaaagaaatccagattgaggcagtcttctgagatgactgaaacagatgaggagagtggcatattatcagaggctgagaaagtcaccacaccagccatcaggcacatcagtgctgaggtagtgcccatggggcccccgccccctccaaagccgaaacagaccagagatagtactttcatggagaagttacatgcggtagatgaggagctggcttccagtccagtctgcatggattctttccagcccatggatgacagtctcattgcatttcgaacgcgttctaagatgcccctgaaagatgttcccctgggccaattagaggcagagctccaagctccagacatcactccagatatgtatgaccccaatacggcagatgatgaggactggaagatgtggctggggggacttatgaatgatgatgtggggaatgaagatgaagcagatgatgatgatgatccagaatataatttcctggaagacctcgatgaaccagacacagaggatttccggactgaccgggcagtgagaatcaccaaaaaggaagtaaatgagctgatggaagagctgtttgaaactttccaagatgagatgggattctccaacatggaagatgatggcccagaagaggaggagtgtgtagctgagcctcgtcctaactttaacacccctcaagctctacggtttgaggaaccactggccaacctgttaaatgaacaacatcggacagtgaaggagctatttgaacagctgaagatgaagaaatcttcagccaaacagctgcaggaagtagagaaggttaaaccccagagtgagaaagttcatcagactctgattctggacccagcacagaggaagagactccagcagcagatgcagcagcacgttcagctcttgacccaaatccaccttcttgccacctgcaaccccaacctcaatccggaggccactaccaccaggatatttcttaaagagctgggaacctttgctcaaagctccatcgcccttcaccatcagtacaaccccaagtttcagaccctgttccaaccctgtaacttgatgggagctatgcagctgattgaagacttcagcacacatgtcagcattgactgcagccctcataaaactgtcaagaagactgcgaatgaatttccctgtttgccaaagcaagtggcttggattctggccacaagcaaggttttcatgtatccagagttacttccagtgtgttccctgaaggcaaagaatccccaggataagatcgtcttcaccaaggctgaggacaatttgttagctttaggactgaagcattttgaaggaactgagtttcctaatcctctaatcagcaagtaccttctaacctgcaaaactgcccaccaactgacagtgagaatcaagaacctcaacatgaacagagctcctgacaacatcattaaattttataagaagaccaaacagctgccagtcctaggaaaatgctgtgaagagatccagccacatcagtggaagccacctatagagagagaagaacaccggctcccattctggttaaaggccagtctgccatccatccaggaagaactgcggcacatggctgatggtgctagagaggtaggaaatatgactggaaccactgagatcaactcagatcgaagcctagaaaaagacaatttggagttggggagtgaatctcggtacccactgctattgcctaagggtgtagtcctgaaactgaagccagttgccacccgtttccccaggaaggcttggagacagaagcgttcatcagtcctgaagcccctccttatccaacccagcccctctctccagcccagcttcaaccctgggaaaacaccagcccgatcaactcattcagaagcccctccgagcaaaatggtgctccggattcctcacccaatacagccagccactgttttacagacagttccaggtgtccctccactgggggtcagtggaggtgagagttttgagtctcctgcagcactgcctgctgtgccccctgaggccaggacaagcttccctctgtctgagtcccagactttgctctcttctgcccctgtgcccaaggtaatgctgccctcccttgccccttctaagtttcgaaagccatatgtgagacggagaccctcaaagagaagaggagtcaaggcctctccctgtatgaaacctgcccctgttatccaccaccctgcatctgttatcttcactgttcctgctaccactgtgaagattgtgagccttggcggtggctgtaacatgatccagcctgtcaatgcggctgtggcccagagtccccagactattcccatcactaccctcttggttaaccctacttccttcccctgtccattgaaccagtcccttgtggcctcctctgtctcacccttaattgtttctggcaattctgtgaatcttcctataccatccacccctgaagataaggcccacgtgaatgtggacattgcttgtgctgtggctgatggggaaaatgcctttcagggcctagaacccaaattagagccccaggaactatctcctctctctgctactgttttcccgaaagtggaacatagcccagggcctccactagcagatgcagagtgccaagaaggattgtcagagaatagtgcctgtcgctggaccgttgtgaaaacagaggaggggaggcaagctctggagccgctccctcagggcatccaggagtctctaaacaaccctacccctggggatttagaggaaattgtcaagatggaacctgaagaagctagagaggaaatcagtggatcccctgagcgtgatatttgtgatgacatcaaagtggaacatgctgtggaattggacactggtgccccaagcgaggagttgagcagtgctggagaagtaacgaaacagacagtcttacagaaggaagaggagaggagtcagccaactaaaaccccttcatcttctcaagagccccctgatgaaggaacctcagggacagatgtgaacaaaggatcatcaaagaatgctttgtcctcaatggatcctgaagtgaggcttagtagccccccagggaagccagaagattcatccagtgttgatggtcagtcagtggggactccagttgggccagaaactggaggagagaagaatgggccagaagaagaggaagaagaggactttgatgacctcacccaagatgaggaagatgaaatgtcatcagcttctgaggaatctgtgctttctgtcccagaactccaggtgagagctggagaatattctcaagtatttcgtggactcagtaatatgtatcacttattgatatgccacctgcttgcttgctgcactatggatagtcctaaaatcatttgtatttgatttgtgaatgcattatgggacatgattgtggagttgaggtgaaatgagatggaaaggatgaaattttacttattatattaaactcgtttacacattaaattgaatcacctgaccatactttaaatgccttaaaaaatagtaataggctgggcttggtggctcactcctgtagtcccagcactttgggaggctgaggtgggtggatcacaaggccaggagtttcagactggcctggccgacgtggtaaaaccccatctatattaaaaataacaaaaattagccaggcatggtggcggacacctgtaatccctgctgcttgggaggcagaggcaggagaattgcttgagcccgagagacagaggttgcagtgagccgagatcacgtcattgctctccagcctgggcaacagagcaaggctctgtctcaaaaaaaaaaaaaaaaaaaaaaaaaaaaaaa

SEQ ID NO: 12304 - DNA, 7823 bp, Homo sapiens
tggcgcatagtgttaggcgcatgctccttgatgcactgcggcgcggcgctccgaggctcggggacgcgcacgcaattcgctgttgttggctgacttccggtggtgccaaagccgtttccgtggaatcaggccggctggtgagggtacagaatggaacaaaagtgggacttttaaaatgttgccctgtaagaagagaagaactacagtgacagagtccctacagcataaaggcaatcaagaggaaaacaacgtagacctagaatcagccgttaaaccagaatctgaccaggttaaggacttgagttcggtgtcactatcctgggatccaagtcatggcagagtagctggcttcgaagtacagtctttgcaggatgcaggaaatcagcttggtatggaggatacatctctgagctctggaatgctcacccagaacacaaatgtaccaattctagaaggtgttgatgtggccatctctcagggaatcaccctaccttccttggagtcttttcacccccttaatatacacattggtaaaggaaaactccacgctactggctcaaagagagggaaaaaaatgacactcaggcctgggccagttacccaagaagacagatgtgatcatcttaccctaaaggagcctttttcaggagagcctagtgaagaagtcaaggaagaaggagggaaacctcaaatgaattctgaaggggagataccttccctgccatcaggcagccaatctgcaaaaccagtaagccagcccaggaaatcaacccagccagatgtttgtgcctctcctcaagaaaagccactcaggactctgtttcaccaacctgaggaagagatagaagatggtggactcttcattccaatggaagaacaagacaatgaagaaagtgagaaaaggagaaaaaagaaaaagggtaccaagaggaaacgagatggaaggggtcaagaagggaccttggcatatgacctgaaactggatgacatgcttgaccgtaccttggaggatggtgccaagcagcacaatctaacagcagtcaatgtccgaaacatccttcatgaagtaatcacaaatgaacacgtggtagctatgatgaaagcagccatcagtgagacggaagatatgccaatgtttgagcctaaaatgacacgctctaaactgaaggaagtagtggaaaaaggagtggtaattccaacatggaatatttcaccaattaagaaggccaatgaaattaagcctcctcagtttgtggatatccaccttgaagaagatgattcctcagatgaagaataccagccggatgatgaagaagaagatgaaactgctgaagagagcttattggaaagtgatgttgaaagcactgcttcatctccacgtggggcaaagaaatccagattgaggcagtcttctgagatgactgaaacagatgaggagagtggcatattatcagaggctgagaaagtcaccacaccagccatcaggcacatcagtgctgaggtagtgcccatggggcccccgccccctccaaagccgaaacagaccagagatagtactttcatggagaagttacatgcggtagatgaggagctggcttccagtccagtctgcatggattctttccagcccatggatgacagtctcattgcatttcgaacgcgttctaagatgcccctgaaagatgttcccctgggccaattagaggcagagctccaagctccagacatcactccagatatgtatgaccccaatacggcagatgatgaggactggaagatgtggctggggggacttatgaatgatgatgtggggaatgaagatgaagcagatgatgatgatgatccagaatataatttcctggaagacctcgatgaaccagacacagaggatttccggactgaccgggcagtgagaatcaccaaaaaggaagtaaatgagctgatggaagagctgtttgaaactttccaagatgagatgggattctccaacatggaagatgatggcccagaagaggaggagtgtgtagctgagcctcgtcctaactttaacacccctcaagctctacggtttgaggaaccactggccaacctgttaaatgaacaacatcggacagtgaaggagctatttgaacagctgaagatgaagaaatcttcagccaaacagctgcaggaagtagagaaggttaaaccccagagtgagaaagttcatcagactctgattctggacccagcacagaggaagagactccagcagcagatgcagcagcacgttcagctcttgacccaaatccaccttcttgccacctgcaaccccaacctcaatccggaggccactaccaccaggatatttcttaaagagctgggaacctttgctcaaagctccatcgcccttcaccatcagtacaaccccaagtttcagaccctgttccaaccctgtaacttgatgggagctatgcagctgattgaagacttcagcacacatgtcagcattgactgcagccctcataaaactgtcaagaagactgcgaatgaatttccctgtttgccaaagcaagtggcttggattctggccacaagcaaggttttcatgtatccagagttacttccagtgtgttccctgaaggcaaagaatccccaggataagatcgtcttcaccaaggctgaggacaatttgttagctttaggactgaagcattttgaaggaactgagtttcctaatcctctaatcagcaagtaccttctaacctgcaaaactgcccaccaactgacagtgagaatcaagaacctcaacatgaacagagctcctgacaacatcattaaattttataagaagaccaaacagctgccagtcctaggaaaatgctgtgaagagatccagccacatcagtggaagccacctatagagagagaagaacaccggctcccattctggttaaaggccagtctgccatccatccaggaagaactgcggcacatggctgatggtgctagagaggtaggaaatatgactggaaccactgagatcaactcagatcgaagcctagaaaaagacaatttggagttggggagtgaatctcggtacccactgctattgcctaagggtgtagtcctgaaactgaagccagttgccacccgtttccccaggaaggcttggagacagaagcgttcatcagtcctgaagcccctccttatccaacccagcccctctctccagcccagcttcaaccctgggaaaacaccagcccgatcaactcattcagaagcccctccgagcaaaatggtgctccggattcctcacccaatacagccagccactgttttacagacagttccaggtgtccctccactgggggtcagtggaggtgagagttttgagtctcctgcagcactgcctgctgtgccccctgaggccaggacaagcttccctctgtctgagtcccagactttgctctcttctgcccctgtgcccaaggtaatgctgccctcccttgccccttctaagtttcgaaagccatatgtgagacggagaccctcaaagagaagaggagtcaaggcctctccctgtatgaaacctgcccctgttatccaccaccctgcatctgttatcttcactgttcctgctaccactgtgaagattgtgagccttggcggtggctgtaacatgatccagcctgtcaatgcggctgtggcccagagtccccagactattcccatcactaccctcttggttaaccctacttccttcccctgtccattgaaccagtcccttgtggcctcctctgtctcacccttaattgtttctggcaattctgtgaatcttcctataccatccacccctgaagataaggcccacgtgaatgtggacattgcttgtgctgtggctgatggggaaaatgcctttcagggcctagaacccaaattagagccccaggaactatctcctctctctgctactgttttcccgaaagtggaacatagcccagggcctccactagcagatgcagagtgccaagaaggattgtcagagaatagtgcctgtcgctggaccgttgtgaaaacagaggaggggaggcaagctctggagccgctccctcagggcatccaggagtctctaaacaaccctacccctggggatttagaggaaattgtcaagatggaacctgaagaagctagagaggaaatcagtggatcccctgagcgtgatatttgtgatgacatcaaagtggaacatgctgtggaattggacactggtgccccaagcgaggagttgagcagtgctggagaagtaacgaaacagacagtcttacagaaggaagaggagaggagtcagccaactaaaaccccttcatcttctcaagagccccctgatgaaggaacctcagggacagatgtgaacaaaggatcatcaaagaatgctttgtcctcaatggatcctgaagtgaggcttagtagccccccagggaagccagaagattcatccagtgttgatggtcagtcagtggggactccagttgggccagaaactggaggagagaagaatgggccagaagaagaggaagaagaggactttgatgacctcacccaagatgaggaagatgaaatgtcatcagcttctgaggaatctgtgctttctgtcccagaactccaggaaacaatggagaaactgacttggctggcatctgaaaggcgcatgagtcaggagggtgagtctgaagaagagaattctcaggaggagaactctgagccagaagaagaggaggaagaagaagcagaaggaatggaaagcctgcagaaagaggatgaaatgacggatgaagcagttggagactctgctgagaagcctcctacttttgcttcacctgagactgctccagaagtggagaccagcagaactccaccaggagagagcatcaaagctgctggaaaaggccggaacaatcatcgagctcgcaacaagcggggaagtcgggctcgggccagcaaggacacctccaagctgctgttgctgtatgatgaggacattctcgagcgagatccactcagggagcagaaggacttggcctttgcccaagcttatctgaccagggtgcgagaagccctacaacatatccctggcaagtatgaagacttccttcaagtcatctatgaatttgagtcaagtacccagagacggacggctgtagatctctacaaaagcctgcaaattctgctccaagactggcctcagctgttgaaagactttgctgctttcctgttacctgagcaagctctggcctgtggattatttgaggagcagcaggcttttgagaagagccgcaagttccttcggcagctggagatttgctttgcagagaacccctcacaccaccagaagattatcaaggtcctccaaggctgtgcagactgccttccccaggagatcaccgagctcaagacacagatgtggcagctcctcaagggccacgaccacctgcaggatgagttttctatcttctttgaccacttgcgcccagcagctagccggatgggtgactttgaagagatcaattggactgaggaaaaggagtatgagtttgatggctttgaagaagtggccctgcctgatgtggaagaagaggaggagcctcccaagatacccacagcctcaaagaacaagaggaaaaaagagatcggggtccaaaatcatgataaggagactgaatggccagatggggccaaggactgtgcctgctcctgccatgaaggaggtccagattccaagctgaagaagagcaaaaggcggagctgtagccactgtagcagcaaggtctgtgacagcaaatcctacaagagcaaggagccccatgagttggtgggcagcagcccccaccgagaggctagtcctatgcctggtgctaaggaagctgggcagggcaaggatatgatggaagaggaagccccagaggagcgggagagcactgaggccacccagagcaggactgtcaggaccaccagaaagggagagatgcctgtttcagcaggattggcagtggggagcactttgccatcccctcgagaagtgactgttacagaacggctcctcctggatggcccaccacctcattcaccagagactcctcaatttccccccacaactggagctgtactgtacactgttaagagaaaccaggttgggcctgaggttcgctcctgccccaaggcatcccccagacttcagaaagagagggagggccaaaaggcagtgagtgagtcagaggctttgatgctggtctgggatgcatcagaaactgagaaattgcctggtaccgtggaaccccctgcttccttcctgagtcctgtttcctcaaagaccagagatgcagggagaagacatgtgtccgggaaaccagacactcaagagagatggctgccctcaagcagagctcgggtgaagacaagagacaggacgtgccctgtccatgaatctccatcaggaattgacacctcagagacttctcccaaagcccctagagggggtttggctaaagacagtggaacacaggccaagggtccagagggggagcagcagccaaaggccgcagaagctacggtgtgtgccaacaacagcaaggtcagctccactggggaaaaggttgtcctgtggacaagggaagctgaccgtgtgatcctcaccatgtgccaggagcaaggggcacagccacagaccttcaacatcatctcccagcagctgggaaataagacccctgctgaggtttcccaccgttttcgagaactcatgcagctcttccacactgcctgtgaagccagctctgaggatgaggatgatgcaaccagtaccagcaatgcagaccagctgtctgaccatggggaccttctgtctgaagaggagctggatgaatgagactctgggaatcatctacacaggaccaaacccaacaggcgccctggcaccggggagggggtagttgtactctgcttgtacagtccttgagcccagtttacagatctggagagcaggaggccaggacaaggacaaaggctggaggatggagtaggacccaggggctctgccatcctaggcatcattcaaggtcttttatgaagactttacagatgtcctctgtaaatagcatcgagagtggagttcagctcctttctctacttttttttggtctgatggcacatatttattgttctgtggtctaatcacagtgtttctaaatgtaaaaagtgcatatgttggtgtagctagtcccgcgacattgagctcctctgcatgaagacactgggctcctgcatccagctgtttttattgcaaactagctcctttctcccacactgggaactttagtccacgaggctgtcaccaccctggtagcactgggccaggctttgtagctcctgcagcagctctgctacgtcatcgtgctccactccagcatccatgaagctggcccagcgccgcaagtcgagtttggtgaggtctctggccaaggcttccagggtctggtgcagggacgaagaggaacacagtgccccaaacactgggatgctctccactgctgtggagggagaggaaacagagacctgtagatggatgattattctgccctgggactcgccaaactgataaggaagtccaaccttagtagacttgattgtaaactcaacaaatttggtgtattgtccccttagtacaccagtactccagaggaagaatgcttttcttgggagccatagggtgaataaaggaatgtttaactgtggactttttcagcacttttaatccaggaatggagatagtaaaacctctcccatacttg

SEQ ID NO: 12305 - DNA, 7713 bp, Homo sapiens
ctctcccggaggggactcctcccaccgccgagttttcccgagaatgaggccgcgcccactgacgcgctgtggttccaaaacgagaaagtactgaaggaatggaacaaaagtgggacttttaaaatgttgccctgtaagaagagaagaactacagtgacagagtccctacagcataaaggcaatcaagaggaaaacaacgtagacctagaatcagccgttaaaccagaatctgaccaggttaaggacttgagttcggtgtcactatcctgggatccaagtcatggcagagtagctggcttcgaagtacagtctttgcaggatgcaggaaatcagcttggtatggaggatacatctctgagctctggaatgctcacccagaacacaaatgtaccaattctagaaggtgttgatgtggccatctctcagggaatcaccctaccttccttggagtcttttcacccccttaatatacacattggtaaaggaaaactccacgctactggctcaaagagagggaaaaaaatgacactcaggcctgggccagttacccaagaagacagatgtgatcatcttaccctaaaggagcctttttcaggagagcctagtgaagaagtcaaggaagaaggagggaaacctcaaatgaattctgaaggggagataccttccctgccatcaggcagccaatctgcaaaaccagtaagccagcccaggaaatcaacccagccagatgtttgtgcctctcctcaagaaaagccactcaggactctgtttcaccaacctgaggaagagatagaagatggtggactcttcattccaatggaagaacaagacaatgaagaaagtgagaaaaggagaaaaaagaaaaagggtaccaagaggaaacgagatggaaggggtcaagaagggaccttggcatatgacctgaaactggatgacatgcttgaccgtaccttggaggatggtgccaagcagcacaatctaacagcagtcaatgtccgaaacatccttcatgaagtaatcacaaatgaacacgtggtagctatgatgaaagcagccatcagtgagacggaagatatgccaatgtttgagcctaaaatgacacgctctaaactgaaggaagtagtggaaaaaggagtggtaattccaacatggaatatttcaccaattaagaaggccaatgaaattaagcctcctcagtttgtggatatccaccttgaagaagatgattcctcagatgaagaataccagccggatgatgaagaagaagatgaaactgctgaagagagcttattggaaagtgatgttgaaagcactgcttcatctccacgtggggcaaagaaatccagattgaggcagtcttctgagatgactgaaacagatgaggagagtggcatattatcagaggctgagaaagtcaccacaccagccatcaggcacatcagtgctgaggtagtgcccatggggcccccgccccctccaaagccgaaacagaccagagatagtactttcatggagaagttacatgcggtagatgaggagctggcttccagtccagtctgcatggattctttccagcccatggatgacagtctcattgcatttcgaacgcgttctaagatgcccctgaaagatgttcccctgggccaattagaggcagagctccaagctccagacatcactccagatatgtatgaccccaatacggcagatgatgaggactggaagatgtggctggggggacttatgaatgatgatgtggggaatgaagatgaagcagatgatgatgatgatccagaatataatttcctggaagacctcgatgaaccagacacagaggatttccggactgaccgggcagtgagaatcaccaaaaaggaagtaaatgagctgatggaagagctgtttgaaactttccaagatgagatgggattctccaacatggaagatgatggcccagaagaggaggagtgtgtagctgagcctcgtcctaactttaacacccctcaagctctacggtttgaggaaccactggccaacctgttaaatgaacaacatcggacagtgaaggagctatttgaacagctgaagatgaagaaatcttcagccaaacagctgcaggaagtagagaaggttaaaccccagagtgagaaagttcatcagactctgattctggacccagcacagaggaagagactccagcagcagatgcagcagcacgttcagctcttgacccaaatccaccttcttgccacctgcaaccccaacctcaatccggaggccactaccaccaggatatttcttaaagagctgggaacctttgctcaaagctccatcgcccttcaccatcagtacaaccccaagtttcagaccctgttccaaccctgtaacttgatgggagctatgcagctgattgaagacttcagcacacatgtcagcattgactgcagccctcataaaactgtcaagaagactgcgaatgaatttccctgtttgccaaagcaagtggcttggattctggccacaagcaaggttttcatgtatccagagttacttccagtgtgttccctgaaggcaaagaatccccaggataagatcgtcttcaccaaggctgaggacaatttgttagctttaggactgaagcattttgaaggaactgagtttcctaatcctctaatcagcaagtaccttctaacctgcaaaactgcccaccaactgacagtgagaatcaagaacctcaacatgaacagagctcctgacaacatcattaaattttataagaagaccaaacagctgccagtcctaggaaaatgctgtgaagagatccagccacatcagtggaagccacctatagagagagaagaacaccggctcccattctggttaaaggccagtctgccatccatccaggaagaactgcggcacatggctgatggtgctagagaggtaggaaatatgactggaaccactgagatcaactcagatcgaagcctagaaaaagacaatttggagttggggagtgaatctcggtacccactgctattgcctaagggtgtagtcctgaaactgaagccagttgccacccgtttccccaggaaggcttggagacagaagcgttcatcagtcctgaagcccctccttatccaacccagcccctctctccagcccagcttcaaccctgggaaaacaccagcccgatcaactcattcagaagcccctccgagcaaaatggtgctccggattcctcacccaatacagccagccactgttttacagacagttccaggtgtccctccactgggggtcagtggaggtgagagttttgagtctcctgcagcactgcctgctgtgccccctgaggccaggacaagcttccctctgtctgagtcccagactttgctctcttctgcccctgtgcccaaggtaatgctgccctcccttgccccttctaagtttcgaaagccatatgtgagacggagaccctcaaagagaagaggagtcaaggcctctccctgtatgaaacctgcccctgttatccaccaccctgcatctgttatcttcactgttcctgctaccactgtgaagattgtgagccttggcggtggctgtaacatgatccagcctgtcaatgcggctgtggcccagagtccccagactattcccatcactaccctcttggttaaccctacttccttcccctgtccattgaaccagtcccttgtggcctcctctgtctcacccttaattgtttctggcaattctgtgaatcttcctataccatccacccctgaagataaggcccacgtgaatgtggacattgcttgtgctgtggctgatggggaaaatgcctttcagggcctagaacccaaattagagccccaggaactatctcctctctctgctactgttttcccgaaagtggaacatagcccagggcctccactagcagatgcagagtgccaagaaggattgtcagagaatagtgcctgtcgctggaccgttgtgaaaacagaggaggggaggcaagctctggagccgctccctcagggcatccaggagtctctaaacaaccctacccctggggatttagaggaaattgtcaagatggaacctgaagaagctagagaggaaatcagtggatcccctgagcgtgatatttgtgatgacatcaaagtggaacatgctgtggaattggacactggtgccccaagcgaggagttgagcagtgctggagaagtaacgaaacagacagtcttacagaaggaagaggagaggagtcagccaactaaaaccccttcatcttctcaagagccccctgatgaaggaacctcagggacagatgtgaacaaaggatcatcaaagaatgctttgtcctcaatggatcctgaagtgaggcttagtagccccccagggaagccagaagattcatccagtgttgatggtcagtcagtggggactccagttgggccagaaactggaggagagaagaatgggccagaagaagaggaagaagaggactttgatgacctcacccaagatgaggaagatgaaatgtcatcagcttctgaggaatctgtgctttctgtcccagaactccaggaaacaatggagaaactgacttggctggcatctgaaaggcgcatgagtcaggagggtgagtctgaagaagagaattctcaggaggagaactctgagccagaagaagaggaggaagaagaagcagaaggaatggaaagcctgcagaaagaggatgaaatgacggatgaagcagttggagactctgctgagaagcctcctacttttgcttcacctgagactgctccagaagtggagaccagcagaactccaccaggagagagcatcaaagctgctggaaaaggccggaacaatcatcgagctcgcaacaagcggggaagtcgggctcgggccagcaaggacacctccaagctgctgttgctgtatgatgaggacattctcgagcgagatccactcagggagcagaaggacttggcctttgcccaagcttatctgaccagggtgcgagaagccctacaacatatccctggcaagtatgaagacttccttcaagtcatctatgaatttgagtcaagtacccagagacggacggctgtagatctctacaaaagcctgcaaattctgctccaagactggcctcagctgttgaaagactttgctgctttcctgttacctgagcaagctctggcctgtggattatttgaggagcagcaggcttttgagaagagccgcaagttccttcggcagctggagatttgctttgcagagaacccctcacaccaccagaagattatcaaggtcctccaaggctgtgcagactgccttccccaggagatcaccgagctcaagacacagatgtggcagctcctcaagggccacgaccacctgcaggatgagttttctatcttctttgaccacttgcgcccagcagctagccggatgggtgactttgaagagatcaattggactgaggaaaaggagtatgagtttgatggctttgaagaagtggccctgcctgatgtggaagaagaggaggagcctcccaagatacccacagcctcaaagaacaagaggaaaaaagagatcggggtccaaaatcatgataaggagactgaatggccagatggggccaaggactgtgcctgctcctgccatgaaggaggtccagattccaagctgaagaagagcaaaaggcggagctgtagccactgtagcagcaaggtctgtgacagcaaatcctacaagagcaaggagccccatgagttggtgggcagcagcccccaccgagaggctagtcctatgcctggtgctaaggaagctgggcagggcaaggatatgatggaagaggaagccccagaggagcgggagagcactgaggccacccagagcaggactgtcaggaccaccagaaagggagagatgcctgtttcaggattggcagtggggagcactttgccatcccctcgagaagtgactgttacagaacggctcctcctggatggcccaccacctcattcaccagagactcctcaatttccccccacaactggagctgtactgtacactgttaagagaaaccaggttgggcctgaggttcgctcctgccccaaggcatcccccagacttcagaaagagagggagggccaaaaggcagtgagtgagtcagaggctttgatgctggtctgggatgcatcagaaactgagaaattgcctggtaccgtggaaccccctgcttccttcctgagtcctgtttcctcaaagaccagagatgcagggagaagacatgtgtccgggaaaccagacactcaagagagatggctgccctcaagcagagctcgggtgaagacaagagacaggacgtgccctgtccatgaatctccatcaggaattgacacctcagagacttctcccaaagcccctagagggggtttggctaaagacagtggaacacaggccaagggtccagagggggagcagcagccaaaggccgcagaagctacggtgtgtgccaacaacagcaaggtcagctccactggggaaaaggttgtcctgtggacaagggaagctgaccgtgtgatcctcaccatgtgccaggagcaaggggcacagccacagaccttcaacatcatctcccagcagctgggaaataagacccctgctgaggtttcccaccgttttcgagaactcatgcagctcttccacactgcctgtgaagccagctctgaggatgaggatgatgcaaccagtaccagcaatgcagaccagctgtctgaccatggggaccttctgtctgaagaggagctggatgaatgagactctgggaatcatctacacaggaccaaacccaacaggcgccctggcaccggggagggggtagttgtactctgcttgtacagtccttgagcccagtttacagatctggagagcaggaggccaggacaaggacaaaggctggaggatggagtaggacccaggggctctgccatcctaggcatcattcaaggtcttttatgaagactttacagatgtcctctgtaaatagcatcgagagtggagttcagctcctttctctacttttttttggtctgatggcacatatttattgttctgtggtctaatcacagtgtttctaaatgtaaaaagtgcatatgttggtgtagctagtcccgcgacattgagctcctctgcatgaagacactgggctcctgcatccagctgtttttattgcaaactagctcctttctcccacactgggaactttagtccacgaggctgtcaccaccctggtagcactgggccaggctttgtagctcctgcagcagctctgctacgtcatcgtgctccactccagcatccatgaagctggcccagcgccgcaagtcgagtttggtgaggtctctggccaaggcttccagggtctggtgcagggacgaagaggaacacagtgccccaaacactgggatgctctccactgctgtggagggagaggaaacagagacctgtagatggatgattattctgccctgggactcgccaaactgataaggaagtccaaccttagtagacttgattgtaaactcaacaaatttggtgtattgtccccttagtacaccagtactccagaggaagaatgcttttcttgggagccatagggtgaataaaggaatgtttaactgtgga

SEQ ID NO: 12306 - DNA, 3951 bp, Homo sapiens
agaacccctcacaccaccagaagattatcaaggtcctccaaggctgtgcagactgccttccccaggagatcaccgaggtattctttcctgtcctgctttcttcctgttgtcttccgggccttaggcctttcccttgtctctttccccaacctactccatacctttttgcctctggaggctcatgggcttcctggaggagatgaaaaaggcaaggacttttcaggctcacccaaagcataaagcactgggatagggagggattgctacctgaaaccggagcctgtctgatcttcacaggctcaggaatgccatggatgtgctggaagggatgttcagcgaaggaggttctgggacctgggaggggccttacctccttgctctgcttggaatagtgccctagctggagatcagtagggtggagtggagagtggaatcattaggaatcaaatccagtattagtacccttcccctataggcagctaaggaggaagagaaagttttagtattctttgttaccaggcagagtctctgtgtgtttcccagttgactgggaaagcagaacatggaagtatgtgggattgattgggaagggcagcctagagaggctctggagacttcctctttccctctgtgactctcctcagctcaagacacagatgtggcagctcctcaagggccacgaccacctgcaggatgagttttctatcttctttgaccacttgcgcccagcagctagccggatgggtgactttgaagagatcaattggactgaggaaaaggagtatgaggtataggacctaaggctgctgtagccttatgaagggggaaggccacacgtgggagggatattggcctggtgtctgtgctcagcagcaccaactccttctcagtttgatggctttgaagaagtggccctgcctgatgtggaagaagaggaggagcctcccaagatacccacagcctcaaagaacaagaggaaaaaagagatcggggtccaaaatcatgataaggtattttctttgtttatttgtttgtttttgagacagaatctcgctctgtcacccaaactagagtgcagtggcgtaatcttggctcactgcaacctccacctcccagattcaagcgattctcccacctcagcctctcaagtagctggaattacagacaggcgccagccaccacgcccagcaaatttttgtatttttagtagagatggattttcactatgttggccaggctggtctcgaactccttacctcaagtgatccacccgcctcggcctcccaaagtgctgggattacaagtgtgagccactacgcctggcctaaaatcatgataaggtatgccaagttattgaaaattatctatgtttcatgaatcaagccttgcgttttctcactgaacatttctgtggcttactatggcccaaggtttctagttcaaaggctctaggatctgagacgatcacggagaacaaaccaaaggtcaggctgatacagacatgcagagcctttgggaaaactgcagttgttgcaggggccccaggattccctagttagaaggatttgtttcttccccttttctgtctagctcagagttattacccttaattcaacttttttcatttttgctcatgtgagaaaatagagccaattgaggatgagcttgttattaaaaaaataaaatagaaccaagattccccatattaataataatgatagcagctaatacttagttgtattacaaagtgtcaggcattctgggaagtattttaatggattattgacacatttaattctcacagtaatcctatggagagattgctcttgtttgcattttacagaagacataactgaagtgcagagaggctgttgtcagggtctcatatttagtaagtggtggtgctaggatatgaactcctcaggtaagccatctgtggagtctactggttgtcactgctcttcaagcagtattttttttttttttttttaattcgtgtttcctgaccaagcgttttttctcttttctggggagaaactgcttcttagtagctgtatgaccttgggaaacgtatttaacctctctttgtttcagtttcttcatcataaattgggatgataatggtacttacttacgtcttgggtttattaaacagtgtcactgagtaggctttccatgggtacaaagttctctctgaaggggattggaagagatgggagagctgaagtcacagagagacagaaacaaagacattatatctcatgatggagctctccagtgattttgcctcagattatgtctgacttaaatatttcttgaaacatctggggcaattgggatatgtcagtctttaggtcatttagggattgtttcagggattcataataggccttaatctagtttgggctattgatttccccaggcgatgtgaggagttgatacataaaagaggatggggtccgggcgtggtggctcatgcctgtaatcccagcattttgggaggtcgaggtgggtggatcacttgaggacaggagttcaagaccagccagagtaacattgcgaattcctatctctactaaaaatacaaaaattagccataggctaggtgctgtggcttacacctctaatgccagcactttgcaaggccaaggcgggcggattacttcaggtcaggagttcgaaaccagcctggtcaacatggcgaaatcccatctcactgaaaatacaaaaaaaattaggcttagtggcatgcgcctgtaatcccagctacttgggaggctgagacatgggaatcgcttgatcccggggagtggaagttgcgctaagctgagatcacgccactgcactccagcctgggagaaagagcgagactccatctcaaaaaaaaaaaaaaaaaaaaattagctaggcgtggtggtgcgcagtcccagctacttgggaggctgaggtgggaaaatcacttgagcccaggaggcagaggttgcagtgagccatgaatgtgacactgcactctagcctgggtgacagagccagaccttatctcaaaaaaaaaaaaaaaaaaaaagcatggggagagggtgggctgtgttgtgttcatatggctcacaactttagcttcctctcttggtaccaaaaatacggccaggcacagtggctcatgcctgtaatcctagcactttgggacgctgagggagggcagatcaagaggtcaggagttcgagaccagcctgaccaacatggtgaaaccctgtctctactaaaaatacaaaaattagctgggtgtggtggcgcatacctgtaatcccagttactcaggagcctgaggcaggagaatcccttgaacctgggaggcagaggttgcggtgagctgacatcgtgccactgcaacccagcctgggccacagagcgagactctgtctcaaaaaaaaaaaaaaaaaaaaaaacaacttggcagctaatcaagcccaagtatctcctaggagactgaatggccagatggggccaaggactgtgcctgctcctgccatgaaggaggtccagattccaagctgaagaagagcaaaaggcggagctgtagccactgtagcagcaaggtgaggaaagtatcaagggtcccgagggtatcagagctgctgggggattgtttgctaccaagaattgtaccttactgaattcctaaaaaggcacatatataaataacattcagtatacacatatgtgtacatatgcaaaataaatggaatctgctagaaatacgtgatagattttgttttttaaagagaattctgtgagtaaagcttttggaattggaaaaacaaaataccagttaaaatatttccctcagatattagaaaatgaaataaacctctgtcgtgaaaatagtctctacaagtaatcctggttctctagaatggagttggttggcaggaaaaacacagttcttggtgagag

SEQ ID NO: 12307 - DNA, 813 bp, Homo sapiens
agaacccctcacaccaccagaagattatcaaggtcctccaaggctgtgcagactgccttccccaggagatcaccgagctcaagacacagatgtggcagctcctcaagggccacgaccacctgcaggatgagttttctatcttctttgaccacttgcgcccagcagctagccggatgggtgactttgaagagatcaattggactgaggaaaaggagtatgagtttgatggctttgaagaagtggccctgcctgatgtggaagaagaggaggagcctcccaagatacccacagcctcaaagaacaagaggaaaaaagagatcggggtccaaaatcatgataaggagactgaatggccagatggggccaaggactgtgcctgctcctgccatgaaggaggtccagattccaagctgaagaagagcaaaaggcggagctgtagccactgtagcagcaaggtgaggaaagtatcaagggtcccgagggtatcagagctgctgggggattgtttgctaccaagaattgtaccttactgaattcctaaaaaggcacatatataaataacattcagtatacacatatgtgtacatatgcaaaataaatggaatctgctagaaatacgtgatagattttgttttttaaagagaattctgtgagtaaagcttttggaattggaaaaacaaaataccagttaaaatatttccctcagatattagaaaatgaaataaacctctgtcgtgaaaatagtctctacaagtaatcctggttctctagaatggagttggttggcaggaaaaacacagttcttggtgagag

SEQ ID NO: 12308 - DNA, 7995 bp, Homo sapiens
aaaaaaaaaaaaaaaaaaaaaaaaaaaaaaaggagagagagattgataattttgagttatccacgctctgtccttactgttacaagttgactggttgaatgacttctttcttggcataatagccatcccaagtgtgggtttgtgggaatcctgaagtgagaaagttctgacattggctctttctgggtgccagcattattatagtcttgtaatctatagttttcactcttccttcccaatactggagcaacattcagaggcccattccccaggaaaaccctccctttcctttgcccacagttccaagatgagatgggattctccaacatggaagatgatggcccagaagaggaggagtgtgtagctgagcctcgtcctaactttaacacccctcaagctctacggtaggctagttgaagaccttgagatttggaatagaggaaaagtttatttctgaaaaggttttcagaagttgcaattgataatttttcatcccaaaccagcttctgttactgatgtaaggatgcagagccctgtcaggagttaggtgtcaagtgaagtctccttgttatggggcagtgcagctgtaggccaagctatatccgtttgggaagggagaaaaaacagtagctggcatccatatccacttctccgggtgagtggtgctggagaggtatgtaggactcaatgtggccagccacacaaactaccccatattgtaatatcctgtctgtcccttttgttctttttatgtgccattaatatctgctaaatgtgactgaaaatttgttagtcacctaggcattagtggagcaaaccctgaagcacctgcagtaaggagtctgaaacatacgtgctgacctttttgcctaaagttggcacttgtgttacagcatccagaaagtagaggctttaattttttcctcattttgtggtggatttgcatctgcactttattgtattgttatccattgcgagtagcagcatgtagtcattagatggatggctagatgtcaggatgcagtttgtgccataagtggaacaaagcaaagagaatagtccctgtaattcgtcctgggtttgaacctaacagcattactaagcagagagcttgggatccatctgaaagctagacctttagagatttttcaatttagtgaaaaaagataagatatgccaaccaatgtctaaaaactagaaataccagtaattctccattacaacaaatatcacaatacaactacatcaaaaacctcaagattgctaagtcagtatttgacccattattttaagttacagctcatacaacaaaattctgttatagcagaatggaaccattcatcctgggaacatataatgggatttgatctataaacgtgttttggttctgctgattgactctttgtaacttcttaaaatttgggaagtgtaggctgggcgcagtggctcatgcctgtaatccctgcactttgggaggcggaggcagggggatcacctcaggttaggagtcgagaccagcctggccaacatggtgaaaccccatctctactaaaaatacaaaaattagccaggcatggtggcgggtgtgtgtaatcccagctactcaggaggctgaggcaggatactcacttgaacccggaaagcggaggttgcagtgagctgagatgacagcctgcttgacagagagagactctgtctcaaaaaaataaaataaaataaaataaataaaatttgtaaagtatagaaataatttaaaactcttgttagaattcagttaccttctggtattcagtagaatacagtcatatatcatctcatggtgatacattctgtgaaatgttatcattaaacgatttcatcattgtgtagaaagcacttggataaacctagatggtttagcctactgcatacctaggctatacggtataacatattgctcccaggccacaaacctgtatagcatgttattctgctgaatattgtaggcagttgtaacacaatggtaagtacatatgtatgtaaacatagaaaaggtacagtaatcttatggagccatctctgaatatgtggttcattattgactgaaacattatgtggcacatgactgtacttgggcagctgctgcttctctttcagttgcaaatgcaaacctgttataatctttgactaaataaagcatcctggattctgtaagtccatagatagtaaaaacttcttaaaacacaataaagaagagagaggaaaaaaaagaacaaaacaaaaaccctgggaaagtgagttatctgtgcttcccttgtcagttatccaagtaatacttattaaaactaggtgcaaggccacgtgtggtgactcacacctgtaatctcagcactttgggaggctaaggcaggcagatcactttaggtcaggagttcagaccagcctggtcaacatggtgaaaccccatctctactaaaaatacaaaaattagctgggtgtggtggcacacgcctgtaatcccagctacttgggaggctgaggcaggagaaacacttgaaccctggaggcggaggttgcactgagctgagattgtgccactgtactccagcctgggcaacagagtgaaactgtctctcaaaaaataataataggccgggtgcggtggctcacgccagtaatcccagcattttgggaggccaaggcaggcggatcacaaggtcaggagtttgagaccagcctgaccaacatggtgaaaccccgtctctactaaaaataaaaaaattagccaggcatggtagcactcgcctgtaatcccagctactcaggaggctgaggcaggagaatcgcttgaacccaggacgcagaagttgcaatgagccaagatcatgccactgcactccatcctgagagagagaaaaagactccatctcaaaaaataataataataataataataataattatagatcaggcgtggtggctggcacctgtaatcccagcactttgggatgccgaagcaggcatatcacctgaggtcaggagttcgagaccagcttggccaacatggcgaaaccttgtctctactaaaaatgcaaaaaaaattagtcggacgtgttggcaggtgcctgtaatccccgctacttgggaggctgaggaaggagaattgcttgaacctgggaggcagaggttgcagtgagccgagaccactccattgcactccagcctgggcaataggaacgaaactccatctcaaaaaaaaataatagtaataataataataataataaaaaatacaactacgtgcaggctatgttttcattacctacttttttatgcttctggtcttctgttccttcagtggtagtagtgcaggtgatcaggttttcagttctcagaagattgcataagacagtcccacaggctttaggtttttaccctgtgctgcccaaacccacagtaaatactataaaagaaagaatgatttttatccccaatagataaatgataacttttaaaaattaactattgaaaacacttatttatctattgctgtaatattggagattacttgaaatatgataacctgcttgttgtaactacatcagcaggtcttatcctgattgcatagggtatcagcacgtgcttaatcacttaagtatctttttctccttttacttcagaactgtcatgctgggtttttcagtttttgcttcagccctggaaacagtctctcaggagggtaggggtgggaagttagggttaggaaccttagaagaggaatttattttatttatttatttattttattttatttttttgaaatggagtcttgctctatcgcccaggctggagtgcagtggcgcgatctcggctcactgcaacctctgcctcccgggttcaagtgattctcctgcctcagcctcccaagtagctgggattacaggcacgcatcaccacggccagctaattttcgtattttttcatagagacagggtttcgccatgttagccaggctagtctcgaaccactgacctaaagtgatccacctgccttggcctcccaaattgctggcattactggcttgagccaccacgcccgactgtttcttgaccttttaataattgtcattctgactggcaaggcttgctttcttaacaagtcaaaaatcttctagcatgaagcaggaaaaggatatactaaaataactaaagtaatgatagtttacctgaacagaactgagtggttggttcaaatattaccctactgctctccatgaaggtattttattttagccctttaaattcctcttcctggctgggtgcagtggctcacgcctgtaatcccagcaatttgggaggccaaggcaggtggatcactttaggtcagtggttcgagactagcctggctaacgtggcgaaaccctgtctctacaaaaaaatacaaaaattagctggccgtggtgatgcgtgcctgtaataccagctactctggaggctgaggcaggagaatcacttgaacccaggagacagaggttgcagtgagccgagatcatgccactgcagtccagcctgggcgacagagcaagactccatttcaataaataaataaataaataaataaattcctcttctaaggttcccaaccctaacttcccacccctaccctcctgggagactttttccagggctgaagcaaaaattcaaaaacccagcatgtcagttctgaagtaaaaggagaataagatagctaagtgattaagcatgtgctgataccctatgcagtcagggtaagatctgttggccaggcctggtggcttacgcctgattccagcactttgggaggccgaggcaggtggatcatgaggtcaagagatcgagaccatcctggccaacatgatgaaaccccgtctctactaaaaatacaaaaattagctgggtgtgatggcgtgtgtctgtagtcccagctactcaggaggctgaggcaggagaatcacttgaacctgggaggcggaggttgcagtgagccgagatcatgccactgcattccagcttggcgtcagagcgagactccgtctcaaaagaaaaaaaaatctgtttatgtagctacaacaagcaggttatctttctttcttttttctttttttttttttttttttttgagacagagtcttgctctgtcgcccaggctggagtgcagtggcgggatctcggctcactgcaagctccaccttctgggttcacgccattctcctgcctcagcctcctgagtagctgggactacaggcccccacgactgcgcccagctaattttttgtattttcagtagagacggggtttcaccatggtcttgatctcctgacctcgtgatccgcccacctctgcctcccaaagtgctgggattacaggcgtgagccaccgcgtccggccaacaagcaggttatcatatttcaaggaatccccgatattacagcagtagataaataagaaaatgtagtatcccaccagggaatactatacagccataaaaaggtatgatatcatgtccgtttcagggacatggatggaggtgaagccatcagcaagctaacgtaagaacagaaaaacaacactgcatgttctcacttataagtaggagctgaacaatgagaacacatgggcacagggtggggaacaacacacactggggcctgttgggggagcgggggaagggagaggatcaggataaactgctaatgcagctgcacttaataccaaggtgatgggttgataggtgcagcaaaccaccaaggtgcacgtttacctgtgtaacaaacctccatgtcctgcacatgtattctgaaacttaaaattaaaattttgagggctaggcatggtggcttacgcctgtaatcccagcactttgggaagccgagatgggtggatcatgaggtcaggagatggagaccgtcctggctaacacagtgaaatcccatctctactaaaaatacaaaaaattagctgggcgtggtggcacgtgcctatagtcccagctacttgggagggtgaggcaggagaattgcttgaaccctggaggcggaggttgcagtgagctgagatcgtgccactgcactccagcctgggcgacagagcgagactgtgtctcaaaaaatatttaaattttgaaaaaaaaatgcaaggcagtgcagcctgagtggatagggaaatgggacaagctgaacctgggatgggagtaacaagtaaatgagagaagaaatgagaatgatgagttcccaccagctccttggctgctttcttatccagatatttctctgttcctagcattttaattttttctttatttgtatattatttagaagaggaattttagaggaatgggatagagtgtaatatagaatcatcatatttgatgcatgctaactactttggcaaaagatttgtaaaaggctgagagtttgactgttggctaaagtgagatgggggattagtagggaatgaaaattgttcaggctctttgctcatcattggaacgaattggatgtgttgtggacctacggaaacactcaaattcagtcatctccctgttgggaataggtttgaggaaccactggccaacctgttaaatgaacaacatcggacagtgaaggagctatttgaacagctgaagatgaagaaatcttcagccaaacagctgcaggaagtagagaaggttaaaccccagagtgagaaagttcatcagactctgattctggacccagcacagaggaagagactccagcagcagatgcagcaggtaggacttttcttggtcatgttaacattggatttttttttttgagacagagtctggctctgtctcccagcctggagtgcagtggcccgatatcggctcacttcaacctctgctttctgggctcaagcatttctcctgcctcagcctcccaagtagctgggattacaggcatccaccaccacacccagctaatttttgtatttttagtagagacagggtttcaccatattggccaggctggtctcgaactcctgaccttgtgatccgcccgcctcggcctcctaaagtgctgggattacaggcgtgagccactgcgccctgctgttaatactggattataccaaggcctaactctgaggccagaaattaacagctttgtaaaagtcagagatagttaccttaccacctcctaaaaccatagtatcttcacatcattaggagctcgagaagtcatcatgttcatgccttatggctcaaggaagagagcacacaaggacactaatggtattcagaaatatagatttcaaagagtccttagtaatctattctgaaatttaacaaccttcactgtgagaagtaggtttgtttttcctttttctaacctcagtccctctggattgaggttaagcttcctctggttctgtcattttgttcaagggaacatgtctgagagatttatgccaagatcctatgttattttcatactcctttcagaaagcaaaatatatgtgataaagttgcaaacatcttggttattgtctctctgggggctgggttacggtggctcacacctgtaatcccagcactttgggaggctgaggtgggaggattgcttgagccagggagttcgagagcaacctgagcaacatagtgagaccctgtctctgcaaaaaataaaaataaattagccaggcatggtgccatgcatctgtggtcccagctactcaggaggctgaggtgggaggattgcttgagcacaggaagttgagagggcgtggagccatgattgcatcactgcacatcagcctgagtgacagagagagatcctttctccaagaagaaaaaaaaaaaagatctctctggattcctgaaatgacaatgtggtaacatgtcacttcatcattttctttccatccccagcacgttcagctcttgacccaaatccaccttcttgccacctgcaaccccaacctcaatccggaggccactaccaccaggatatttctt

SEQ ID NO: 12309 - DNA, 690 bp, Homo sapiens
aaaaaaaaaaaaaaaaaaaaaaaaaaaaaaaggagagagagattgataattttgagttatccacgctctgtccttactgttacaagttgactggttgaatgacttctttcttggcataatagccatcccaagtgtgggtttgtgggaatcctgaagtgagaaagttctgacattggctctttctgggtgccagcattattatagtcttgtaatctatagttttcactcttccttcccaatactggagcaacattcagaggcccattccccaggaaaaccctccctttcctttgcccacagttccaagatgagatgggattctccaacatggaagatgatggcccagaagaggaggagtgtgtagctgagcctcgtcctaactttaacacccctcaagctctacggtttgaggaaccactggccaacctgttaaatgaacaacatcggacagtgaaggagctatttgaacagctgaagatgaagaaatcttcagccaaacagctgcaggaagtagagaaggttaaaccccagagtgagaaagttcatcagactctgattctggacccagcacagaggaagagactccagcagcagatgcagcagcacgttcagctcttgacccaaatccaccttcttgccacctgcaaccccaacctcaatccggaggccactaccaccaggatatttctt

SEQ ID NO: 12310 - DNA, 1831 bp, Homo sapiens
ctatgatgaaagcagccatcagtgagacggaagatatgccaatgtttgagcctaaaatgacacgctctaaactgaaggaagtagtggaaaaaggagtggtaattccaacatggaatatttcaccaattaagaaggccaatgaaattaagcctcctcagtttgtggatatccaccttgaagaagatgattcctcagatgaagaataccagccggatgatgaagaagaagatgaaactgctgaagagagcttattggaaagtgatgttgaaagcactgcttcatctccacgtggggcaaagaaatccagattgaggcagtcttctgagatgactgaaacagatgaggagagtggcatattatcagaggctgagaaagtcaccacaccagccatcaggcacatcagtgctgaggtagtgcccatggggcccccgccccctccaaagccgaaacagaccagagatagtactttcatggagaagttacatgcggtagatgaggagctggcttccagtccagtctgcatggattctttccagcccatggatgacagtctcattgcatttcgaacgcgttctaagatgcccctgaaagatgttcccctgggccaattagaggcagagctccaagctccagacatcactccagatatgtatgaccccaatacggcagatgatgaggactggaagatgtggctggggggacttatgaatgatgatgtggggaatgaagatgaagcagatgatgatgatgatccagaatataatttcctggaagacctcgatgaaccagacacagaggatttccggactgaccgggcagtgagaatcaccaaaaaggaagtaaatgagctgatggaagagctgtttgaaactgtgagtaatgatcctcgagtgagaacacgggattttaagtcagttctccagcaagatgtgtcatttggtctctgtgatgctccctctaggagagggggtctgactgaaccaattctccttttagtctacctgggaaagaatataatgacaagggaattttgctaactactagactcttgattatatacatgtatgttgttcttattaacattttccttgaaacttctttttgtttgagggggttcttgctccatcacccaagccagagtgcagtggtgaaattacagctcacagcagccttgaccttctaggctcaagcagtccttcgtctaagcctcctgagtagctgggacataccaacacacccagctaattattttatttgtagagacagggtcttaccacattgctcaggttgttctggaacttctgggctcaagcaattttcctgccttgggcctcccagtgctggaattataggtgtgagccagcatgcctggcccctggaaaacttttgatgacttcccctactgtcatttggtgtgtccttaaagattgtcaactagttttaaactactttgtgtacaaataattacctttttcataaatttgtttcaaaagatttttcattttaagagattgatcattttgaggctgggtgcagtggctcacgcttgtaatcccagcactttgggaggccacggcaggtggatcatctgaggtcaggagtttgagaccagcctggccaacatgatgaaaccctgtctctattaaaaatacaaaaattaggcatggtggcgggcacctgtagtcacggttactgcagaggctgaggcaggaaaattgcttgaacctgggaggcggaggttgcagtaagcccagattgtgccactgcactccagcctgggcaatagagcaagactgcaagactctgtctcaaaaaaaaaaaaaaaaaaaaa

SEQ ID NO: 12311 - DNA, 471 bp, Homo sapiens
actggctcaaagagagggaaaaaaatgacactcaggcctgggccagttacccaagaagacagatgtgatcatcttaccctaaaggagcctttttcaggagagcctagtgaagaagtcaaggaagaaggagataatgtaacacaaaacagagaggaagaaagaaagattgacaattcacatatatctactttggaaaatattgaaaactttaaaggagaaaataaaaatcacccgtagccctgctgtttaggaaacctcaaatgaattctgaaggggagataccttccctgccatcaggcagccaatctgcaaaaccagtaagccagcccaggaaatcaacccagccagatgtttgtgcctctcctcaagaaaagccactcaggactctgtttcaccaacctgaggaagagatagaagatggtggactcttcattccaatggaagaacaagacaatgaagaaagtgagaaaa

SEQ ID NO: 12312 - DNA, 5097 bp, Homo sapiens
gctgttgttggctgacttccggtggtgccaaagccgtttccgtggaatcaggccggctggtgagggtacagaatggaacaaaagtgggacttttaaaatgttgccctgtaagaagagaagaactacagtgacagagtccctacagcataaaggcaatcaagaggaaaacaacgtagacctagaatcagccgttaaaccagaatctgaccaggttaaggacttgagttcggtgtcactatcctgggatccaagtcatggcagagtagctggcttcgaagtacagtctttgcaggatgcaggaaatcagcttggtatggaggatacatctctgagctctggaatgctcacccagaacacaaatgtaccaattctagaaggtgttgatgtggccatctctcagggaatcaccctaccttccttggagtcttttcacccccttaatatacacattggtaaaggaaaactccacgctactggctcaaagagagggaaaaaaatgacactcaggcctgggccagttacccaagaagacagatgtgatcatcttaccctaaaggagcctttttcaggagagcctagtgaagaagtcaaggaagaaggagggaaacctcaaatgaattctgaaggggagataccttccctgccatcaggcagccaatctgcaaaaccagtaagccagcccaggaaatcaacccagccagatgtttgtgcctctcctcaagaaaagccactcaggactctgtttcaccaacctgaggaagagatagaagatggtggactcttcattccaatggaagaacaagacaatgaagaaagtgagaaaaggagaaaaaagaaaaagggtaccaagaggaaacgagatggaaggggtcaagaagggaccttggcatatgacctgaaactggatgacatgcttgaccgtaccttggaggatggtgccaagcagcacaatctaacagcagtcaatgtccgaaacatccttcatgaagtaatcacaaatgaacacgtggtagctatgatgaaagcagccatcagtgagacggaagatatgccaatgtttgagcctaaaatgacacgctctaaactgaaggaagtagtggaaaaaggagtggtaattccaacatggaatatttcaccaattaagaaggccaatgaaattaaggtaaacttggaagaaataattgttattcttttccagaaagacttcatcggttttgaaacttaagtacttcctctttaacttttcttgatcaatctttgttttaattccagctttgtttttttccattctattactcttaggtttgtatctcatggaattcactttaacctctgcctcgtgttatttgctttagctgtacattatgctcttaggattttttttttttctgccctgcttcttccccttattttccaaatacgtatgatttgtgtttcccattacttcatttctttctaattgtactaatgtagcctcctcagtttgtggatatccaccttgaagaagatgattcctcagatgaagaataccagccggatgatgaagaagaagatgaaactgctgaagagagcttattggaaagtgatgttgaaagcactgcttcatctccacgtggggcaaagaaatccagattgaggcagtcttctgagatgactgaaacagatgaggagagtggcatattatcagaggctgagaaagtcaccacaccagccatcaggcacatcagtgctgaggtagtgcccatggggcccccgccccctccaaagccgaaacagaccagagatagtactttcatggagaagttacatgcggtagatgaggagctggcttccagtccagtctgcatggattctttccagcccatggatgacagtctcattgcatttcgaacgcgttctaagatgcccctgaaagatgttcccctgggccaattagaggcagagctccaagctccagacatcactccagatatgtatgaccccaatacggcagatgatgaggactggaagatgtggctggggggacttatgaatgatgatgtggggaatgaagatgaagcagatgatgatgatgatccagaatataatttcctggaagacctcgatgaaccagacacagaggatttccggactgaccgggcagtgagaatcaccaaaaaggaagtaaatgagctgatggaagagctgtttgaaactttccaagatgagatgggattctccaacatggaagatgatggcccagaagaggaggagtgtgtagctgagcctcgtcctaactttaacacccctcaagctctacggtttgaggaaccactggccaacctgttaaatgaacaacatcggacagtgaaggagctatttgaacagctgaagatgaagaaatcttcagccaaacagctgcaggaagtagagaaggttaaaccccagagtgagaaagttcatcagactctgattctggacccagcacagaggaagagactccagcagcagatgcagcagcacgttcagctcttgacccaaatccaccttcttgccacctgcaaccccaacctcaatccggaggccactaccaccaggatatttcttaaagagctgggaacctttgctcaaagctccatcgcccttcaccatcagtacaaccccaagtttcagaccctgttccaaccctgtaacttgatgggagctatgcagctgattgaagacttcagcacacatgtcagcattgactgcagccctcataaaactgtcaagaagactgcgaatgaatttccctgtttgccaaagcaagtggcttggattctggccacaagcaaggttttcatgtatccagagttacttccagtgtgttccctgaaggcaaagaatccccaggataagatcgtcttcaccaaggctgaggacaatttgttagctttaggactgaagcattttgaaggaactgagtttcctaatcctctaatcagcaagtaccttctaacctgcaaaactgcccaccaactgacagtgagaatcaagaacctcaacatgaacagagctcctgacaacatcattaaattttataagaagaccaaacagctgccagtcctaggaaaatgctgtgaagagatccagccacatcagtggaagccacctatagagagagaagaacaccggctcccattctggttaaaggccagtctgccatccatccaggaagaactgcggcacatggctgatggtgctagagaggtaggaaatatgactggaaccactgagatcaactcagatcgaagcctagaaaaagacaatttggagttggggagtgaatctcggtacccactgctattgcctaagggtgtagtcctgaaactgaagccagttgccacccgtttccccaggaaggcttggagacagaagcgttcatcagtcctgaagcccctccttatccaacccagcccctctctccagcccagcttcaaccctgggaaaacaccagcccgatcaactcattcagaagcccctccgagcaaaatggtgctccggattcctcacccaatacagccagccactgttttacagacagttccaggtgtccctccactgggggtcagtggaggtgagagttttgagtctcctgcagcactgcctgctgtgccccctgaggccaggacaagcttccctctgtctgagtcccagactttgctctcttctgcccctgtgcccaaggtaatgctgccctcccttgccccttctaagtttcgaaagccatatgtgagacggagaccctcaaagagaagaggagtcaaggcctctccctgtatgaaacctgcccctgttatccaccaccctgcatctgttatcttcactgttcctgctaccactgtgaagattgtgagccttggcggtggctgtaacatgatccagcctgtcaatgcggctgtggcccagagtccccagactattcccatcactaccctcttggttaaccctacttccttcccctgtccattgaaccagtcccttgtggcctcctctgtctcacccttaattgtttctggcaattctgtgaatcttcctataccatccacccctgaagataaggcccacgtgaatgtggacattgcttgtgctgtggctgatggggaaaatgcctttcagggcctagaacccaaattagagccccaggaactatctcctctctctgctactgttttcccgaaagtggaacatagcccagggcctccactagcagatgcagagtgccaagaaggattgtcagagaatagtgcctgtcgctggaccgttgtgaaaacagaggaggggaggcaagctctggagccgctccctcagggcatccaggagtctctaaacaaccctacccctggggatttagaggaaattgtcaagatggaacctgaagaagctagagaggaaatcagtggatcccctgagcgtgatatttgtgatgacatcaaagtggaacatgctgtggaattggacactggtgccccaagcgaggagttgagcagtgctggagaagtaacgaaacagacagtcttacagaaggaagaggagaggagtcagccaactaaaaccccttcatcttctcaagagccccctgatgaaggaacctcagggacagatgtgaacaaaggatcatcaaagaatgctttgtcctcaatggatcctgaagtgaggcttagtagccccccagggaagccagaagattcatccagtgttgatggtcagtcagtggggactccagttgggccagaaactggaggagagaagaatgggccagaagaagaggaagaagaggactttgatgacctcacccaagatgaggaagatgaaatgtcatcagcttctgaggaatctgtgctttctgtcccagaactccaggtgagagctggagaatattctcaagtatttcgtggactcagtaatatgtatcacttattgatatgccacctgcttgcttgctgcactatggatagtcctaaaatcatttgtatttgatttgtgaatgcattatgggacatgattgtggagttgaggtgaaatgagatggaaaggatgaaattttacttattatattaaactcgtttacacattaaa

SEQ ID NO: 12313 - DNA, 2261 bp, Homo sapiens
gctgccctcaagcagagctcgggtgaagacaagagacaggacgtgccctgtccatgaatctccatcaggaattgacacctcagagacttctcccaaagcccctagagggggtttggctaaagacagtggaacacaggccaagggtccagagggggagcagcagccaaaggccgcagaagctacggtgtgtgccaacaacagcaaggtcagctccactggggaaaaggttgtcctgtggacaaggtaggtaagggtggatgacgtgtgtttggaaaagagcatagaccacatccatgtggctccctagggttaatcatgatacctgggttacagggaagctgaccgtgtgatcctcaccatgtgccaggagcaaggggcacagccacagaccttcaacatcatctcccagcagctgggaaataagacccctgctgaggtaggtgcgggttggggtgaagacctggcaaaaagaggtcaaggtggccaactaacagacagaaaggccaaagaaggagttttgatatccaagataataagtggtttttgtaaaggtttgatctaaggaaaggcttgactcatcagggtggtagtggttctagaagagaaaggacactagattttgaggatttttaaatttttatttatttatgtattttagacgcagtttcacttgtcgcctaggctggagtgcagtggcacaatctcagctcactacaacctccacctcccaggttcaagtgattgtcctgcctcagcctctcccaaagtagctgggattacaggcacccaccaccatgccaggctaatttatttatttttagtagacacggggtttcaccatgttggcaaggctagtcttgaactcctgacctcaggttatccacctgcctcagcctcccaaagtgctgggaataggtgagatactgcgcccggccaggattttaaagtggaagccccagtttccattccagttttgtttttaggagttgtgtgactttgggcaaaacatttagcctcttgagtttccttatctataatgacatagctctcccaaccttgctgtgaggaataaacaagagatttttcaaatcagtatattgtgcttcataaatgttaacattgttacaaagcatcagtgaggctgggcgcagtggttcattcctgtaatcccaacactttgggaggccgaggtgggtggatcacctgaggtcaggaatttgagaccagcctggccaacatggtgaaaccccatctctactaaaaatataaaaactagtcaggtgtggtggtgggcacctgtaatcccagctactctgaaggctgaggcaggagaattgcttgaacccaggagacggaggttgcagtaagctgacacagtgccactgcactccagtctcagcaacagagagagactccgtctcaaaaacaaaaaaaaaagaccagtgaatacagccctcctcctttcttaggtttcccaccgttttcgagaactcatgcagctcttccacactgcctgtgaagccagctctgaggatgaggatgatgcaaccagtaccagcaatgcagaccagctgtctgaccatggggaccttctgtctgaagaggagctggatgaatgagactctgggaatcatctacacaggaccaaacccaacaggcgccctggcaccggggagggggtagttgtactctgcttgtacagtccttgagcccagtttacagatctggagagcaggaggccaggacaaggacaaaggctggaggatggagtaggacccaggggctctgccatcctaggcatcattcaaggtcttttatgaagactttacagatgtcctctgtaaatagcatcgagagtggagttcagctcctttctctacttttttttggtctgatggcacatatttattgttctgtggtctaatcacagtgtttctaaatgtaaaaagtgcatatgttggtgtagctagtcccgcgacattgagctcctctgcatgaagacactgggctcctgcatccagctgtttttattgcaaactagctcctttctcccacactgggaactttagtccacgaggctgtcaccaccctggtagcactgggccaggctttgtagctcctgcagcagctctgctacgtcatcgtgctccactccagcatccatgaagctggcccagcgccgcaagtcgagtttggtgaggtctctggccaaggcttccagggtctggtgcagggacgaagaggaacacagtgccccaaac

SEQ ID NO: 12314 - DNA, 1228 bp, Homo sapiens
gctgccctcaagcagagctcgggtgaagacaagagacaggacgtgccctgtccatgaatctccatcaggaattgacacctcagagacttctcccaaagcccctagagggggtttggctaaagacagtggaacacaggccaagggtccagagggggagcagcagccaaaggccgcagaagctacggtgtgtgccaacaacagcaaggtcagctccactggggaaaaggttgtcctgtggacaaggtaggtaagggtggatgacgtgtgtttggaaaagagcatagaccacatccatgtggctccctagggttaatcatgatacctgggttacagggaagctgaccgtgtgatcctcaccatgtgccaggagcaaggggcacagccacagaccttcaacatcatctcccagcagctgggaaataagacccctgctgaggtttcccaccgttttcgagaactcatgcagctcttccacactgcctgtgaagccagctctgaggatgaggatgatgcaaccagtaccagcaatgcagaccagctgtctgaccatggggaccttctgtctgaagaggagctggatgaatgagactctgggaatcatctacacaggaccaaacccaacaggcgccctggcaccggggagggggtagttgtactctgcttgtacagtccttgagcccagtttacagatctggagagcaggaggccaggacaaggacaaaggctggaggatggagtaggacccaggggctctgccatcctaggcatcattcaaggtcttttatgaagactttacagatgtcctctgtaaatagcatcgagagtggagttcagctcctttctctacttttttttggtctgatggcacatatttattgttctgtggtctaatcacagtgtttctaaatgtaaaaagtgcatatgttggtgtagctagtcccgcgacattgagctcctctgcatgaagacactgggctcctgcatccagctgtttttattgcaaactagctcctttctcccacactgggaactttagtccacgaggctgtcaccaccctggtagcactgggccaggctttgtagctcctgcagcagctctgctacgtcatcgtgctccactccagcatccatgaagctggcccagcgccgcaagtcgagtttggtgaggtctctggccaaggcttccagggtctggtgcagggacgaagaggaacacagtgccccaaac

SEQ ID NO: 12315 - DNA, 889 bp, Homo sapiens
gaccccaatacggcagatgatgaggactggaagatgtggctggggggacttatgaatgatgatgtggggaatgaagatgaagcagatgatgatgatgatccagaatataatttcctggaagacctcgatgaaccagacacagaggatttccggactgaccgggcagtgagaatcaccaaaaaggaagtaaatgagctgatggaagagctgtttgaaactttccaagatgagatgggattctccaacatggaagatgatggcccagaagaggaggagtgtgtagctgagcctcgtcctaactttaacacccctcaagctctacggtttgaggaaccactggccaacctgttaaatgaacaacatcggacagtgaaggagctatttgaacagctgaagatgaagaaatcttcagccaaacagctgcaggaagtagagaaggttaaaccccagagtgagaaagttcatcagactctgattctggacccagcacagaggaagagactccagcagcagatgcagcagaaagagctgggaacctttgctcaaagctccatcgcccttcaccatcagtacaaccccaagtttcagaccctgttccaaccctgtaacttgatgggagctatgcagctgattgaagacttcagcacacatgtcagcattgactgcagccctcataaaactgtcaagaagactggtaggagacagatgtgtcagctttaagtttttacttgcggtgagaggtggtgggaatcttatcccatagataactaaggatacttgcctaggaatggaggacacaggacatttgtaatttcttccttctctcttttatcctccctttgtactcattatccaagttctagaattacatgataatctctgggcctgg

SEQ ID NO: 12316 - DNA, 1400 bp, Homo sapiens
tcaaggtcctccaaggctgtgcagactgccttccccaggagatcaccgaggtattctttcctgtcctgctttcttcctgttgtcttccgggccttaggcctttcccttgtctctttccccaacctactccatacctttttgcctctggaggctcatgggcttcctggaggagatgaaaaaggcaaggacttttcaggctcacccaaagcataaagcactgggatagggagggattgctacctgaaaccggagcctgtctgatcttcacaggctcaggaatgccatggatgtgctggaagggatgttcagcgaaggaggttctgggacctgggaggggccttacctccttgctctgcttggaatagtgccctagctggagatcagtagggtggagtggagagtggaatcattaggaatcaaatccagtattagtacccttcccctataggcagctaaggaggaagagaaagttttagtattctttgttaccaggcagagtctctgtgtgtttcccagttgactgggaaagcagaacatggaagtatgtgggattgattgggaagggcagcctagagaggctctggagacttcctctttccctctgtgactctcctcagctcaagacacagatgtggcagctcctcaagggccacgaccacctgcaggatgagttttctatcttctttgaccacttgcgcccagcagctagccggatgggtgactttgaagagatcaattggactgaggaaaaggagtatgaggtataggacctaaggctgctgtagccttatgaagggggaaggccacacgtgggagggatattggcctggtgtctgtgctcagcagcaccaactccttctcagtttgatggctttgaagaagtggccctgcctgatgtggaagaagaggaggagcctcccaagatacccacagcctcaaagaacaagaggaaaaaagagatcggggtccaaaatcatgataaggtattttctttgtttatttgtttgtttttgagacagaatctcgctctgtcacccaaactagagtgcagtggcgtaatcttggctcactgcaacctccacctcccagattcaagcgattctcccacctcagcctctcaagtagctggaattacagacaggcgccagccaccacgcccagcaaatttttgtatttttagtagagatggattttcactatgttggccaggctggtctcgaactccttacctcaagtgatccacccgcctcggcctcccaaagtgctgggattacaagtgtgagccactacgcctggcctaaaatcatgataaggtatgccaagttattgaaaattatctatgtttcatgaatcaagccttgcgttttctcactgaacatttctgtggcttactatggccc

SEQ ID NO: 12317 - DNA, 833 bp, Homo sapiens
tcaaggtcctccaaggctgtgcagactgccttccccaggagatcaccgagctcaagacacagatgtggcagctcctcaagggccacgaccacctgcaggatgagttttctatcttctttgaccacttgcgcccagcagctagccggatgggtgactttgaagagatcaattggactgaggaaaaggagtatgaggtataggacctaaggctgctgtagccttatgaagggggaaggccacacgtgggagggatattggcctggtgtctgtgctcagcagcaccaactccttctcagtttgatggctttgaagaagtggccctgcctgatgtggaagaagaggaggagcctcccaagatacccacagcctcaaagaacaagaggaaaaaagagatcggggtccaaaatcatgataaggtattttctttgtttatttgtttgtttttgagacagaatctcgctctgtcacccaaactagagtgcagtggcgtaatcttggctcactgcaacctccacctcccagattcaagcgattctcccacctcagcctctcaagtagctggaattacagacaggcgccagccaccacgcccagcaaatttttgtatttttagtagagatggattttcactatgttggccaggctggtctcgaactccttacctcaagtgatccacccgcctcggcctcccaaagtgctgggattacaagtgtgagccactacgcctggcctaaaatcatgataaggtatgccaagttattgaaaattatctatgtttcatgaatcaagccttgcgttttctcactgaacatttctgtggcttactatggccc

SEQ ID NO: 12318 - DNA, 26940 bp, Homo sapiens
cagaatggaacaaaagtgggacttttaaaatgttgccctgtaagaagagaagaactacagtgacagagtccctacagcataaaggcaatcaagaggaaaacaacgtagacctagaatcagccgttaaaccagaatctgaccaggttaaggacttgagttcggtgtcactatcctgggatccaagtcatggcagagtagctggcttcgaagtacagtctttgcaggatgcaggaaatcagcttggtatggaggatacatctctgagctctggaatgctcacccagaacacaaatgtaccaattctagaaggtgttgatgtggccatctctcagggaatcaccctaccttccttggagtcttttcacccccttaatatacacattggtaaaggaaaactccacgctactggctcaaagagagggaaaaaaatgacactcaggcctgggccagttacccaagaagacagatgtgatcatcttaccctaaaggagcctttttcaggagagcctagtgaagaagtcaaggaagaaggaggtaaggtatacaaggtctctaggttacattcttgtcaataccactttgccattgctatttctggatacctttacagagtagtatttctgaaaggggatattgatttggtacggaattggaactgctgtgttgctaagggtcaacagtgaactttttttttttcttgagacggagtcttgccatgtcaccagactagagtgcaatggtgggatcttgactcactgcagcctccacctcctgggttcaagcgattctcctgcctcagtctctcaagtatctaggattacaggcatgcgccaccacgccaggctaattttgtatttttaccagagacggggtttcaccatgttggtcaagctggtctcgaactcctgacctcaggtgatacgtttgccttggcctcccaaagtgctgggattacaggtgtgagccaccgtgcctggccagcagtgaactttatgaatggatatagactttcttttcccctcccattcgctatatccacttctgtacccctttcttctttcttttttgagacggagtctcgctctgtcacccaggccagggtgcagtggcgtggtctcggctcactgcaagctccgcctcccaggttcacgccattctcctgcctcagcctcccgagtagctgggactacaggcacccaccaccatgcccggccaattttttttgtatttttagtagaggcggggtttcactgtgttagccaggatggtctcagtctcctgacctcgtgatccgcccgccttggcctcccaaagtgctggattacaagcgtgagccactgcacccagccattgtatccctttcattccattctctcatcctttatttggtgtgtctggagatgtgtatggtcttttgtgattgggcagcagcttaaagggggagactactgcctgggacactgggaaaggctctactgagatgaatgacccttccaatttgaaagatgaattgcggtttaacagaaagtggtatgggcacataggccaagaacagtgcacagagatagactggcagaaaaggatggtgacatggttgcttggaacaggtggtgggagatgacttcttttttttttttttttttttttgtgacagtctcgctctgttgcccaggctggagtgcagtggtgtgatcttggctcactgcaacctccacctcccatgttcaagtgattcccctgcttcagcctcgcgagtagctgggattacaggtgcctgccaccacgtccagctaatttttttatttttattagagaggaggtttccccatgttggccaggctggtctcaaactcctgacctcaggtgatccacgtaccttggcctcccaaagtgctgggattacaggcgtgagccaccacgccctgccaagatgactttagagtagtagattgtactaaggttgtgaaaggttttgtttttcataccaaggcatttgagcttttcctgtaggtaggtgatagtcatttaaacgtctaagtagaacacatttatgctttagaaaagataccaacttctcttattcattttttttttgatacggagtctcgctttgtcgcccaggctggagtacagtggcgtgatctcagctcactgcaacctccacctcccctgttcaagtgattctcctgcctcagcctcctgagtagctggtattacaggcgcccgccaccgtgctcagctaatttttgtatttttagtggagatggggtttcaccaggttagccagcttggtcctgaactcctgacctcaggtaacccacctgcctcagcctcccaaagtgctgggattacaggcgtgagccactgcgcccggcctagattgtgaaggtttttgtttttcatactaaggcatttgagcttttcctgtaggtaggtgatagtcattttttttttttgagacgtagtctggctctgtcgcccaggctggagtgcagtggcgcagtcttggctcactgcaagctctgcctcctgggttcatgccattctcctgcctcagcctcccgagtagctgggactacaggtgtctgccaccatgcccagctaattttttgtatttttagtagagacggggttttaccgtgttagccaggatagtgtcaatttcatgacctcgtgatccacctgcctcgtcctcccaaagtgctgggattacaggcgtgtgccaccgcgcccggccctttttttttttttttttttgaggtggagtctcgctctgttgccaggctggagtgcagtggcacgatctcatctcactgcaacctccgcctcccaggttcaagcaattctgcctcagcctcccaagtagctaggactacaggcacacgctgccacgctcagctaattttttttttttttgtattttagttgagacagggtttcaccatgctggccacgctggtctcgaactcctgacctcgtgatccaccgacctcggcctcccaaagtgctaggattacaggcgtgaaccactgcacccggcctattcattcattttgactgttaagatgttttcttttttgccgcattttaagtccacttgttcttattttgtcctactggtacattctcagtatgtggttttttattgtgtcttgtgtgtgtttatattgaagaatttcatgtttctgactctgctgtatttgaaaactgatggagtgcccaagatgagggagtttagcaataatcttgatggtatactgtgttggtcacgccctctctggcatgagctgcctgaagcacattgtcaaagatgaaagctcttttggggaaaagtgctctcctgtggaatcatcccttgtcatagcatgtggctctaaattttcagcctcattcacagtagcttgcattgttgtattgcttttgggacacctgtgttttatctggaaatgtagacaggaatagcggttttttttgtatgtgtattatatattgtttcactgctaatcttctacacaattttttagaataaaaaagggtaaatagcttgtgccattttgctaattacatagatttgacttttgatcacataaataaaaaataaaacaaggcaggacattgtcctgcacatagttgatgtggacaaatactttttattactttgaaattcttattttgatagttttccacttaatgaggcaagtgcttaagcctcagtctttttgagttctcattatttagacataaggaaaggagaaatgaaggtttttctttattctccccatgcctttcctttttttctcttttattctttttttttttttttaagagcagaatatactagatcaggacaaattaaggtgatactggaatttaggtgtttttactggaaaaaaggcatttcctttgagatagtttaaagaaaatagtaaggagataagaatcagttcaactactaattcaggaagccgggagagatgtacattcaaagcataggacagaatcaagttttctttcttttttttttttttttttttttgagacggagtctcgttctgttgcccaggctggagggcagtggtgcgatcttgactcactgcaacctccgcctcatgggttcaagcaattctcctgccgtagcctcccgagtagctgggattacaggcacccaccaccacacccggctaatttttgtatttttagtagagacggggtttcaccatgttggtcaggctggttttgaactaccttttttttttttttttttttgagacagagtctttctctgtcagccaggttggagtgcagtggcacaatctcggctcattgcaagcttcacctcctgggttcacgccattctcctgcctcagcctcccgagtagctgggactacaggcgcccgccaccacgcttggctaattttttgtatttttagtagaggcagggtttcaccatgttagtcaggatggtctcgatctcctaacgtcgtgatctgcctgcctcggcctcccaagtgctgggattacaggtgtgagccaccgtgcccagccctgctggttttgaatttctgacctcaaatgaccacccgcctcagcctcccaaagtgctgggattacaggcgtgagccacagtgcccagccccttttttttttttttttttttttttttttgagatggagtctctgttgtttaggctggagggcagtggcatgattttggctcactgcaacctctgcttcccgggttcaagcgattctcctgcctcagcctcccaagtagctgggattacaggtgtgcatcaccaggcctagctaattttttgtatcttagtagagatgggatctcatcaggttggccagcctggtctcgaactcctgacttcaggtgatccgcctgcctcggcctcccaaagtgctgggattacaggcgtgagccaccgcgcccgacctacaattccgtagttttagtaaaccattgcagtaacctacaaaacacattttgatgtttaacttttatctctcagatttttttttgtctgaaaatgacaaagaaatcctttgttctgagttttggtttaaaacataatctctatctgtgtgacatttaaaagaagcagaagacatagttctaacctcaggaagtttagaatcttaattgggaaaacaaccataaatatatactttttggaattggagcttgaaggattcacaggatttgatagattgtgagggaagaagtggaagtagaataacatattctgcaaacatgtagaaatgctgtgtttgtgtgggaaagtactaaggcttcaggtagaaagagtagatccagattatggagagccttgaagctttccccttaagaccttaagatttagaataggatgctggcagtaagggtagagaagaatgggtacaccatagacacattacaaagaaatgattaacactgctcagagactgacatgtaagatatctggggtaggggatggtgatgcatgccttcatagggaaggtatttgagagtttgaatatgagttcagatttgggtatgagttatgcaggtgaaccccaaaattggggctcagcccaggggggttcttggctttgtgcaagattcatttgcaagccaatagagaaaaaggaaagcaagtttattagagcagcagagtacaggaaatggctgccccatagacacagcaatagcagcagcccttgtgaatagatagctattccttgattatatactaaataagggcaggttattcatcaattttctagaaaaggggcagggagttcccagaaccaagagatcctcccattttaaaccatataaggtaacttctaggggttgccatggcatttgtaaactgtcatggcagtggtgggacttttcttctttgtatgtatgtatgtatatatttatttattgtttatttattttgagacagagtctcactctgttccccaggctggagtgtagtggcacgatcttggctcaccgcaacccccgcctcctgggttcaagggattctcctaccccagcctttcgagtacctgggactacaggcatgcaccaccacactcagctaattttttttgttttttgttgttttgagatggagtctcgctctgttgcccaggctggagtgcagtggcgccatctcagttcactgcaaccaccacctcctgggttcaagcgattctcctgccccagcttcctgagtagctggggttataggtacccgctaccatgcctggctaatttttgtatttttagtagagacggggtttcaccatgttggtcaggctggtctcaaactcctgacctcatgatctgccctcctcagcctcttaaagtgctggaattacaggcttgagtcactgcacctggctttttttgtatttttaattgagatgcgtttttgccatgttggccaggctggtcttgaactcctgacctcaggtgatcatctgcccgcctcagcctcccaaagtgctgggattacaggcatgagccaccatgcccagcctgtttttattttttaaaaccaatccatttaattgtgtctttcaaggtaaacaatttatggagcctggatcccaagcctgagagtgctagagctatgggtccaaaacttgtggtattctgagttcagaagggttcgaactcacggtgttcaactcacggagtcagagaacatgcggaatttgtgtattccatttagcaattttgtaaattaccagaaacagactgaaagagtctttcaagatggggaaaattcaactcctgtgttttttttgtttttttgtttttgagacagagtttcactcttgtttcccaggccgtagtgcaatggcacaacctcaatggcccctgctcggttgaagcgattcttctgcctcagcctcctgagtagctgggactacagccgtgtgccaccatgccaagctaatttttgtatttttagtagagatggggtttcaccatgttggccaggctgtctcgaactcctgacctcaagtcatccacccacctcggcctcccaaagtactgggattacaggcgtgagctaccgtgcctggcccaggacagctttttaacaagcagttaaagtggaaaagaaccccccagtagcacgctggtttagtttataagattttagtttacaaattaaaaaatctatatgttttacattttctctttatatcacttttttcctttatctttctctttgtcgtcttttgtatccttttttgctctcttctttttcctatctttttttttttttttggtgacagagtcttgctctgtcacccaggctggagtgcagtggcgcgatctcggctccctgcaagctccgcctcccgggttcacgccattctcctgcctcagcctcccgagtagctaggaatacaggtgcccgccaccacacccggctaatttttttgtatttttagtagagacggggtttcactgtgttagacaggctggtctcgatctcctgaccttgtgatccgcccgcctcggcctcccaaagtgctgagattacaggcgtgagccaccgcgcctggccggtttctttttcctgtctttcttctctgcatcccagttggcaatcttgttgatgaggttgtgtagggtgatcacagaatggatcagcgaggccaagtacactgctaccatttggttattggtcttcaggtaaaaggccttgacaaactcctataggctaatgactggcagcagcttgaagacctgcagctgatagatgaattggtggttggtggacagtttgcctgtggcaactttttccaggtagcttctggtacccagaagcttggagttcagtcccttcaaatccaggacctggtttgtgatacactgggaaagagtgcccactgtagtgtctttgatgtcttgtaacaagtgtttaactccaatttccttagcttcctctgctgcagtttcactggtcacatgctcaaatgttttcaaggctgaagttccatcttcatagacttctactgaaatatatgcttctgtaggcagccctaagtcctttggcttcatgtcactagtgaccaatactgagttacggcagtatcttttcatgatttcattgaaggcagtgtcattcttgtgtagtttagggcctatgtggtaccactcaactattctttccctggcattcaccctcttaaacattctgtatgtgtttttcaaataatcgtgggctaaaaaacaattatctttgtcatcttcattaaaagggactgtaaaactgctggatacatcaagtactttcatttgccatgaccgcaaaagcacatgaagaatgcatttctggtttccaaccttgctgattctgttgaaatgatccaccacattgagcagtacctgggggtggactaccaccttctgcaccaccaggtccagcctcatgatacactctggccaccaggcctggctccctgtgacccactggagtttcttttagcatgcaaattcattataattagtgtataataagcagtgagagcaaccgaatgtcacttttgttgccatcttggttgtaactggttttggctgctttctttgctgcatcctgttttgatcagggttttgttcttgttttgttcagcaggctctctggccagtgcttggaaaacaaatcctgcttctctcctacctcactccccccacagagattatatactccccttcaatcttacagggttttagaagggtggaagtccatcttctgtgactgcttcctgttgattttatgggcattggccctgcctagcactggaggagtaaaaatctcttgatgcctcatctaaggggtcagaacaaggatgtgttggaagccacttgctagcattatcttcacatggaaattgttgcaatctagaagacacacactacaaggaggctaaaagaggcagggccaaagattcatagttacaagatagctgctagaggtcctaaaaagagtagaaaccaggtgagacttgggagggttttttttgttgttgttattttttgggttttttgagacaggatctcgctctgtcacccaggctggagtgcagtggtgtgatcatggcccactgcagctttaacctcccaggctcaagtgatcctcctgccttagcctcctgagtagctgggaccacatgtgtttgccagcaacacccagctgatttttaaatgtttttatagagacacagtctcactatgttgcccgggctggtcttgactcctgagctcaagtgatcctcccactttagcctcccaaagtactggtattacaggcgtgagccactctgcctggccaggagggtgttttttatggtcaaccagatatagttggggtcagttccctggttatatatatgtaaccaggtggcttgctcttagaacttttgaatgttaacctcagcctgtccagagttgttaatatatgtgcagtcggtcttattgataacagtgcagactctacctttttcagtcagtaaacaatccaagactagtctgttgtcagggctacaattgccaaagagtccagagattcctgaatttttcttaatgtctgactagtgttggtggccagagattctagggcctgagttatgtttcttagcattgacttgtggtatgcaaagcccctgccaaggggccaccacccctattgctgccccaattcctgtaaaaattaatcctattgctcttttacttcttgtttttctagattttatggggttatgaatggataccccctgaagggataatggtggccaaaatacattcactggtgtttcaagtttttgataagcaaaatggaaagctattcctagaagaataaatggttccctacagggttgggagtgggtatggggtaggatttcttcccctaaaggtgagcccagatgggtcacaaattgaatccttgcaagttatgccgtccattttttattgccaaactgggtctatagagataccttttccaggttccaatgggggtgattgagtagccctcgttttccaccagagggtggtacctccatcttcccaaattaagcagtcgtttctcccttgcatgtattggtcctggaggaggcaccatgtatagtctccttgtttaccagtgggatcccgtttgccctcccatggccttgggaatttggctactagggttgggtcagagcatcgtggggaatttctgtctctgtgtcattgtcacaacaatttgtgcaaaagatagtatcattagtacactggagctgtagatacccaacatcctaggtccaggtaatagtagggggtaggagggtggttggagaggagtcaggtcaatctgttaagtgtgggagagagctgttttataagtaggggcctaggtaccaaaggaacactatggccaattaggaggtttggggagatggctgtgaggtttgcagggtgcaccagaaggtgatgctctctatcctgagggtgctgatgacagattctgcaatcatgcaggctatttcctgatgctataattctagaaatgtttactatggagttttgttcccattccacagcgagttagattgattaggagcagggagcaagaagaacagggacaactgagtatcacactgggctttagggtggtccctatactcaataaggacaagtaaggtgtttctcaggaggaggtggttgctacttatctgtcttgtgaaatagcaactttaagtcttccagaggtttgcaggtgtaggtcatggtgtcctcctcttgtgcctgtagggattcaccaaaaacaggtttgtttaatccgggacaggtgtacctagctagtgattccccgaagtttaacagcagtgggagtgcttaacaatacctaatggggagtgggtgcccttccatattggttatattataattgatcttcaaggaatccttctttccaagttttttttttttgagatgaagtcttgctctgttgcctaggctggagtgcagtggtgctatcttggctcactgcaacctccgcctcccgggttcaagtgattcccctgcctcagccttctgagtagctgggactacaggcatgtgccactatgcccagctaaattttttgtattttactagacacagggtttcaccatgttggccaggatggtcttgattccctgacctcgtgatccacccacctcggcctcccaaagtgctgggattatgggtatgagccactggcccggccctttccaagttttttttttttttttttttttttgagatggagtctcgctctgtcgcccaggctggagtgcagtggcacgatctcggctcactgcaacctccacctcccgggttcacaccattctcctgcctcagcctcctgagtagctgggactacaggtgcctgccaccatgcccggctaattttttgtatttttagtagagacgaggtttcaccatgttagccagtaaggtctccatctcctgatctcgtaatccactcgccttggcctcccaaagtgctgggattacaggcgtgagccaccacccctgccccaagtttttaataggactaggtgtcctggttaaacagggaacaatcttttcctttgtgggaaagggcaatactttattttcatattcttagagtgccttttgaacctggtctcttaagttccaaaggggagcggggggaaggtatagtgaggcttgtccaaccccttgtttcttgtcatggcctgaattagtttttcaagtttctttttttttttgagacggagtcttgctctgtcactcaggctgtagtgcagtggcacgatctcagctcactgcaacagccgccttccaggttcaagtgattctcctgcctcaggctcccaggtagttgagattacaggcgttcgccaccacgcccagctactttttgtatttttagtagagatggggtttcaccatgttggacaggttagtctccaactcctaacctcaggtgatctgtctgccttggcttcccaaagtgctgggattacaggtgtgagccactgcatccagctgccagaggcaatattgctggccaagcttttattttgttccataccaatgctgaggtggtgtgctacctgccccaggtccctcatgtcccttggtgggacgctgatggccaagggacttagattcaagtgacttatagccaattaaacattgtaggccagatggaagtggaggtaggcaggcactcattattatctcttaaaaccccttttaagcaatataagagccaaaaccagaagccaaaaaataaggttataaaactgacttatctataaattctgtgcattgagctattgtaatcttggcttgcagcaattaggtttacaaaacacaaacattttgttcagctatttaggtatctgtgtgcctgtccttgatttggaaggtctgaattaattatatccctcaaaacccagcccctataatctctcatgcccacctcttcagtagtccttgggcctggaggaattgaatagttttaaattctgtagataaaacaacacataaagaattagcaatgtttcaaacaaaaaagtcataagccctgccctagttttgagaatgacaggaaaggaatcttacaggtacctaaacatttaaattatttagtatcaaggcatagaataagttatattaattcatatagaggcaaaattattaaatgaatacaagcttgtccctgtgtctcattaaagcagtttactttttttttgagactgagtttcactcttgttgcccaggccggagtgccatggcatgatcttggctcaccgcaacctccgcctcccgggttcaagcgattcccctgcctcagcctcccgagtagctgggattacaggcatgtactaccacgcccagctaatttttgtgtatttttgatagggacggggtttctccatgttggtcaggctgatcttgaactcccgacctcaggtgatccacccacctcagcctcccagagtgctgggattacaggcgtgatcaactgcgcccgtcctaaagcagtttactttgccccttttgcccaggtctaaagacaaggctttggttaacttgagtttggtgttagatcctggcaagagttggtgccttctctagatgagctgtctgtacccaggagtcaaagccctgtaactcaaaagcacattgattagttaatagcacccgataaggaactttttaaagggctggcagtggtaatgctggagtccacaacctgtcaggaggctgtaaaaatatatcacaaccttgcagtgattagtttttatagctttgataaagcccagcaacaagccagacaatcaagctaggattcgattctgggggcatttgtaaaagatgttaaaaagcccaaaatactgtattgacacagaaccacaggttactgtaagtaatagttacttatttacccaaagtggtaatctctctgcagtgtaattgtctctccttatgggaagcccacttaactaatcttgaagttaaatttgatgaagagaaaaataatacttgaatttaatcggacaaagtatgttcaaggttttgaatatagcaggtgaacatgaaaagttttctggttactctgaaaatttagacatgtcaagaaaaaccaagagtatagaatcaagttatactggaggaaaacattgcttttatagacctctaagctaaaatatttcagcatctgactgtaaaaacagaactggaagagaaaaagttacagcaactgatgaaaaggttgaaggagagactaatgtctcaggctttctcaaggggagaaaaagctgaaagcagtgagatagaacaattgaacttatgagatatgaatctgagaaattttcaaaagaaacaagttatagaattgaaaagcaaattttcttgtaatttcattaagagcaaatcaataccttgaaacccttactttaacataggagaccattctttagaaagattccacttttaattatagctaacttaatcacataaacaattctttttataaattctcctttataaatcttatgacctgcacagaccatgtatgatatggttgaatgaactttctgacttgtccaatactacctttttttttttttttttgagacagagtctcattctgttgcccagactggtgtgcagtggtgtaatcttggctcactgcaacctccgcctcccgggttcaagcaattctcctgcctcagcctcaaaagtagctggaattaacaggcgtgtgccaccacacccagctaatttttgtattttttagtagagacaaggtttcaccatcttggccaggctggtctcaaactcctaacctcaagtgatccacccaccttggcctcccaaagtgctgggattacaggcataagccactgtgcctggcctatactacttttcctaaataactagtcattctactactctagaacaataccatataagatccttttttttttcccactgagatctgcaggattctttcttatgtagaattattctcttttatttataacctttcttaccaaaaatacctctgaacatccataactttctttacctatctctcccctacttactggttcctttctacctggttatataaataaccttttcaagtccataatttgaatcaacctttagataacttttgaattagacacaattattctttttctcaataaaaacacatcttctttggtaagttttatataaacctaagaaggaagaaatcctgaactatcagatattagcattttatagatgagaaccattccacagtttttaaaattttttattttattgtaaaatgtttccctatataatattcctttcttaattggaaatgacccaggcatccaataagcatccaaaacgattttaagattttaaattatacaaaaagttcacttataagcatttatctcattatatttacctaatttattattattatttataattttttttctttttttttttttgagacagagtctcactctgtcacccaggttggagtgcaatggcataatcttagcttactgtaacctctgcctcccggattcaagagcttcttgggcctcagcctcccaagtagctgggatgcatgcaccaccacgcctggctaatttttgtatttttagtagccatggggttttgccatgttggccaggctggtctcaaactcctgacctcaagtgatccacctgccttggccacccaaagtgctgggattacaggtgagagcccctgtgcctagctggaactatattagacaaaattggtcattattcaaagttatttcctggttaaccatttttaaactctgaacattaggtgaacccctaagtaagaatcttaaacacatgggcattttgccagtaactgagaagattcagctattttcattgagccaacaatcttaaattcgtcttatttatacaattctgaagacatttctatttccatcaattatttaatttaattaattaattttttgagacaaggtttctgttgcccaggctggagtgcagtggcatgatcacagctcactgcagcttccgcctcttggggtcaagtgatcttccacctcagcctcctgagtagctgggactataagtgtgtgctgtcacacctggctaattttttttgttttgttttagagatggagtctcactatgttgcccaggctggtcctgaactcctgggctcaagcagtcctcccaccttagcctcccaaaaggttgggaggtgtgagcgacagcacccagtctttattaataatttgaaaacaagttttatttaccaaaggattcatgtgaacttgaaaagcctttggactttattaaagatagctggatttaaatatttctgacaattttgaaacctgttcacatggctaaactttttttttctaataggtaatccaaggaaactgtagactagaatttgggtaaggtagttttcataacagttttaattttaaaaccctcttttatccttttttcccccttcagcttcagaggaggaggagatgatttaaaagggcaggaaagaaaaagagggaaaggagggagagtagggggatgaggggtacctttccctttgtttctctggtgggggagagagagagagagagatacagcaagccagaacactcattgatggatgaagggtcaccttaccatgacaacttcaatatcagatatcttggacccaagaccttgggactgtcccagggacccacaatcctagagagacatgaaccagtagaagtataataaaagaagactgaaaaggcagaaagggaaaggaagctaggaaaaacaggctcccgtagcagcaaatgtgaattggggaagagaggggttgttgttcagggcgtgtccttggagtccctgagacagtggagaactcacccatcagtggagacaccaaaaaaagtgttcaggcggctgcttttctgccattgcagggagtcgtcattaggtcaggggttcagggcctccagaaaaatgggcttgaacaaggcagctcatttgggaccctcattttgagcagaaagaaagacaggaagagacctgttgcagaaaagaaaatttatgattttaggagggactagaagaagttgctgaagtggatggaatgacagagtaaggaaaaaaatgaaacggcaccaaatgctgaaaaacctggagtatctagacattggccagtgagggtccccataccaaatgctgaaaacctgggggtggccaacagtgaggcccaaaggcatgagacctaacacagttggggccatagaataatgtgactctgacatcccagagtcagcacaaaggaatacctctcaaaataacaaaagcctgccttacatggaatagaaacaactgcccaaattgccaaaacagggactacaaacatgacaactggataaacataagtgtgcatttaggcactaagagcagaaaagtaaaatgactggtcattagaagctaaagagaaaaggtctgagagagaaggtgacaaagtaaattacaaaggacgtggatgtccaggtgtgcttctgtctggggcacccagatgatgggggacaacgaactgactaacaacccagagacactattccccatttcctgattgatttgaaaaggtaaagggagaggagagtgaaagagaaagtaaatcagttaaagaacaccacatcggccaggcgtggtggctcacgcctataatcccagcagtctgggaggccgaggcggggggatcacgaggtcaggagttcaagaccaacctggccaatgtggtgaaaccctgtctctactaaaaatacaaaaattagctgggtgtggtggcaggcacctgtcatcccagctactcgggaggctgaaagcaggagaatcgcttgaacccgggaggcgaggttgcagtgagccgagattgtgccactgcactccaccctgggtgacagagcaagatgtcgtctcaaaaaaaaaaaaaaaaaacgaaaacaaaacacacattgagggggaacaaaggggacactcatcttttcgtggaggccaaatggtgccagtcagtctttgggttcaagcaattctcatgcctcagcctcccaagtacctgggactacaggcgtgcaccaccatggctggctaattttttgtatttttagtagagccggggttttgctctgttgcccaggctagtatcgaactcctgagctcaggcaatccacctgccttggcctcccaaagtgctaggattacaggcgtgagccacggtgctcaacccaatcagtcttaatttagggtctggctaaaggtctccctcagttccttttggcttattattggtctcttcatggtcaccaaggaatgacgcaggtgaaccccaaattggggctcagcccaggagcattcttggcttcgcactggaaggaatcatgaatgggccaacagtgaattgaaagtaagtttattagagcaacagaggaagggaaatggctgctctgtaagagaagcagccgcagcagcagacctgcggattgctggctagctgtatgtatacaaagacaacatggaaaaaaaatgaaacggtgccaaatgccaaaatacccagagtatccaggcatcagcccatgagggtccccataccaaatgacgaaaatcccagagcacctagggggtggccaacagtgaccctcaaaagcatgagacctgtatagccatatatatatgggtatactttgattatatgctaaaataaggggcagatttttttttttttttaattgatcattcttgggtgtttctcgcagagggggatttggcagggtcataggacaatagtggagggaaggtcagcagataaacaagtgaacaaaggtctctggttttcctaggcagaggaccctgcggccttccgcagtgtttgtgtccctgggtccttgagattagggagtggtgatgacttaacgagcatgctgccttcaagcatctgtttaacaaagcacatcttgcaccgcccttaatccatttaaccctgagtggacacagcacatgtttcagagagcacagggttgggggtaaggtcacagatcaacaggataagaatttttcttagtacagaacaaaatgaaaagtctcccatgtctacctatttctacacagacacggcaaccatccaatttctcaatcttttccccacctttcccccctttgtattacacaaaaccgccattgtcatcatggcccgttctcaatgagctgttgggtacacctcccagacggggtggtggccgggcagaggggctcctcacttcccagtaggggcggctgggcagaggcgcccctcacctcccggacggggcggctggctgggcagaggggctcctcacttcccagtaggggcagctgggcagaggcgaaggggcggatttttaatggattttctggaaaaggggcgaggacttcccggaactgagagtccctccccttttaaaccatataaggtaacatctgggggttgccatggcatttgtaaactgtcatggtgctggtaggaggttcttttagcatgcagataaaaggagggcaacaggaggtggctttcatcaccatcttgcttttagctggttttggccagtttctttgatcagctcctgttttgttcagcggggtctttcgaacagtgcttggaaaacaagtcctgctgatctcctacctcaaatggaatgtgaggtgacaatagggccagcaagcaaaaatagaaatctgagattgaagtttagtaagaggcaaggactagaaatgttcagtgttagtcatggttcttctccatggaaacagacatggagggggaagagcagtggattgaagacaaccttgccttgaggaagaagataacagagaaggaacaactggagaagtaatagtaaaagtgaaaagaggaaggagagctttaagaacaaggtactttaaaatgtaaatttaaaatttagtagcaaaggagggataaggataatacctgagaaaaaggttacatttgaagattgatgatcttggagagtagattcaggagtttgttggggaaaggacattatatgaagcagttaaagaggaaggaatggggctgggaacagtggctcacacctgtaatcccaacactttggaaggccaaggtgtgaggatcttgtggccaggagttcaagaacagcctgggcaagatagctaggttccatctctacagaaaattttaaaaattagccaagtgtggtagtgcatccctgtagtcctagctactcaggagtagctagggggatagcttgagcccaggagttcaaggttgcagtgagctctgatcgcaccactgcattgcaacctgggtgacagagcaagaccttgtctgtaaaaaaaagaaaaaggaggaggaatgaaaccccagagatttttctttctttcctctcccccatccccctcctcccctcctcccttcctcccctcctcctctcctcccctctcctccccactctcctcttccctcttatccccttccctcacctcccctccccttccttccctttttttttttttttttttttttttttggagacagagtctcgctttgttgaccaggctggagtgcagtggtgtgatctcggctcactgcaagctccacctcccgggttcacgccattcttctgcctcagcctcccgagtagctgggactacaggcacctgccatcatgcctggctaattttttgtatttttagtagagatggggtttccccgtagccaggatggtcttgatctcctgaccttgtgatctgcccgcctcggcctcccaaaatgctgggatcacaggtgtgagccaccatgcctggccttccttcctttttttgcagtgggagaatgggtgagaaatagctagagaaggcagcgagattattgcatattttttcaagataagttgtcagaaggaactggaggaaattataagattaaaatgctagagaaggaatggataaataactatgggttcatagtcactcagttattgataagtgtaattaagagattttaaaaatcagttcacagatatccggatttaaataaacatttattgtttagtattatctgtgatatcactccccttcattaatctggagaactgaaaattgattatactactttgcactttaattagttgtatatacaagtaatagcaataaaagtacactatgagtgtctctccagaatttttcttcaagtaactttttttttttttttttttgccaatcagataatgtaacacaaaacagagaggaagaaagaaagattgacaattcacatatatctactttggaaaatattgaaaactttaaaggagaaaataaaaatcacccgtagccctgctgtttagtatgtgtttttgttgttttactttcttttaagtaacattttagttttctgattatgaaagcagcagcatcatatacactgtagaaaaaatgaaaatacatagaaagatagttggattattttcaagtattgacattttgttacaattgatacctttttgttgttgttattgtttgtttgtttgtttgtttttgagacagagtctcgctctgtcacccaggctggagtgcagtggcatgatcttggctcaccacaacctccacttcctaggttcaagcaattctcctgcctcagcctcccgagtagctgggattacaggcgcctgccaccacacctggctaatttttgtattttcagtagaggtggggtttccccatgttggtcaggctggtcttgaactcctgaccttgtgatccacctgcctcggcctcccaaagtgctgggattacggtgtgagccactgcgctaggcgcaccttgccgggcaatacattgttaaatcatgtttcttttttctttttttttctttctttttttttttttttttttttttgagacggagtcttgctttgttgcccaggttggagtggagtgtagtggcgtgatcttagctcactgcaacctccacctcccgggctcaggtgattctcttgcctcagcctcccgagtagctgggattacaggcatgtgccactgcgcctggctaagttttgtatttttagtagagatagggtttcgccatgttggccaggctggtcttgaactcctgatctcaagtgatccacccacctcggccttccaaagtgttgggattacaggctggagtgcagtggtgtgatttcggctcactgcaagctccgcctcctgggtttgcattgtccagcctaaatcatgtttcttgactgcaggtattagtgtttaaaccttttctttatttattttttttaaagagatgaggtctcaccctgtcatccaggctatagtccagtggtacgatcatagctcactgcagcttctaactcctgggctgaactgatcctaccaagtaactggcactataggcaggagccacatcatccagctaaaaaaagctgcgactacagacctgcaccaccacacccagctttttttttttttgactttttgcagacacaaggtctctataagttgcccagcatagaaatgttttttgtttgtttgtttgtttaacaggtgaggtctcataattcactgcaacctacaattcctggccttaaatgatcctgctgcttcagccttctaaagtgctgggcttacaggtatgagccactgggctcaactagaaataactttttatttatttatttatttatttatttatttatttatttatttatttttaacgagacagagtcttactctgtagcccacgctagagtgcagtagcacaataatggctcactacaacctctaactcttggcttcaagtaatctttctgccttggcctcccaaaacgctggaattacaggcatgaagccacacataacttttttttagacagggtcccaccgtgttacctaggctggagtacagcagtgcaattacggctcactgctgccttgacctcctaggctcaagtgattctcccaccttagcctcccaagtagctgggactacaggtgtgcaccaccatgcctggctaatttttgtattttttgtcgagatagcgtttcaccacattaaccaggctggtatcaaactcctgagctcaagtgacctgtccacctcagcctcccaaagtgctgggattacagccatgagccaccatgcccagcccacaaattactttttaaacaagcataccagaacttttaaatctaagcaagtattgcccttcaaaacacagagattcactttggtaggcagagcctcttccactgacatttttactacttaaaaaatatttggggtcaggcatggtggttcacacctatccctgtacattgggaggctgaggtgagaggattgcttaaggccaggagttcaagaccagacttggcaacatagtgagaccccatctctacaaaaataaaataaaattagctgggcatggtggcaggaacctgtagtctcagctacttgggatgctgaggtggaaggatcacttgagcccaggaggttgaggccgcagtgagctgagatcgtaccactgcacttcagcctaggggacagagcgagaccctgtctcagcaacaacaaaaaaattggaactacttggccaagtgcggtggctcgtgcctgtaatcccagcactttgggaggcagaggtgggcggatcacctgaggtcaggagttcgagaccagcctgaccaacatggagaaaccccatctctactaaaaatacaaaattagctgggcgtggtggtgcatgcctataatcccagccactcgggaggctgagccaggagaatctcttgaacccgggaggcggaggttgcggtgagctgagatcgtgccattgcactccagcttaggcaacaagaatggaactccgtctcaagaaaaaaaaaaaattggaactgctttttaaaactgtccctgcagggctgggtgcgtggctcatgcctgtaattccagcactttgggaggcctagagggacagattacctgaggtcaggagttagagaccagcctggccaacatggtaaaaccccatctctactaaaaataaaaaattagctgggcgtggtgacacacgcctgtaatcccagctactcggaaggctgaggcaggagaattgcttgagcctaggatacggaggttgcagtgagctgagatcatgccaccgtactccagcctggcccacagagcgagactctgtctggaaaaaaaaaaaacaaaaaaactgtccctgcaagcacattatcagctgcaccacaaaatcatttttcatactctagaggaaatgttccttttttctacaacctttttttcccctctgactccacaatgcttttcaatttatttccccttcctagagccctttaggaccccaccttcctttatagatatgctggatgctaaaagacctcagaaagagaagctgagcagaataagagaaatagagaaagcaaaccttattcagagcatatctgtaacttatgtactgccagcctgagaactgtatgttgataacatcaaaattattattttttaatttatattgtttattttttggagacagtgcctcgctctgtcgcccaggctggaatgcagtggtgcaaccttggctcactgcaaccttggctcactgcaacctctgcctccccggttcaggtgattctcgtgcctgttgaatagctgggattacaggcacctgccaccacggctggctaattttttgtattttagtagagacgaggttttaccatgttacccagcatggtctcaaactcctgagctcaggcagtccgcccaccttggcctcccaaagtgctaggactacaggtgtgaaccaccatgcctggctgatcataacatcaaaattagctgagaacagtacaaatcaactaattataagctaaaatcatgctactcacttttaggaggcaaagaaaggagaagcataagtggaaattagggtatgtaagtcaaattcagaagaacaagtaaaattctattagaataaacaccattaaagcagaagatttagctggatggtgtgatggaagtaagctataacaatgctactgcactccaggctaggcgacagagtgagacccaagtataaagactggccatgtgttttgaaagaaaatgttcaactaagtaatacacaaactagggaaaaaattcagaaatataaaaagtacacagtgaaaatttaggcatcctttcactttgtactcttgctccccaagtcctcttcccaggtaactgttaaacaattttttgtgtatagtccagggattttctgtatatatgcaagctatttccttgatagcctgatttctgatgtttaccatttttttttttttttttttttgagacagagtctctctctgtcgcccaggctggagttcagtggcgcgatctcggcacactgcaacctccgcctcctgggttcaagcagttctcctacctcagcatcctaagtagctgagattacaggtgcccgccaccatgcctggctaattttttgtatttttagtagagacggggttttgccgtgttggccaagctggtctcaaactcctgacctcaagtgatccacccatctcagcctcccaaagtgctgagattacaggcgtgagccactgtgcccagcattcttttttggtttgtttgtttgttttgtttgagatggagtttcgctctgttgccctggctggagtgaagtggcactactatcttggctcactgcaacctctgcctgccaggttcaagcgattctcctgcctcagcctcccaagtaactgggattacaggtgcctgccaccatgcctggcttatttttgtattctttttttacagccgaggtttcatcatgttggccaggctggtctccaactcctgacctcaagtgatctgcctgcctcagccttccatagtgctgagattacagatgtgagccactgcgcccagcctacttttaatactacatgaatatttctttgcgtgtgtgtgtgtgtgtgtgtgacagtgtcttgctctgacacccaggctggagtgcaatggcatgatcacagctcactgcagccttgaactccagggtccaagtgattctcccaccacaccctcctaagtagctgggaccacaggtgtgtaccaacacacccagctaattttagagctctatatttttgtagagacaaggtatctccaaatgttgctcaggctggtcccgaactcctggatcctggctaaagcgatcttcctgccctggcctcccaaagtaatgggattacaggtgtgagccacctggcctagcctaattttttatttttatttttagtagagacaaagcctcgatatgttgctcagactggtctcaaactcctgggttcaagtgatcctcctgcctcagcctcccaaagtgctgggatgatagtcatgagccacctcatgactataagcacctggcttttttttttgtgtgtgtgtgtgtgtgacggggtcttgctgcgttgtccagtctggagtgcagtggtggaatcgtatctccctgtaacctcaaaatcctggcctcaagccatcctcccagctcagcccccccaagtaactaggactacaagcatgcaccatcaccccttttttctctgtctttttaatgctagcctcacctactcccctcacaaagggagtgtttatgaagtgttgaggtgagaaagttgtctaatgaactgtagaaccatatatttacaattttatggtgacagttactcttctgctctgccaaattgatttacaaagtcagggcattttatgattatatttatagttgatgaaatatggtgttaatggtcatctatataaaatgtcatcaggaatttcctttacaagtctgatttttcataggaaaaaatgcaaaactgaaagcatattagaaataaaaagacctcagcaattacctagtttaactccctgagtttacagatgagtaaattggatctgagctttgatttaagagaggaaaattcctatatagtatatgcttaattcatgaagttgtctacctaaaaacactataataagatgctaaattctacaacagagtatgactgagaatggtcaaagtgtggagcaatatttgtgattcttccagggaaacctcaaatgaattctgaaggggagataccttccctgccatcaggcagccaatctgcaaaaccagtaagccagcccaggaaatcaacccagccagatgtttgtgcctctcctcaagaaaagccactcaggactctgtttcaccaacctgaggaag

SEQ ID NO: 12319 - DNA, 779 bp, Homo sapiens
cagaatggaacaaaagtgggacttttaaaatgttgccctgtaagaagagaagaactacagtgacagagtccctacagcataaaggcaatcaagaggaaaacaacgtagacctagaatcagccgttaaaccagaatctgaccaggttaaggacttgagttcggtgtcactatcctgggatccaagtcatggcagagtagctggcttcgaagtacagtctttgcaggatgcaggaaatcagcttggtatggaggatacatctctgagctctggaatgctcacccagaacacaaatgtaccaattctagaaggtgttgatgtggccatctctcagggaatcaccctaccttccttggagtcttttcacccccttaatatacacattggtaaaggaaaactccacgctactggctcaaagagagggaaaaaaatgacactcaggcctgggccagttacccaagaagacagatgtgatcatcttaccctaaaggagcctttttcaggagagcctagtgaagaagtcaaggaagaaggaggtgaggtctcataattcactgcaacctacaattcctggccttaaatgatcctgctgcttcagccttctaaagtgctgggcttacagggaaacctcaaatgaattctgaaggggagataccttccctgccatcaggcagccaatctgcaaaaccagtaagccagcccaggaaatcaacccagccagatgtttgtgcctctcctcaagaaaagccactcaggactctgtttcaccaacctgaggaag

SEQ ID NO: 12320 - DNA, 9926 bp, Homo sapiens
aatccaccttcttgccacctgcaaccccaacctcaatccggaggccactaccaccaggatatttcttgtaagtttccaaatatccataactctaaagactagagtatgaaattagcttggcaggttatttctcagttattcactgatcataatctatatttattcttctctcgggtatttttgattgttttgcctgctttctgttaaggcttcctgtgtttgctgagagaacgtaagccactgattcccatgaaaggacaaggagtgtattcaattttcttaatactgtctttctgatatttttattgaatcctcctcatctttagatccaacctaacttcttaggtttttggtaccactgttcgttttatagatgttgagactgggcacggtggctatgcctgtaatcccagcactttgagaagccaaagcaggcagattatatgaccccagtagttccagactagctggggcaacatgccgaaagcccgtctctacaaaatacaaaaattaaccagatgtggtggtgcgtacctgtagtctcagctacttgggaggcagaggtggaaggatagcttgagcctaggaggtgagggttacagtgagctgagatcgcgccactgcactcaagcctgggcagcagagtgagacccagtctcaaaataaataaataaataaaataaaagtaatagtcctaattcttggctgggtgcggtgacttgtgcctgtaatctcagcactttggtaggctgaggtggctggatcacttgaggtcaggagttcgagaacagcttgaccaacatggtgaaatccagtctctacttaaaatacaaaaaatagccgggcgtggtagcgggcgcctgtaattaatcccagctactcgggaggtagatggagaagaatcgcttgagcccaggaagtggagacttcagtgagtcaagatcgcaccactacgctccagcctgggcgacagagcgaaactccgtctcgaaaaaaaaaaaaaaaatgagtcctcattcttcataatcttacttctagttcaggagctagaccatatattccttagtgtttctcactaagtctaaaagtaaaacaagaatacaatccctgaatatctgggaactcaggcataatcttaacagagtagtttattgtgaaagactttatgatgatttttacctgtttttatcctgtagtaggaaggtcagcttctcatttagattctgaaggctactggtattaattgtctggaattgtcttaaatctttcttgtgtcctgttttcccagaaagagctgggaacctttgctcaaagctccatcgcccttcaccatcagtacaaccccaagtttcagaccctgttccaaccctgtaacttgatgggagctatgcagctgattgaagacttcagcacacatgtcagcattgactgcagccctcataaaactgtcaagaagactggtaggagacagatgtgtcagctttaagtttttacttgcggtgagaggtggtgggaatcttatcccatagataactaaggatacttgcctaggaatggaggacacaggacatttgtaatttcttccttctctcttttatcctccctttgtactcattatccaagttctagaattacatgataatctctgggcctgggtaaagtgtggaggcagtggacagtataggaatatgggaggtagagatctgaggctcagtgctaagaattggactacagcaatatgaggggtaagtattaggagtcagatcgagataaactggggcctggtaaagatgaaagtcaggtggtaaagtttggtcatgtttagctttttactgtcttcattaagatcaactaaggccaggcgcggtggctcacgcctgtaatcccagtactttgggaggccgaggcacggggaacacaatgtcaggagatggagaccatcctggcgaacacagtgaaaccccgtctctactaaaaatacagaaattagccaggcatgggggcacgcgcctgtagtcccagctactcgggaggctgaggcaggagaatcgcttgaacccaggaggcagagtttgcagtgagccaagatagcatcattgcactccagcctgggcgacagagcgagactcagtctcaaaaaaaaaaaaaaaaaaatcaactaactttatttaccatactgactgcagcataagtgatatctccattctgaatgaaatattgacttgcaagttaggcataagttagagattatacatttgccatgttcagtattttaaagaaatttgcaagtttagattctaccttgcattagtttagtattttttagaaaatacttgctatttacttaagccaaatatttgcttctgatttgtttcttgatttagcaaattagttgtggtttgttctggatttgggtttgtctttggattctattttaaatccctgagtcttatcgttaagttgaaaatagttgtatttaagtgtattatatcatagacacggatcccaaactgctttaacagctatattaaatgatatgaaatggtaatgaaaacttgatttaacaccaaattataataatatcttacacatctgttgacctgttgctttcttctggggatataaaaataacacttatggaaggagaaatatggatatagtagttttgtctctagaaatgcagaggtgcctgaaagtgagaggctgagagagggagagagaaatgaatgagactgaattgtctccttccttttatggttcttttgttcccagcctcaggaggaatctgggagaacttaagtaagaatcaaataaaagtaaaatttggaataccagatttgtgagggagattaaagaagttggaatcttattctggaagaaagaaagcattgttgaaggtctcttatccttcaagtatttaaggggggaaggaggtaaaacatttttgagcatacgctattgttagcaccttattttactaggtgctttttaagtgtttgttttacttagtgaataaagtgttccacataagaaagaatgagtcaacttttattgccattgaatgggactccctttagatataatgttagcttaagaaagactggaaacttttggggggatggtgggcagatgggagggaatcaagttaggtaaggatagctcctacctaaatgcaaaaatgcattcacaggcttttatgaagccctcttttgtcctagaagttgatttatccgagatttattttcttatagcgaatgaatttccctgtttgccaaagcaagtggcttggattctggccacaagcaaggttttcatgtatccagagttacttccagtgtgttccctgaaggcaaagaatccccaggataagatcgtcttcaccaaggctgaggacaagtaagtgtttactctgggggatcaaaacagcagaacatcccaaggagaagatgtagttcctttgaggagtttaggggaagtaagacttgtataataagacacggacacaaaagacaaaaggaaaagcaatatagatgagcagagccctctaggacgtgcttgttctagcagtgccaaatactgctttttgggagatgtcacacacatttttaaagcattttagaccggacatggtggctcacacctgtaatcccagcactttgaaaggccaaggcaggaggttcgcttttattttattttatgttatttatttatttatttagaggcagaatcttactgtgtcacccaggcagtcacagctcactgcagccttgaactcctgacatcaagcgatccttgcacctcagcctccacggagcagctgagaccacaggcgtgtgccaccatacatggctaaatttttttttttttttttgtagagatgagggtctctctgtgttatccaggcatctctcaaactcctggactcaaggcatcctcccaccttggcctcccaaagtgctgggattacaggcatgagccaccacacccaccagattatgaacatttttatggccctttgtgtgtattgccacactgttatcagcacatatgtgtatatgtaaccacgatcatatatgttgttagagggtagtattggtgccggtttaagttgtctgacagggtacctattcattttgtattagttttattagaattattctccttcctttctattctctttgaacttcctttgtattgttagtatacagctcgtcatgatacagctcatcatgatctcacgtttattaatgatttatgcctagtttcttatgttcccacataattgtgaagtatttgattttttttttttaaacagagtttcacttttgtcacccaggctggagtgcaatggtgcgatctcggctcactgcaaccttcgcccccggtttcaagtgattctcctgaccaagtagctggcattacaggcacctaccactacacctggctattttttgtatttttagtagagacgaggtttcaccatgttggccaggctggtctcgaactcctgactcaggtgatctgcctgcttcggcatcccaaaatgctgggattacaggcgtgagccattgcgcctggccttattcttattcataatacttaatcagtactcactaagtatctgaaattttctgttgagtagtcaccaacttgtacaagaattagatttacaaaaagtagattgaccaggcatggtgggcttacaactgtaataccagcactttgagaggctgaggcaggaggatcgcttgaggccaggagtttaagattagcccaggcaacatagtgagaactggtctctacaaataatggaagaaaaaaattagcccggcatggtggtgaacgtctgtggtcacagatacttgggaggatgaagtacgggaatcgcttgagcccaggcattcaaggctgcagtgcgctgtaatcatgccacccgctctccaacccgggcaacagagcaagaccctgtctgaaaaaaaatgaaaaggtagattgggccacacaccatggctcatgcctgtaatcccagcactttgggaggctgagactggagaattgcttcagcctaggaagtagaggttgcagtgagctgcgatggtgccactgcactccagcctgggtgacagcgtgagaccttgtctcaagaaaaaaatgaaagagtagattgtaaaatgtgttagtctggggagaccctttagaaggaaggactgtgaagtgagatttagtgttattctcctttctcagtttgttagctttaggactgaagcattttgaaggaactgagtttcctaatcctctaatcagcaagtaccttctaacctgcaaaactgcccaccaactgacagtgagaatcaagaacctcaacatgaacagagctcctgacaacatcattaaagtgagtgtttcctgcatgcgccatccgggcacctcaccaatatgtacccattcttttatcttgttattctcaaagaaaagaggaaccttcttttatctaaagctaatttctcccactttacactagattaattcccctattgccttttgggcaatattccgctggcagtattccacttatttgctttttgttgttgttgttgttagacagactcttgctctgtcactcaggcttgagtagagtggcgcaatcttggctcactgcagtctttacctcccaggttcaagcgattctcctgcctcggtgtctcctgcctcagcgtcccaagtagcttggattacaggcatgcaccaccacacctggctaatttttgtattttcagtagagatgaggtttcaccatgttggccaggctggtcttgaacctctgacctcaagtgatccacccgccttggcctcccaaggtgctgggattacaggcatgagccaccgcacctggtttcttcttttttatttagatatttatgttgtgtttttagagacgggttcttgctctatcatcctgtttggagtgcattggctcagtcataggtcactgtagcctcaaactcctgggttcaagtgatccttccactttagccttccaagtatcctggactacaggcgtgttccaccaaggctagctcattattttattttgtgtggagatgctgtgtcactttgttgcccagactggtcttgaagttttgacatgtgtcagtccgcctgcctcagcttggcctcccaaagtgttgggattacaggcgtgagccactatgcccagccttttgttttgttttgtttttgtttttttcttgagaaagggtcttactctgctacccaggctggagtacagtggtacagtcatagctcactgtaagctccagctactgggctcaagcattcctcccacctcagcctcccaaggagctggggattatatgcatgagccaccatgcttgcctattaatttttttttttttttttttttttttttttttttttaagaaatggagtgtccctatattgcccaggctggtctcgaatttttggccttaggcattctcctgtctcagcctctaattgctacttcctggtatattggatttaggccttatttattaaccattaaccataagccaaggaagctgaggatttacctgtctcctcactcccttactcccaccacaaacatgcacattttctgctctccaatctcctcgctagtaattatgtcacaattttggttaggttgtattcagggtttacactataagattttaaggactgtataaatactcttcacagctatgttattgtgataccttgcctttcctgctgaacattttgtttttcttggagtaaataatcgcatttttagggggatggggctggacttgattttattatgtaattattcccaggtcaacagtaaaggttacttaaattttcttaatctcctttcagcgtgtctggccttctagatattccgtcactttcatcttgaaggaattgctccttgagccctctgacactattccactctaagcgtgttgctctctgggcttgctgcactgatgttttgggctttttcctccccatcatcctgggaattctttttgcctcttactgtgttggatcttcttatttcctgaattctacatctgtgtttttgttttacttccttcctttagtgaaacacattctagtagcattttttattttaatttttttctaaatttttaaaaattgaggccgtacacggtggctcaggcctgtaatcccaggtctttgggaggctgaggcaggcagatgacctgaggccaggagttcaagaccagcctgggcaatatggtgaaaccccgtctctactaaaaatacaaaaattgaccaggtatggtgccactcacctgtaatcccagccactcgggaggctgaggcacaaaactcacttgaactagggagacagaggttcagtaagcgtggatcactcccctgcactccagcctgggcgacagaggagtctctgtctcaaagatcaagaagcagagaaacaaacaaaaagtacaaagatgtgcacagaaaatgacacacaactcaaacgtgaaggaaaaagatttttctgcagcagaatacggtttatcaagtgccttagcaccacggatgaaactagacaaattctaagccatattatcatgaattttcaaaacattggagccaaaggaaaaatcttacatgctatcagaggttgggagaaacaggtgttacatgaatattcaagagttaaatggggccgtggctcacgcctataatcccagcactttgggaggccaaggtgggagaattacttgagcccaggagttcaagaccagcctgggcaaaaaagtgagacctgtctcaatttttttttttttttttgagatggagtcttgctgtgtcatccaggctggagtgcagtggtgtgatctcggctcactgcaagctccgcctcccaggttcatgccattctcctgcctgagcctcctgagtagctgggactacaggcaccagccaccacgcctggctaattttttgtattttttagtagagacggggtttcaccatgttagccaggatggtctcaatctcctgacctcgtgatctgcccacctcaacctcccaaagtgctgggattacaaggtgagccactgcgcctggcctattctttttttttttttttgagacggagtctcactgtgtcacccaggctggagtgcagtggcactgtctctgatctcagctcacctcaacctccacctcccaggttcaagcaattctcctgcctcagcccgctgagtagctgggattacaggtgcgtgccaccatgcctggctaatttttgtatttttgtaggaataggggttttgccatgttggccagtctggtcttgaactcctgaccttaggtaatctgcccacctccgaaagtgctgggattataggcatgaaccaccacgcccaaccttcatttactcttaaaattgaactttctcaggctctttttttccccccttctcttctaatgcctttcacaccaccatttgcttaaaaggaagctttcatgtgtccaaggtatagattacgatgttgtctttgcagctgttgatcaagaacaaatcttacataagattgctctgagcatctgcttccttttctctctgtgacctaaactctccccttcctggcaaccagaatggagatcatcagttagaaaatattgaataattgtgaaatatttaaatagagattagtttaatttgaaatgtacaagtattcagcatatgctatttatatatgtgcgttcatggatgtttgtgtatgtggtcttgtgtgtgtgtgtgtgtgtgtgtgtgtgtttctcttgatccaccaccaccccattcaccagcctgacaggggacagtgtttccagaaggaatgtaattcatgcgcatttttttcatgttaagttttataagaagaccaaacagctgccagtcctaggaaaatgctgtgaagagatccagccacatcagtggaagccacctatagagagagaagaacaccggctcccattctggttaaaggtacagccctcttcctcgaagtctgtaggaggcagaaggtcactgaaagttctgagagaatatcaagggcttccttaatcgtctaatgctttagttgtagaactaggactttagaaatcttcctgattcacctttcttcccttacttttctgcccttctctgggtgattctacagcattttcaaaataataggtaaaataataatttgctaaaggaaattcacagaagtttctaaagtgtataattagaatgtggtctttgtagatttgatatgcagagagacccttcttggaaagatgccttgagactgtctaaggtctctaaaacctagaaagccctattgtttttcccaaattctttttttgttgttgttttgttttgtttttgagacagagtcttgctctgtccacccaggctaaggtgcgatctcggcttctcgcaacctctgcctcccaggttcaagtgattctcctgcctccgcctcctgagtagctgggattacaggcacatgccaccacacccaactaatttttgtatttttagtagagacggggtttcaccgtgttggtcaggctcatcctgaactcctgacctcaagtgatctgcccacttcagcctcccaaagtgctgggattacaggcgtgagccactgtgccaagcctctttttcccaaattctgacatatgctggatcagagtgttcttgtttccaataggccagtctgccatccatccaggaagaactgcggcacatggctgatggtgctagagaggtaggaaatatgactggaaccactgagatcaactcagatcgaagcctagaaaaagacaatttggagttggggagtgaatctcggtacccactgctattgcctaagggtgtagtcctg

SEQ ID NO: 12321 - DNA, 865 bp, Homo sapiens
aatccaccttcttgccacctgcaaccccaacctcaatccggaggccactaccaccaggatatttcttaaagagctgggaacctttgctcaaagctccatcgcccttcaccatcagtacaaccccaagtttcagaccctgttccaaccctgtaacttgatgggagctatgcagctgattgaagacttcagcacacatgtcagcattgactgcagccctcataaaactgtcaagaagactggtaggagacagatgtgtcagctttaagtttttacttgcgcgaatgaatttccctgtttgccaaagcaagtggcttggattctggccacaagcaaggttttcatgtatccagagttacttccagtgtgttccctgaaggcaaagaatccccaggataagatcgtcttcaccaaggctgaggacaatttgttagctttaggactgaagcattttgaaggaactgagtttcctaatcctctaatcagcaagtaccttctaacctgcaaaactgcccaccaactgacagtgagaatcaagaacctcaacatgaacagagctcctgacaacatcattaaattttataagaagaccaaacagctgccagtcctaggaaaatgctgtgaagagatccagccacatcagtggaagccacctatagagagagaagaacaccggctcccattctggttaaaggccagtctgccatccatccaggaagaactgcggcacatggctgatggtgctagagaggtaggaaatatgactggaaccactgagatcaactcagatcgaagcctagaaaaagacaatttggagttggggagtgaatctcggtacccactgctattgcctaagggtgtagtcctg

SEQ ID NO: 12322 - DNA, 4116 bp, Homo sapiens
ctgaagcattttgaaggaactgagtttcctaatcctctaatcagcaagtaccttctaacctgcaaaactgcccaccaactgacagtgagaatcaagaacctcaacatgaacagagctcctgacaacatcattaaagtgagtgtttcctgcatgcgccatccgggcacctcaccaatatgtacccattcttttatcttgttattctcaaagaaaagaggaaccttcttttatctaaagctaatttctcccactttacactagattaattcccctattgccttttgggcaatattccgctggcagtattccacttatttgctttttgttgttgttgttgttagacagactcttgctctgtcactcaggcttgagtagagtggcgcaatcttggctcactgcagtctttacctcccaggttcaagcgattctcctgcctcggtgtctcctgcctcagcgtcccaagtagcttggattacaggcatgcaccaccacacctggctaatttttgtattttcagtagagatgaggtttcaccatgttggccaggctggtcttgaacctctgacctcaagtgatccacccgccttggcctcccaaggtgctgggattacaggcatgagccaccgcacctggtttcttcttttttatttagatatttatgttgtgtttttagagacgggttcttgctctatcatcctgtttggagtgcattggctcagtcataggtcactgtagcctcaaactcctgggttcaagtgatccttccactttagccttccaagtatcctggactacaggcgtgttccaccaaggctagctcattattttattttgtgtggagatgctgtgtcactttgttgcccagactggtcttgaagttttgacatgtgtcagtccgcctgcctcagcttggcctcccaaagtgttgggattacaggcgtgagccactatgcccagccttttgttttgttttgtttttgtttttttcttgagaaagggtcttactctgctacccaggctggagtacagtggtacagtcatagctcactgtaagctccagctactgggctcaagcattcctcccacctcagcctcccaaggagctggggattatatgcatgagccaccatgcttgcctattaatttttttttttttttttttttttttttttttttttaagaaatggagtgtccctatattgcccaggctggtctcgaatttttggccttaggcattctcctgtctcagcctctaattgctacttcctggtatattggatttaggccttatttattaaccattaaccataagccaaggaagctgaggatttacctgtctcctcactcccttactcccaccacaaacatgcacattttctgctctccaatctcctcgctagtaattatgtcacaattttggttaggttgtattcagggtttacactataagattttaaggactgtataaatactcttcacagctatgttattgtgataccttgcctttcctgctgaacattttgtttttcttggagtaaataatcgcatttttagggggatggggctggacttgattttattatgtaattattcccaggtcaacagtaaaggttacttaaattttcttaatctcctttcagcgtgtctggccttctagatattccgtcactttcatcttgaaggaattgctccttgagccctctgacactattccactctaagcgtgttgctctctgggcttgctgcactgatgttttgggctttttcctccccatcatcctgggaattctttttgcctcttactgtgttggatcttcttatttcctgaattctacatctgtgtttttgttttacttccttcctttagtgaaacacattctagtagcattttttattttaatttttttctaaatttttaaaaattgaggccgtacacggtggctcaggcctgtaatcccaggtctttgggaggctgaggcaggcagatgacctgaggccaggagttcaagaccagcctgggcaatatggtgaaaccccgtctctactaaaaatacaaaaattgaccaggtatggtgccactcacctgtaatcccagccactcgggaggctgaggcacaaaactcacttgaactagggagacagaggttcagtaagcgtggatcactcccctgcactccagcctgggcgacagaggagtctctgtctcaaagatcaagaagcagagaaacaaacaaaaagtacaaagatgtgcacagaaaatgacacacaactcaaacgtgaaggaaaaagatttttctgcagcagaatacggtttatcaagtgccttagcaccacggatgaaactagacaaattctaagccatattatcatgaattttcaaaacattggagccaaaggaaaaatcttacatgctatcagaggttgggagaaacaggtgttacatgaatattcaagagttaaatggggccgtggctcacgcctataatcccagcactttgggaggccaaggtgggagaattacttgagcccaggagttcaagaccagcctgggcaaaaaagtgagacctgtctcaatttttttttttttttttgagatggagtcttgctgtgtcatccaggctggagtgcagtggtgtgatctcggctcactgcaagctccgcctcccaggttcatgccattctcctgcctgagcctcctgagtagctgggactacaggcaccagccaccacgcctggctaattttttgtattttttagtagagacggggtttcaccatgttagccaggatggtctcaatctcctgacctcgtgatctgcccacctcaacctcccaaagtgctgggattacaaggtgagccactgcgcctggcctattctttttttttttttttgagacggagtctcactgtgtcacccaggctggagtgcagtggcactgtctctgatctcagctcacctcaacctccacctcccaggttcaagcaattctcctgcctcagcccgctgagtagctgggattacaggtgcgtgccaccatgcctggctaatttttgtatttttgtaggaataggggttttgccatgttggccagtctggtcttgaactcctgaccttaggtaatctgcccacctccgaaagtgctgggattataggcatgaaccaccacgcccaaccttcatttactcttaaaattgaactttctcaggctctttttttccccccttctcttctaatgcctttcacaccaccatttgcttaaaaggaagctttcatgtgtccaaggtatagattacgatgttgtctttgcagctgttgatcaagaacaaatcttacataagattgctctgagcatctgcttccttttctctctgtgacctaaactctccccttcctggcaaccagaatggagatcatcagttagaaaatattgaataattgtgaaatatttaaatagagattagtttaatttgaaatgtacaagtattcagcatatgctatttatatatgtgcgttcatggatgtttgtgtatgtggtcttgtgtgtgtgtgtgtgtgtgtgtgtgtgtttctcttgatccaccaccaccccattcaccagcctgacaggggacagtgtttccagaaggaatgtaattcatgcgcatttttttcatgttaagttttataagaagaccaaacagctgccagtcctaggaaaatgctgtgaagagatccagccacatcagtggaagccacctatagagagagaagaacaccggctcccattctggttaaaggtacagccctcttcctcgaagtctgtaggaggcagaaggtcactgaaagttctgagagaatatcaagggcttccttaatcgtctaatgctttagttgtagaactaggactttagaaatcttcctgattcacctttcttcccttacttttctgcccttctctgggtgattctacagcattttcaaaataataggtaaaataataatttgctaaaggaaattcacagaagtttctaaagtgtataattagaatgtggtctttgtagatttgatatgcagagagacccttcttggaaagatgccttgagactgtctaaggtctctaaaacctagaaagccct

SEQ ID NO: 12323 - DNA, 591 bp, Homo sapiens
ctgaagcattttgaaggaactgagtttcctaatcctctaatcagcaagtaccttctaacctgcaaaactgcccaccaactgacagtgagaatcaagaacctcaacatgaacagagctcctgacaacatcattaaattttataagaagaccaaacagctgccagtcctaggaaaatgctgtgaagagatccagccacatcagtggaagccacctatagagagagaagaacaccggctcccattctggttaaaggtacagccctcttcctcgaagtctgtaggaggcagaaggtcactgaaagttctgagagaatatcaagggcttccttaatcgtctaatgctttagttgtagaactaggactttagaaatcttcctgattcacctttcttcccttacttttctgcccttctctgggtgattctacagcattttcaaaataataggtaaaataataatttgctaaaggaaattcacagaagtttctaaagtgtataattagaatgtggtctttgtagatttgatatgcagagagacccttcttggaaagatgccttgagactgtctaaggtctctaaaacctagaaagccct

SEQ ID NO: 12324 - DNA, 7972 bp, Homo sapiens
tcaacttttattgccattgaatgggactccctttagatataatgttagcttaagaaagactggaaacttttggggggatggtgggcagatgggagggaatcaagttaggtaaggatagctcctacctaaatgcaaaaatgcattcacaggcttttatgaagccctcttttgtcctagaagttgatttatccgagatttattttcttatagcgaatgaatttccctgtttgccaaagcaagtggcttggattctggccacaagcaaggttttcatgtatccagagttacttccagtgtgttccctgaaggcaaagaatccccaggataagatcgtcttcaccaaggctgaggacaagtaagtgtttactctgggggatcaaaacagcagaacatcccaaggagaagatgtagttcctttgaggagtttaggggaagtaagacttgtataataagacacggacacaaaagacaaaaggaaaagcaatatagatgagcagagccctctaggacgtgcttgttctagcagtgccaaatactgctttttgggagatgtcacacacatttttaaagcattttagaccggacatggtggctcacacctgtaatcccagcactttgaaaggccaaggcaggaggttcgcttttattttattttatgttatttatttatttatttagaggcagaatcttactgtgtcacccaggcagtcacagctcactgcagccttgaactcctgacatcaagcgatccttgcacctcagcctccacggagcagctgagaccacaggcgtgtgccaccatacatggctaaatttttttttttttttttgtagagatgagggtctctctgtgttatccaggcatctctcaaactcctggactcaaggcatcctcccaccttggcctcccaaagtgctgggattacaggcatgagccaccacacccaccagattatgaacatttttatggccctttgtgtgtattgccacactgttatcagcacatatgtgtatatgtaaccacgatcatatatgttgttagagggtagtattggtgccggtttaagttgtctgacagggtacctattcattttgtattagttttattagaattattctccttcctttctattctctttgaacttcctttgtattgttagtatacagctcgtcatgatacagctcatcatgatctcacgtttattaatgatttatgcctagtttcttatgttcccacataattgtgaagtatttgattttttttttttaaacagagtttcacttttgtcacccaggctggagtgcaatggtgcgatctcggctcactgcaaccttcgcccccggtttcaagtgattctcctgaccaagtagctggcattacaggcacctaccactacacctggctattttttgtatttttagtagagacgaggtttcaccatgttggccaggctggtctcgaactcctgactcaggtgatctgcctgcttcggcatcccaaaatgctgggattacaggcgtgagccattgcgcctggccttattcttattcataatacttaatcagtactcactaagtatctgaaattttctgttgagtagtcaccaacttgtacaagaattagatttacaaaaagtagattgaccaggcatggtgggcttacaactgtaataccagcactttgagaggctgaggcaggaggatcgcttgaggccaggagtttaagattagcccaggcaacatagtgagaactggtctctacaaataatggaagaaaaaaattagcccggcatggtggtgaacgtctgtggtcacagatacttgggaggatgaagtacgggaatcgcttgagcccaggcattcaaggctgcagtgcgctgtaatcatgccacccgctctccaacccgggcaacagagcaagaccctgtctgaaaaaaaatgaaaaggtagattgggccacacaccatggctcatgcctgtaatcccagcactttgggaggctgagactggagaattgcttcagcctaggaagtagaggttgcagtgagctgcgatggtgccactgcactccagcctgggtgacagcgtgagaccttgtctcaagaaaaaaatgaaagagtagattgtaaaatgtgttagtctggggagaccctttagaaggaaggactgtgaagtgagatttagtgttattctcctttctcagtttgttagctttaggactgaagcattttgaaggaactgagtttcctaatcctctaatcagcaagtaccttctaacctgcaaaactgcccaccaactgacagtgagaatcaagaacctcaacatgaacagagctcctgacaacatcattaaagtgagtgtttcctgcatgcgccatccgggcacctcaccaatatgtacccattcttttatcttgttattctcaaagaaaagaggaaccttcttttatctaaagctaatttctcccactttacactagattaattcccctattgccttttgggcaatattccgctggcagtattccacttatttgctttttgttgttgttgttgttagacagactcttgctctgtcactcaggcttgagtagagtggcgcaatcttggctcactgcagtctttacctcccaggttcaagcgattctcctgcctcggtgtctcctgcctcagcgtcccaagtagcttggattacaggcatgcaccaccacacctggctaatttttgtattttcagtagagatgaggtttcaccatgttggccaggctggtcttgaacctctgacctcaagtgatccacccgccttggcctcccaaggtgctgggattacaggcatgagccaccgcacctggtttcttcttttttatttagatatttatgttgtgtttttagagacgggttcttgctctatcatcctgtttggagtgcattggctcagtcataggtcactgtagcctcaaactcctgggttcaagtgatccttccactttagccttccaagtatcctggactacaggcgtgttccaccaaggctagctcattattttattttgtgtggagatgctgtgtcactttgttgcccagactggtcttgaagttttgacatgtgtcagtccgcctgcctcagcttggcctcccaaagtgttgggattacaggcgtgagccactatgcccagccttttgttttgttttgtttttgtttttttcttgagaaagggtcttactctgctacccaggctggagtacagtggtacagtcatagctcactgtaagctccagctactgggctcaagcattcctcccacctcagcctcccaaggagctggggattatatgcatgagccaccatgcttgcctattaatttttttttttttttttttttttttttttttttttaagaaatggagtgtccctatattgcccaggctggtctcgaatttttggccttaggcattctcctgtctcagcctctaattgctacttcctggtatattggatttaggccttatttattaaccattaaccataagccaaggaagctgaggatttacctgtctcctcactcccttactcccaccacaaacatgcacattttctgctctccaatctcctcgctagtaattatgtcacaattttggttaggttgtattcagggtttacactataagattttaaggactgtataaatactcttcacagctatgttattgtgataccttgcctttcctgctgaacattttgtttttcttggagtaaataatcgcatttttagggggatggggctggacttgattttattatgtaattattcccaggtcaacagtaaaggttacttaaattttcttaatctcctttcagcgtgtctggccttctagatattccgtcactttcatcttgaaggaattgctccttgagccctctgacactattccactctaagcgtgttgctctctgggcttgctgcactgatgttttgggctttttcctccccatcatcctgggaattctttttgcctcttactgtgttggatcttcttatttcctgaattctacatctgtgtttttgttttacttccttcctttagtgaaacacattctagtagcattttttattttaatttttttctaaatttttaaaaattgaggccgtacacggtggctcaggcctgtaatcccaggtctttgggaggctgaggcaggcagatgacctgaggccaggagttcaagaccagcctgggcaatatggtgaaaccccgtctctactaaaaatacaaaaattgaccaggtatggtgccactcacctgtaatcccagccactcgggaggctgaggcacaaaactcacttgaactagggagacagaggttcagtaagcgtggatcactcccctgcactccagcctgggcgacagaggagtctctgtctcaaagatcaagaagcagagaaacaaacaaaaagtacaaagatgtgcacagaaaatgacacacaactcaaacgtgaaggaaaaagatttttctgcagcagaatacggtttatcaagtgccttagcaccacggatgaaactagacaaattctaagccatattatcatgaattttcaaaacattggagccaaaggaaaaatcttacatgctatcagaggttgggagaaacaggtgttacatgaatattcaagagttaaatggggccgtggctcacgcctataatcccagcactttgggaggccaaggtgggagaattacttgagcccaggagttcaagaccagcctgggcaaaaaagtgagacctgtctcaatttttttttttttttttgagatggagtcttgctgtgtcatccaggctggagtgcagtggtgtgatctcggctcactgcaagctccgcctcccaggttcatgccattctcctgcctgagcctcctgagtagctgggactacaggcaccagccaccacgcctggctaattttttgtattttttagtagagacggggtttcaccatgttagccaggatggtctcaatctcctgacctcgtgatctgcccacctcaacctcccaaagtgctgggattacaaggtgagccactgcgcctggcctattctttttttttttttttgagacggagtctcactgtgtcacccaggctggagtgcagtggcactgtctctgatctcagctcacctcaacctccacctcccaggttcaagcaattctcctgcctcagcccgctgagtagctgggattacaggtgcgtgccaccatgcctggctaatttttgtatttttgtaggaataggggttttgccatgttggccagtctggtcttgaactcctgaccttaggtaatctgcccacctccgaaagtgctgggattataggcatgaaccaccacgcccaaccttcatttactcttaaaattgaactttctcaggctctttttttccccccttctcttctaatgcctttcacaccaccatttgcttaaaaggaagctttcatgtgtccaaggtatagattacgatgttgtctttgcagctgttgatcaagaacaaatcttacataagattgctctgagcatctgcttccttttctctctgtgacctaaactctccccttcctggcaaccagaatggagatcatcagttagaaaatattgaataattgtgaaatatttaaatagagattagtttaatttgaaatgtacaagtattcagcatatgctatttatatatgtgcgttcatggatgtttgtgtatgtggtcttgtgtgtgtgtgtgtgtgtgtgtgtgtgtttctcttgatccaccaccaccccattcaccagcctgacaggggacagtgtttccagaaggaatgtaattcatgcgcatttttttcatgttaagttttataagaagaccaaacagctgccagtcctaggaaaatgctgtgaagagatccagccacatcagtggaagccacctatagagagagaagaacaccggctcccattctggttaaaggtacagccctcttcctcgaagtctgtaggaggcagaaggtcactgaaagttctgagagaatatcaagggcttccttaatcgtctaatgctttagttgtagaactaggactttagaaatcttcctgattcacctttcttcccttacttttctgcccttctctgggtgattctacagcattttcaaaataataggtaaaataataatttgctaaaggaaattcacagaagtttctaaagtgtataattagaatgtggtctttgtagatttgatatgcagagagacccttcttggaaagatgccttgagactgtctaaggtctctaaaacctagaaagccctattgtttttcccaaattctttttttgttgttgttttgttttgtttttgagacagagtcttgctctgtccacccaggctaaggtgcgatctcggcttctcgcaacctctgcctcccaggttcaagtgattctcctgcctccgcctcctgagtagctgggattacaggcacatgccaccacacccaactaatttttgtatttttagtagagacggggtttcaccgtgttggtcaggctcatcctgaactcctgacctcaagtgatctgcccacttcagcctcccaaagtgctgggattacaggcgtgagccactgtgccaagcctctttttcccaaattctgacatatgctggatcagagtgttcttgtttccaataggccagtctgccatccatccaggaagaactgcggcacatggctgatggtgctagagaggtaggaaatatgactggaaccactgagatcaactcagatcgaagcctagaaaaagacaatttggagttggggagtgaatctcggtacccactgctattgcctaagggtgtagtcctgaaactgaagccagttgccacccgtttccccaggaaggcttggagacagaagcgttcatcagtcctgaagcccctccttatccaacccagcccctctctccagcccagcttcaaccctgggaaaacaccagcccgatcaactcattcagaagcccctccgagcaaaatggtgctccggattcctcacccaatacagccagccactgttttacagacagttccaggtgtccctccactgggggtcagtggaggtgagagttttgagtctcctgcagcactgcctgctgtgccccctgaggccaggacaagcttccctctgtctgagtcccagactttgctctcttctgcccctgtgcccaaggtaatgctgccctcccttgccccttctaagtttcgaaagccatatgtgagacggagaccctcaaagagaagaggagtcaaggcctctccctgtatgaaacctgcccctgttatccaccaccctgcatctgttatcttcactgttcctgctaccactgtgaagattgtgagccttggcggtggctgtaacatgatccagcctgtcaatgcggctgtggcccagagtccccagactattcccatcactaccctcttggttaaccctacttccttcccctgtccattgaaccagtcccttgtggcctcctctgtctcacccttaattgtttctggcaattctgtgaatcttcctataccatccacccctgaagataaggcccacgtgaatgtggacattgcttgtgctgtggctgatggggaaaatgcctttcagggcctagaacccaaattagagccccaggaactatctcctctctctgctactgttttcccgaaagtggaacatagcccagggcctccactagcagatgcagagtgccaagaaggattgtcagagaatagtgcctgtcgctggaccgttgtgaaaacagaggaggggaggcaagctctggagccgctccctcagggcatccaggagtctctaaacaaccctacccctggggatttagaggaaattgtcaagatggaacctgaagaagctagagaggaaatcagtggatcccctgagc

SEQ ID NO: 12325 - DNA, 1884 bp, Homo sapiens
tcaacttttattgccattgaatgggactccctttagatataatgttagcttaagaaagactggaaacttttggggggatggtgggcagatgggagggaatcaagttaggtaaggatagctcctacctaaatgcaaaaatgcattcacaggcttttatgaagccctcttttgtcctagaagttgatttatccgagatttattttcttatagcgaatgaatttccctgtttgccaaagcaagtggcttggattctggccacaagcaaggttttcatgtatccagagttacttccagtgtgttccctgaaggcaaagaatccccaggataagatcgtcttcaccaaggctgaggacaatttgttagctttaggactgaagcattttgaaggaactgagtttcctaatcctctaatcagcaagtaccttctaacctgcaaaactgcccaccaactgacagtgagaatcaagaacctcaacatgaacagagctcctgacaacatcattaaattttataagaagaccaaacagctgccagtcctaggaaaatgctgtgaagagatccagccacatcagtggaagccacctatagagagagaagaacaccggctcccattctggttaaaggccagtctgccatccatccaggaagaactgcggcacatggctgatggtgctagagaggtaggaaatatgactggaaccactgagatcaactcagatcgaagcctagaaaaagacaatttggagttggggagtgaatctcggtacccactgctattgcctaagggtgtagtcctgaaactgaagccagttgccacccgtttccccaggaaggcttggagacagaagcgttcatcagtcctgaagcccctccttatccaacccagcccctctctccagcccagcttcaaccctgggaaaacaccagcccgatcaactcattcagaagcccctccgagcaaaatggtgctccggattcctcacccaatacagccagccactgttttacagacagttccaggtgtccctccactgggggtcagtggaggtgagagttttgagtctcctgcagcactgcctgctgtgccccctgaggccaggacaagcttccctctgtctgagtcccagactttgctctcttctgcccctgtgcccaaggtaatgctgccctcccttgccccttctaagtttcgaaagccatatgtgagacggagaccctcaaagagaagaggagtcaaggcctctccctgtatgaaacctgcccctgttatccaccaccctgcatctgttatcttcactgttcctgctaccactgtgaagattgtgagccttggcggtggctgtaacatgatccagcctgtcaatgcggctgtggcccagagtccccagactattcccatcactaccctcttggttaaccctacttccttcccctgtccattgaaccagtcccttgtggcctcctctgtctcacccttaattgtttctggcaattctgtgaatcttcctataccatccacccctgaagataaggcccacgtgaatgtggacattgcttgtgctgtggctgatggggaaaatgcctttcagggcctagaacccaaattagagccccaggaactatctcctctctctgctactgttttcccgaaagtggaacatagcccagggcctccactagcagatgcagagtgccaagaaggattgtcagagaatagtgcctgtcgctggaccgttgtgaaaacagaggaggggaggcaagctctggagccgctccctcagggcatccaggagtctctaaacaaccctacccctggggatttagaggaaattgtcaagatggaacctgaagaagctagagaggaaatcagtggatcccctgagc

SEQ ID NO: 12326 - DNA, 7771 bp, Homo sapiens
ctctcccggaggggactcctcccaccgccgagttttcccgagaatgaggccgcgcccactgacgcgctgtggttccaaaacgagaaagtactgaaggaatggaacaaaagtgggacttttaaaatgttgccctgtaagaagagaagaactacagtgacagagtccctacagcataaaggcaatcaagaggaaaacaacgtagacctagaatcagccgttaaaccagaatctgaccaggttaaggacttgagttcggtgtcactatcctgggatccaagtcatggcagagtagctggcttcgaagtacagtctttgcaggatgcaggaaatcagcttggtatggaggatacatctctgagctctggaatgctcacccagaacacaaatgtaccaattctagaaggtgttgatgtggccatctctcagggaatcaccctaccttccttggagtcttttcacccccttaatatacacattggtaaaggaaaactccacgctactggctcaaagagagggaaaaaaatgacactcaggcctgggccagttacccaagaagacagatgtgatcatcttaccctaaaggagcctttttcaggagagcctagtgaagaagtcaaggaagaaggagggaaacctcaaatgaattctgaaggggagataccttccctgccatcaggcagccaatctgcaaaaccagtaagccagcccaggaaatcaacccagccagatgtttgtgcctctcctcaagaaaagccactcaggactctgtttcaccaacctgaggaagagatagaagatggtggactcttcattccaatggaagaacaagacaatgaagaaagtgagaaaaggagaaaaaagaaaaagggtaccaagaggaaacgagatggaaggggtcaagaagggaccttggcatatgacctgaaactggatgacatgcttgaccgtaccttggaggatggtgccaagcagcacaatctaacagcagtcaatgtccgaaacatccttcatgaagtaatcacaaatgaacacgtggtagctatgatgaaagcagccatcagtgagacggaagatatgccaatgtttgagcctaaaatgacacgctctaaactgaaggaagtagtggaaaaaggagtggtaattccaacatggaatatttcaccaattaagaaggccaatgaaattaagcctcctcagtttgtggatatccaccttgaagaagatgattcctcagatgaagaataccagccggatgatgaagaagaagatgaaactgctgaagagagcttattggaaagtgatgttgaaagcactgcttcatctccacgtggggcaaagaaatccagattgaggcagtcttctgagatgactgaaacagatgaggagagtggcatattatcagaggctgagaaagtcaccacaccagccatcaggcacatcagtgctgaggtagtgcccatggggcccccgccccctccaaagccgaaacagaccagagatagtactttcatggagaagttacatgcggtagatgaggagctggcttccagtccagtctgcatggattctttccagcccatggatgacagtctcattgcatttcgaacgcgttctaagatgcccctgaaagatgttcccctgggccaattagaggcagagctccaagctccagacatcactccagatatgtatgaccccaatacggcagatgatgaggactggaagatgtggctggggggacttatgaatgatgatgtggggaatgaagatgaagcagatgatgatgatgatccagaatataatttcctggaagacctcgatgaaccagacacagaggatttccggactgaccgggcagtgagaatcaccaaaaaggaagtaaatgagctgatggaagagctgtttgaaactttccaagatgagatgggattctccaacatggaagatgatggcccagaagaggaggagtgtgtagctgagcctcgtcctaactttaacacccctcaagctctacggtttgaggaaccactggccaacctgttaaatgaacaacatcggacagtgaaggagctatttgaacagctgaagatgaagaaatcttcagccaaacagctgcaggaagtagagaaggttaaaccccagagtgagaaagttcatcagactctgattctggacccagcacagaggaagagactccagcagcagatgcagcagcacgttcagctcttgacccaaatccaccttcttgccacctgcaaccccaacctcaatccggaggccactaccaccaggatatttcttaaagagctgggaacctttgctcaaagctccatcgcccttcaccatcagtacaaccccaagtttcagaccctgttccaaccctgtaacttgatgggagctatgcagctgattgaagacttcagcacacatgtcagcattgactgcagccctcataaaactgtcaagaagactgcgaatgaatttccctgtttgccaaagcaagtggcttggattctggccacaagcaaggttttcatgtatccagagttacttccagtgtgttccctgaaggcaaagaatccccaggataagatcgtcttcaccaaggctgaggacaatttgttagctttaggactgaagcattttgaaggaactgagtttcctaatcctctaatcagcaagtaccttctaacctgcaaaactgcccaccaactgacagtgagaatcaagaacctcaacatgaacagagctcctgacaacatcattaaattttataagaagaccaaacagctgccagtcctaggaaaatgctgtgaagagatccagccacatcagtggaagccacctatagagagagaagaacaccggctcccattctggttaaaggccagtctgccatccatccaggaagaactgcggcacatggctgatggtgctagagaggtaggaaatatgactggaaccactgagatcaactcagatcgaagcctagaaaaagacaatttggagttggggagtgaatctcggtacccactgctattgcctaagggtgtagtcctgaaactgaagccagttgccacccgtttccccaggaaggcttggagacagaagcgttcatcagtcctgaagcccctccttatccaacccagcccctctctccagcccagcttcaaccctgggaaaacaccagcccgatcaactcattcagaagcccctccgagcaaaatggtgctccggattcctcacccaatacagccagccactgttttacagacagttccaggtgtccctccactgggggtcagtggaggtgagagttttgagtctcctgcagcactgcctgctgtgccccctgaggccaggacaagcttccctctgtctgagtcccagactttgctctcttctgcccctgtgcccaaggtaatgctgccctcccttgccccttctaagtttcgaaagccatatgtgagacggagaccctcaaagagaagaggagtcaaggcctctccctgtatgaaacctgcccctgttatccaccaccctgcatctgttatcttcactgttcctgctaccactgtgaagattgtgagccttggcggtggctgtaacatgatccagcctgtcaatgcggctgtggcccagagtccccagactattcccatcactaccctcttggttaaccctacttccttcccctgtccattgaaccagtcccttgtggcctcctctgtctcacccttaattgtttctggcaattctgtgaatcttcctataccatccacccctgaagataaggcccacgtgaatgtggacattgcttgtgctgtggctgatggggaaaatgcctttcagggcctagaacccaaattagagccccaggaactatctcctctctctgctactgttttcccgaaagtggaacatagcccagggcctccactagcagatgcagagtgccaagaaggattgtcagagaatagtgcctgtcgctggaccgttgtgaaaacagaggaggggaggcaagctctggagccgctccctcagggcatccaggagtctctaaacaaccctacccctggggatttagaggaaattgtcaagatggaacctgaagaagctagagaggaaatcagtggatcccctgagcgtgatatttgtgatgacatcaaagtggaacatgctgtggaattggacactggtgccccaagcgaggagttgagcagtgctggagaagtaacgaaacagacagtcttacagaaggaagaggagaggagtcagccaactaaaaccccttcatcttctcaagagccccctgatgaaggaacctcagggacagatgtgaacaaaggatcatcaaagaatgctttgtcctcaatggatcctgaagtgaggcttagtagccccccagggaagccagaagattcatccagtgttgatggtcagtcagtggggactccagttgggccagaaactggaggagagaagaatgggccagaagaagaggaagaagaggactttgatgacctcacccaagatgaggaagatgaaatgtcatcagcttctgaggaatctgtgctttctgtcccagaactccaggaaacaatggagaaactgacttggctggcatctgaaaggcgcatgagtcaggagggtgagtctgaagaagagaattctcaggaggagaactctgagccagaagaagaggaggaagaagaagcagaaggaatggaaagcctgcagaaagaggatgaaatgacggatgaagcagttggagactctgctgagaagcctcctacttttgcttcacctgagactgctccagaagtggagaccagcagaactccaccaggagagagcatcaaagctgctggaaaaggccggaacaatcatcgagctcgcaacaagcggggaagtcgggctcgggccagcaaggacacctccaagctgctgttgctgtatgatgaggacattctcgagcgagatccactcagggagcagaaggacttggcctttgcccaagcttatctgaccagggtgcgagaagccctacaacatatccctggcaagtatgaagacttccttcaagtcatctatgaatttgagtcaagtacccagagacggacggctgtagatctctacaaaagcctgcaaattctgctccaagactggcctcagctgttgaaagactttgctgctttcctgttacctgagcaagctctggcctgtggattatttgaggagcagcaggcttttgagaagagccgcaagttccttcggcagctggagatttgctttgcagagaacccctcacaccaccagaagattatcaaggtcctccaaggctgtgcagactgccttccccaggagatcaccgagctcaagacacagatgtggcagctcctcaagggccacgaccacctgcaggatgagttttctatcttctttgaccacttgcgcccagcagctagccggatgggtgactttgaagagatcaattggactgaggaaaaggagtatgagtttgatggctttgaagaagtggccctgcctgatgtggaagaagaggaggagcctcccaagatacccacagcctcaaagaacaagaggaaaaaagagatcggggtccaaaatcatgataaggagactgaatggccagatggggccaaggactgtgcctgctcctgccatgaaggaggtccagattccaagctgaagaagagcaaaaggcggagctgtagccactgtagcagcaaggtctgtgacagcaaatcctacaagagcaaggagccccatgagttggtgggcagcagcccccaccgagaggctagtcctatgcctggtgctaaggaagctgggcagggcaaggatatgatggaagaggaagccccagaggagcgggagagcactgaggccacccagagcaggactgtcaggaccaccagaaagggagagatgcctgtttcagcaggattggcagtggggagcactttgccatcccctcgagaagtgactgttacagaacggctcctcctggatggcccaccacctcattcaccagagactcctcaatttccccccacaactggagctgtactgtacactgttaagagaaaccaggttgggcctgaggttcgctcctgccccaaggcatcccccagacttcagaaagagagggagggccaaaaggcagtgagtgagtcagaggctttgatgctggtctgggatgcatcagaaactgagaaattgcctggtaccgtggaaccccctgcttccttcctgagtcctgtttcctcaaagaccagagatgcagggagaagacatgtgtccgggaaaccagacactcaagagagatggctgccctcaagcagagctcgggtgaagacaagagacaggacgtgccctgtccatgaatctccatcaggaattgacacctcagagacttctcccaaagcccctagagggggtttggctaaagacagtggaacacaggccaagggtccagagggggagcagcagccaaaggccgcagaagctacggtgtgtgccaacaacagcaaggtcagctccactggggaaaaggttgtcctgtggacaagggaagctgaccgtgtgatcctcaccatgtgccaggagcaaggggcacagccacagaccttcaacatcatctcccagcagctgggaaataagacccctgctgaggtttcccaccgttttcgagaactcatgcagctcttccacactgcctgtgaagccagctctgaggatgaggatgatgcaaccagtaccagcaatgcagaccagctgtctgaccatggggaccttctgtctgaagaggagctggatgaatgagactctgggaatcatctacacaggaccaaacccaacaggcgccctggcaccggggagggggtagttgtactctgcttgtacagtccttgagcccagtttacagatctggagagcaggaggccaggacaaggacaaaggctggaggatggagtaggacccaggggctctgccatcctaggcatcattcaaggtcttttatgaagactttacagatgtcctctgtaaatagcatcgagagtggagttcagctcctttctctacttttttttggtctgatggcacatatttattgttctgtggtctaatcacagtgtttctaaatgtaaaaagtgcatatgttggtgtagctagtcccgcgacattgagctcctctgcatgaagacactgggctcctgcatccagctgtttttattgcaaactagctcctttctcccacactgggaactttagtccacgaggctgtcaccaccctggtagcactgggccaggctttgtagctcctgcagcagctctgctacgtcatcgtgctccactccagcatccatgaagctggcccagcgccgcaagtcgagtttggtgaggtctctggccaaggcttccagggtctggtgcagggacgaagaggaacacagtgccccaaacactgggatgctctccactgctgtggagggagaggaaacagagacctgtagatggatgattattctgccctgggactcgccaaactgataaggaagtccaaccttagtagacttgattgtaaactcaacaaatttggtgtattgtccccttagtacaccagtactccagaggaagaatgcttttcttgggagccatagggtgaataaaggaatgtttaactgtggactttttcagcacttttaatccaggaatggagatagtaaaacctctcccatacttg

SEQ ID NO: 12327 - DNA, 5506 bp, Homo sapiens
tggcgcatagtgttaggcgcatgctccttgatgcactgcggcgcggcgctccgaggctcggggacgcgcacgcaattcgctgttgttggctgacttccggtggtgccaaagccgtttccgtggaatcaggccggctgaatggaacaaaagtgggacttttaaaatgttgccctgtaagaagagaagaactacagtgacagagtccctacagcataaaggcaatcaagaggaaaacaacgtagacctagaatcagccgttaaaccagaatctgaccaggttaaggacttgagttcggtgtcactatcctgggatccaagtcatggcagagtagctggcttcgaagtacagtctttgcaggatgcaggaaatcagcttggtatggaggatacatctctgagctctggaatgctcacccagaacacaaatgtaccaattctagaaggtgttgatgtggccatctctcagggaatcaccctaccttccttggagtcttttcacccccttaatatacacattggtaaaggaaaactccacgctactggctcaaagagagggaaaaaaatgacactcaggcctgggccagttacccaagaagacagatgtgatcatcttaccctaaaggagcctttttcaggagagcctagtgaagaagtcaaggaagaaggagggaaacctcaaatgaattctgaaggggagataccttccctgccatcaggcagccaatctgcaaaaccagtaagccagcccaggaaatcaacccagccagatgtttgtgcctctcctcaagaaaagccactcaggactctgtttcaccaacctgaggaagagatagaagatggtggactcttcattccaatggaagaacaagacaatgaagaaagtgagaaaaggagaaaaaagaaaaagggtaccaagaggaaacgagatggaaggggtcaagaagggaccttggcatatgacctgaaactggatgacatgcttgaccgtaccttggaggatggtgccaagcagcacaatctaacagcagtcaatgtccgaaacatccttcatgaagtaatcacaaatgaacacgtggtagctatgatgaaagcagccatcagtgagacggaagatatgccaatgtttgagcctaaaatgacacgctctaaactgaaggaagtagtggaaaaaggagtggtaattccaacatggaatatttcaccaattaagaaggccaatgaaattaagcctcctcagtttgtggatatccaccttgaagaagatgattcctcagatgaagaataccagccggatgatgaagaagaagatgaaactgctgaagagagcttattggaaagtgatgttgaaagcactgcttcatctccacgtggggcaaagaaatccagattgaggcagtcttctgagatgactgaaacagatgaggagagtggcatattatcagaggctgagaaagtcaccacaccagccatcaggcacatcagtgctgaggtagtgcccatggggcccccgccccctccaaagccgaaacagaccagagatagtactttcatggagaagttacatgcggtagatgaggagctggcttccagtccagtctgcatggattctttccagcccatggatgacagtctcattgcatttcgaacgcgttctaagatgcccctgaaagatgttcccctgggccaattagaggcagagctccaagctccagacatcactccagatatgtatgaccccaatacggcagatgatgaggactggaagatgtggctggggggacttatgaatgatgatgtggggaatgaagatgaagcagatgatgatgatgatccagaatataatttcctggaagacctcgatgaaccagacacagaggatttccggactgaccgggcagtgagaatcaccaaaaaggaagtaaatgagctgatggaagagctgtttgaaactttccaagatgagatgggattctccaacatggaagatgatggcccagaagaggaggagtgtgtagctgagcctcgtcctaactttaacacccctcaagctctacggtttgaggaaccactggccaacctgttaaatgaacaacatcggacagtgaaggagctatttgaacagctgaagatgaagaaatcttcagccaaacagctgcaggaagtagagaaggttaaaccccagagtgagaaagttcatcagactctgattctggacccagcacagaggaagagactccagcagcagatgcagcagcacgttcagctcttgacccaaatccaccttcttgccacctgcaaccccaacctcaatccggaggccactaccaccaggatatttcttaaagagctgggaacctttgctcaaagctccatcgcccttcaccatcagtacaaccccaagtttcagaccctgttccaaccctgtaacttgatgggagctatgcagctgattgaagacttcagcacacatgtcagcattgactgcagccctcataaaactgtcaagaagactgcgaatgaatttccctgtttgccaaagcaagtggcttggattctggccacaagcaaggttttcatgtatccagagttacttccagtgtgttccctgaaggcaaagaatccccaggataagatcgtcttcaccaaggctgaggacaatttgttagctttaggactgaagcattttgaaggaactgagtttcctaatcctctaatcagcaagtaccttctaacctgcaaaactgcccaccaactgacagtgagaatcaagaacctcaacatgaacagagctcctgacaacatcattaaattttataagaagaccaaacagctgccagtcctaggaaaatgctgtgaagagatccagccacatcagtggaagccacctatagagagagaagaacaccggctcccattctggttaaaggccagtctgccatccatccaggaagaactgcggcacatggctgatggtgctagacagtcttacagaaggaagaggagaggagtcagccaactaaaaccccttcatcttctcaagagccccctgatgaaggaacctcagggacagatgtgaacaaaggatcatcaaagaatgctttgtcctcaatggatcctgaagtgaggcttagtagccccccagggaagccagaagattcatccagtgttgatggtcagtcagtggggactccagttgggccagaaactggaggagagaagaatgggccagaagaagaggaagaagaggactttgatgacctcacccaagatgaggaagatgaaatgtcatcagcttctgaggaatctgtgctttctgtcccagaactccaggaaacaatggagaaactgacttggctggcatctgaaaggcgcatgagtcaggagggtgagtctgaagaagagaattctcaggaggagaactctgagccagaagaagaggaggaagaagaagcagaaggaatggaaagcctgcagaaagaggatgaaatgacggatgaagcagttggagactctgctgagaagcctcctacttttgcttcacctgagactgctccagaagtggagaccagcagaactccaccaggagagagcatcaaagctgctggaaaaggccggaacaatcatcgagctcgcaacaagcggggaagtcgggctcgggccagcaaggacacctccaagctgctgttgctgtatgatgaggacattctcgagcgagatccactcagggagcagaaggacttggcctttgcccaagcttatctgaccagggtgcgagaagccctacaacatatccctggcaagtatgaagacttccttcaagtcatctatgaatttgagtcaagtacccagagacggacggctgtagatctctacaaaagcctgcaaattctgctccaagactggcctcagctgttgaaagactttgctgctttcctgttacctgagcaagctctggcctgtggattatttgaggagcagcaggcttttgagaagagccgcaagttccttcggcagctggagatttgctttgcagagaacccctcacaccaccagaagattatcaaggtcctccaaggctgtgcagactgccttccccaggagatcaccgagctcaagacacagatgtggcagctcctcaagggccacgaccacctgcaggatgagttttctatcttctttgaccacttgcgcccagcagctagccggatgggtgactttgaagagatcaattggactgaggaaaaggagtatgagtttgatggctttgaagaagtggccctgcctgatgtggaagaagaggaggagcctcccaagatacccacagcctcaaagaacaagaggaaaaaagagatcggggtccaaaatcatgataagattggcagtggggagcactttgccatcccctcgagaagtgactgttacagaacggctcctcctggatggcccaccacctcattcaccagagactcctcaatttccccccacaactggagctgtactgtacactgttaagagaaaccaggttgggcctgaggttcgctcctgccccaaggcatcccccagacttcagaaagagagggagggccaaaaggcagtgagtgagtcagaggctttgatgctggtctgggatgcatcagaaactgagaaattgcctggtaccgtggaaccccctgcttccttcctgagtcctgtttcctcaaagaccagagatgcagggagaagacatgtgtccgggaaaccagacactcaagagagatggctgccctcaagcagagctcgggtgaagacaagagacaggacgtgccctgtccatgaatctccatcaggaattgacacctcagagacttctcccaaagcccctagagggggtttggctaaagacagtggaacacaggccaagggtccagagggggagcagcagccaaaggccgcagaagctacggtgtgtgccaacaacagcaaggtcagctccactggggaaaaggttgtcctgtggacaagggaagctgaccgtgtgatcctcaccatgtgccaggagcaaggggcacagccacagaccttcaacatcatctcccagcagctgggaaataagacccctgctgaggtttcccaccgttttcgagaactcatgcagctcttccacactgcctgtgaagccagctctgaggatgaggatgatgcaaccagtaccagcaatgcagaccagctgtctgaccatggggaccttctgtctgaagaggagctggatgaatgagactctgggaatcatctacacaggaccaaacccaacaggcgccctggcaccggggagggggtagttgtactctgcttgtacagtccttgagcccagtttacagatctggagagcaggaggccaggacaaggacaaaggctggaggatggagtaggacccaggggctctgccatcctaggcatcattcaaggtcttttatgaagactttacagatgtcctctgtaaatagcatcgagagtggagttcagctcc

SEQ ID NO: 12328 - DNA, 4801 bp, Homo sapiens
tggcgcatagtgttaggcgcatgctccttgatgcactgcggcgcggcgctccgaggctcggggacgcgcacgcaattcgctgttgttggctgacttccggtggtgccaaagccgtttccgtggaatcaggccggctggtgagggtacagaatggaacaaaagtgggacttttaaaatgttgccctgtaagaagagaagaactacagtgacagagtccctacagcataaaggcaatcaagaggaaaacaacgtagacctagaatcagccgttaaaccagaatctgaccaggttaaggacttgagttcggtgtcactatcctgggatccaagtcatggcagagtagctggcttcgaagtacagtctttgcaggatgcaggaaatcagcttggtatggaggatacatctctgagctctggaatgctcacccagaacacaaatgtaccaattctagaaggtgttgatgtggccatctctcagggaatcaccctaccttccttggagtcttttcacccccttaatatacacattggtaaaggaaaactccacgctactggctcaaagagagggaaaaaaatgacactcaggcctgggccagttacccaagaagacagatgtgatcatcttaccctaaaggagcctttttcaggagagcctagtgaagaagtcaaggaagaaggagggaaacctcaaatgaattctgaaggggagataccttccctgccatcaggcagccaatctgcaaaaccagtaagccagcccaggaaatcaacccagccagatgtttgtgcctctcctcaagaaaagccactcaggactctgtttcaccaacctgaggaagagatagaagatggtggactcttcattccaatggaagaacaagacaatgaagaaagtgagaaaaggagaaaaaagaaaaagggtaccaagaggaaacgagatggaaggggtcaagaagggaccttggcatatgacctgaaactggatgacatgcttgaccgtaccttggaggatggtgccaagcagcacaatctaacagcagtcaatgtccgaaacatccttcatgaagtaatcacaaatgaacacgtggtagctatgatgaaagcagccatcagtgagacggaagatatgccaatgtttgagcctaaaatgacacgctctaaactgaaggaagtagtggaaaaaggagtggtaattccaacatggaatatttcaccaattaagaaggccaatgaaattaagcctcctcagtttgtggatatccaccttgaagaagatgattcctcagatgaagaataccagccggatgatgaagaagaagatgaaactgctgaagagagcttattggaaagtgatgttgaaagcactgcttcatctccacgtggggcaaagaaatccagattgaggcagtcttctgagatgactgaaacagatgaggagagtggcatattatcagaggctgagaaagtcaccacaccagccatcaggcacatcagtgctgaggtagtgcccatggggcccccgccccctccaaagccgaaacagaccagagatagtactttcatggagaagttacatgcggtagatgaggagctggcttccagtccagtctgcatggattctttccagcccatggatgacagtctcattgcatttcgaacgcgttctaagatgcccctgaaagatgttcccctgggccaattagaggcagagctccaagctccagacatcactccagatatgtatgaccccaatacggcagatgatgaggactggaagatgtggctggggggacttatgaatgatgatgtggggaatgaagatgaagcagatgatgatgatgatccagaatataatttcctggaagacctcgatgaaccagacacagaggatttccggactgaccgggcagtgagaatcaccaaaaaggaagtaaatgagctgatggaagagctgtttgaaactttccaagatgagatgggattctccaacatggaagatgatggcccagaagaggaggagtgtgtagctgagcctcgtcctaactttaacacccctcaagctctacggtttgaggaaccactggccaacctgttaaatgaacaacatcggacagtgaaggagctatttgaacagctgaagatgaagaaatcttcagccaaacagctgcaggaagtagagaaggttaaaccccagagtgagaaagttcatcagactctgattctggacccagcacagaggaagagactccagcagcagatgcagcagcacgttcagctcttgacccaaatccaccttcttgccacctgcaaccccaacctcaatccggaggccactaccaccaggatatttcttaaagagctgggaacctttgctcaaagctccatcgcccttcaccatcagtacaaccccaagtttcagaccctgttccaaccctgtaacttgatgggagctatgcagctgattgaagacttcagcacacatgtcagcattgactgcagccctcataaaactgtcaagaagactgcgaatgaatttccctgtttgccaaagcaagtggcttggattctggccacaagcaaggttttcatgtatccagagttacttccagtgtgttccctgaaggcaaagaatccccaggataagatcgtcttcaccaaggctgaggacaatttgttagctttaggactgaagcattttgaaggaactgagtttcctaatcctctaatcagcaagtaccttctaacctgcaaaactgcccaccaactgacagtgagaatcaagaacctcaacatgaacagagctcctgacaacatcattaaattttataagaagaccaaacagctgccagtcctaggaaaatgctgtgaagagatccagccacatcagtggaagccacctatagagagagaagaacaccggctcccattctggttaaaggccagtctgccatccatccaggaagaactgcggcacatggctgatggtgctagagaggtaggaaatatgactggaaccactgagatcaactcagatcgaagcctagaaaaagacaatttggagttggggagtgaatctcggtacccactgctattgcctaagggtgtagtcctgaaactgaagccagttgccacccgtttccccaggaaggcttggagacagaagcgttcatcagtcctgaagcccctccttatccaacccagcccctctctccagcccagcttcaaccctgggaaaacaccagcccgatcaactcattcagaagcccctccgagcaaaatggtgctccggattcctcacccaatacagccagccactgttttacagacagttccaggtgtccctccactgggggtcagtggaggtgagagttttgagtctcctgcagcactgcctgctgtgccccctgaggccaggacaagcttccctctgtctgagtcccagactttgctctcttctgcccctgtgcccaaggtaatgctgccctcccttgccccttctaagtttcgaaagccatatgtgagacggagaccctcaaagagaagaggagtcaaggcctctccctgtatgaaacctgcccctgttatccaccaccctgcatctgttatcttcactgttcctgctaccactgtgaagattgtgagccttggcggtggctgtaacatgatccagcctgtcaatgcggctgtggcccagagtccccagactattcccatcactaccctcttggttaaccctacttccttcccctgtccattgaaccagtcccttgtggcctcctctgtctcacccttaattgtttctggcaattctgtgaatcttcctataccatccacccctgaagataaggcccacgtgaatgtggacattgcttgtgctgtggctgatggggaaaatgcctttcagggcctagaacccaaattagagccccaggaactatctcctctctctgctactgttttcccgaaagtggaacatagcccagggcctccactagcagatgcagagtgccaagaaggattgtcagagaatagtgcctgtcgctggaccgttgtgaaaacagaggaggggaggcaagctctggagccgctccctcagggcatccaggagtctctaaacaaccctacccctggggatttagaggaaattgtcaagatggaacctgaagaagctagagaggaaatcagtggatcccctgagcgtgatatttgtgatgacatcaaagtggaacatgctgtggaattggacactggtgccccaagcgaggagttgagcagtgctggagaagtaacgaaacagacagtcttacagaaggaagaggagaggagtcagccaactaaaaccccttcatcttctcaagagccccctgatgaaggaacctcagggacagatgtgaacaaaggatcatcaaagaatgctttgtcctcaatggatcctgaagtgaggcttagtagccccccagggaagccagaagattcatccagtgttgatggtcagtcagtggggactccagttgggccagaaactggaggagagaagaatgggccagaagaagaggaagaagaggactttgatgacctcacccaagatgaggaagatgaaatgtcatcagcttctgaggaatctgtgctttctgtcccagaactccaggtgagagctggagaatattctcaagtatttcgtggactcagtaatatgtatcacttattgatatgccacctgcttgcttgctgcactatggatagtcctaaaatcatttgtatttttgtgaatgcattatgggacatgattgtggagttgagg

SEQ ID NO: 12329 - DNA, 2415 bp, Homo sapiens
gcagatagctcggccgcgcgtctcagccgccggggccccgagcgcaggcggcgaggccaccacacctgcagagcgctcgggctgcctagccggcacctcgcctcccgccgcgcaaaccccttctccccacgcgccgagtctcccatgacgcccgagccccccggccggcgacaatgaccacttccctgcaagatgggcagagcgccgcgagcagggcggctgcccgggattcgccgctggccgcccaggtgtgtggcgctgcccaggggaggggcgacgcccacgacctggcgccggccccctggctgcacgcgcgagcgctcctgccccttccggacgggacccgcggctgtgctgcagacaggagaaaaaagaaagatcttgatgttccggaaatgccatctattccaaacccttttcctgagctatgctgttctccatttacatctgtgttgtcagcagacctatttcccaaagcaaattcaaggaaaaaacaggtgattaaagtatacagtgaagatgaaaccagcagggctttagatgtacccagtgacataacggctcgagatgtttgtcagctgttgatcctgaagaatcattacattgatgaccacagctggaccctttttgagcacctgcctcacataggtgtagaaagaacaatagaagaccacgaactggtgattgaagtgctatccaactgggggatagaagaagaaaacaaactatactttagaaaaaattatgccaaatatgagttctttaaaaacccaatgtatttttttccagagcatatggtatcttttgcaactgaaaccaatggtgaaatatcccccacacagattttgcagatgtttctgagttcaagcacatatcctgaaattcatggtttcttacatgcgaaagaacagggaaagaagtcttggaaaaaaatttacttttttctaagaagatctggtttatatttttctactaaaggaacatcaaaggaaccgcggcatttgcagtttttcagcgaatttggcaatagtgatatttatgtgtcactggcaggcaaaaaaaaacatggagcaccgactaactatggattctgctttaagcctaacaaagcgggagggccccgagacctgaaaatgctctgtgcagaagaagagcagagtaggacgtgctgggtgaccgcgattagattgcttaagtatggcatgcagctgtaccagaattatatgcatccatatcaaggtagaagtggctgcagttcacagagcatatcacctatgagaagtatatcagagaattccctggtagcaatggacttctcaggccagaaaagcagagttatagaaaatcccactgaagccctttcagttgcggttgaagaaggactcgcttggaggaaaaaaggatgtttacgcctgggcactcacggtagccccactgcctcttcacagagctctgccacaaacatggctatccaccggtcccagccatggtttcaccacaaaatttctagagatgaggctcagcgattgattattcagcaaggacttgtggatggagttttcttggtacgggatagtcagagtaaccccaaaactttcgtactgtcaatgagtcatggacaaaaaataaagcactttcaaattataccagtagaagatgacggtgaaatgttccacacactggatgatggccacacaagatttacagatctaatacagctggtggagttctatcaactcaataagggcgttcttccttgcaagttgaaacattattgtgctaggattgctctctagacaagccagaagtgacttattaaactattgaaggaaaaggactcaagaaaaataataaaagaccataaataagggcgaaaacattaccatgtgaaaagaatgtatttcacctgcaagttacaaaaaaatagtttgtgcattgcaaataagcaaagacttggattgactttacattcatcatttaaaattcattagttaaaattaaaccttaggaaaaaaatgacttggtgtgttcttgtgtgatttttacattgctataatattttcttcaaatatgcatatttaaaacatgtctcccttatttaccatatagcaacatcagaattctgaaacacaaaatatgaaataaattgggagtcaggaataattatttgtgcactaaatttcaattatactattttttaatgttaagaaatatgataataacttatcaattaaaagaaactatccacaacctgttaatgaaactaaaaactattttgaattatatattttccgggtttatgatcatcttaaaatgaaatcatattttgagatagtagctttaaaccattttgaaatatgttgattttttccaggtaatttaaaaatattattaaatagttaattataaaattta

SEQ ID NO: 12330 - DNA, 587 bp, Homo sapiens
cttttctatatactttatataatatgagccttgtcacagagtggtacatgttcgccttagcacactttttattcctgacagcaattatattttacattctgttttatgtaaattacatcctatgttctcttactgtaggagaaaaaagaaagatcttgatgttccggaaatgccatctattccaaacccttttcctgagctatgctgttctccatttacatctgtgttgtcagcagacctatttcccaaagcaaattcaaggaaaaaacaggtgattaaagtatacagtgaagatgaaaccagcagggctttagatgtacccagtgacataacggctcgagatgtttgtcagctgttgatcctgaagaatcattacattgatgaccacagctggaccctttttgagcacctgcctcacataggtgtagaaagaacaatagaagaccacgaactggtgattgaagtgctatccaactgggggatagaagaagaaaacaaactatactttagaaaaaattatgccaaatatgagttctttaaaaacccaatgtatttttttccagagcatatggtatcttttgcaactg

SEQ ID NO: 12331 - DNA, 1435 bp, Homo sapiens
atagctcggccgcgcgtctcagccgccggggccccgagcgcaggcggcgaggccaccacacctgcagagcgctcgggctgcctagccggcacctcgcctcccgccgcgcaaaccccttctccccacgcgccgagtctcccatgacgcccgagccccccggccggcgacaatgaccacttccctgcaagatgggcagagcgccgcgagcagggcggctgcccgggattcgccgctggccgcccaggagaaaaaagaaagatcttgatgttccggaaatgccatctattccaaacccttttcctgagctatgctgttctccatttacatctgtgttgtcagcagacctatttcccaaagcaaattcaaggaaaaaacaggtgattaaagtatacagtgaagatgaaaccagcagggctttagatgtacccagtgacataacggctcgagatgtttgtcagctgttgatcctgaagaatcattacattgatgaccacagctggaccctttttgagcacctgcctcacataggtgtagaaagaacaatagaagaccacgaactggtgattgaagtgctatccaactgggggatagaagaagaaaacaaactatactttagaaaaaattatgccaaatatgagttctttaaaaacccaatgtatttttttccagagcatatggtatcttttgcaactgaaaccaatggtgaaatatcccccacacagattttgcagatgtttctgagttcaagcacatatcctgaaattcatggtttcttacatgcgaaagaacagggaaagaagtcttggaaaaaaatttacttttttctaagaagatctggtttatatttttctactaaaggaacatcaaaggaaccgcggcatttgcagtttttcagcgaatttggcaatagtgatatttatgtgtcactggcaggcaaaaaaaaacatggagcaccgactaactatggattctgctttaagcctaacaaagcgggagggccccgagacctgaaaatgctctgtgcagaagaagagcagagtaggacgtgctgggtgaccgcgattagattgcttaagtatggcatgcagctgtaccagaattatatgcatccatatcaaggtagaagtggctgcagttcacagagcatatcacctatgagaagtatatcagagaattccctggtagcaatggacttctcaggccagaaaagcagagttatagaaaatcccactgaagccctttcagttgcggttgaagaaggactcgcttggaggaaaaaaggatgtttacgcctgggcactcacggtagccccactgcctcttcacagagctctgccacaaacatggctatccaccggtcccagccatggtttcaccacaaaatttctagagatgaggctcagcgattgattattcagcaaggacttgtggatgg

SEQ ID NO: 12332 - DNA, 984 bp, Homo sapiens
agttgtttcattgcactgagccctgagattcccaaggagtaaccataaaagatttcttttattttgtccatgacctacgagacaggatcattctaagaagagcaggcatgagtttgagtgcaagaagagtcactctgcctgcaataacgccaataattctacagaaaagggtgattaaagtatacagtgaagatgaaaccagcagggctttagatgtacccagtgacataacggctcgagatgtttgtcagctgttgatcctgaagaatcattacattgatgaccacagctggaccctttttgagcacctgcctcacataggtgtagactacctgtggctccctggaatgatccccacctatctgtcatttctactagctgtacatgcagccattgtaccatcttcacacgtggtctgtttatgagatttagtgtttgtgagatcctgaggcctcatagaaagaacaatagaagaccacgaactggtgattgaagtgctatccaactgggggatagaagaagaaaacaaactatactttagaaaaaattatgccaaatatgagttctttaaaaacccaatgtatttttttccagagcatatggtatcttttgcaactgaaaccaatggtgaaatatcccccacacagattttgcagatgtttctgagttcaagcacatatcctgaaattcatggtttcttacatgcgaaagaacagggaaagaagtcttggaaaaaaatttacttttttctaagaagatctggtttatatttttctactaaaggaacatcaaaggaaccgcggcatttgcagtttttcagcgaatttggcaatagtgatatttatgtgtcactggcaggcaaaaaaaaacatggagcaccgactaactatggattctgctttaaggtacaggcttaatattttgatagatgaataaagcaagcctcagccttttaggtaagcttgagtttcctttaattgcttt

SEQ ID NO: 12333 - DNA, 1983 bp, Homo sapiens
cggcacctcgcctcccgccgcgcaaaccccttctccccacgcgccgagtctcccatgacgcccgagccccccggccggcgacaatgaccacttccctgcaagatgggcagagcgccgcgagcagggcggctgcccgggattcgccgctggccgcccaggtgtgtggcgctgcccaggggaggggcgacgcccacgacctggcgccggccccctggctgcacgcgcgagcgctcctgccccttccggacgggacccgcggctgtgctgcagacaggagaaaaaagaaagatcttgatgttccggaaatgccatctattccaaacccttttcctgagctatgctgttctccatttacatctgtgttgtcagcagacctatttcccaaagcaaattcaaggaaaaaacaggtgattaaagtatacagtgaagatgaaaccagcagggctttagatgtacccagtgacataacggctcgagatgtttgtcagctgttgatcctgaagaatcattacattgatgaccacagctggaccctttttgagcacctgcctcacataggtgtagaaagaacaatagaagaccacgaactggtgattgaagtgctatccaactgggggatagaagaagaaaacaaactatactttagaaaaaattatgccaaatatgagttctttaaaaacccaatgtatttttttccagagcatatggtatcttttgcaactgaaaccaatggtgaaatatcccccacacagattttgcagatgtttctgagttcaagcacatatcctgaaattcatggtttcttacatgcgaaagaacagggaaagaagtcttggaaaaaaatttacttttttctaagaagatctggtttatatttttctactaaaggaacatcaaaggaaccgcggcatttgcagtttttcagcgaatttggcaatagtgatatttatgtgtcactggcaggcaaaaaaaaacatggagcaccgactaactatggattctgctttaaggtgttaccttcaagatatgcattaacgataaacaatgtgctgtggccttctagcctaacaaagcgggagggccccgagacctgaaaatgctctgtgcagaagaagagcagagtaggacgtgctgggtgaccgcgattagattgcttaagtatggcatgcagctgtaccagaattatatgcatccatatcaaggtagaagtggctgcagttcacagagcatatcacctatgagaagtatatcagagaattccctggtagcaatggacttctcaggccagaaaagcagagttatagaaaatcccactgaagccctttcagttgcggttgaagaaggactcgcttggaggaaaaaaggatgtttacgcctgggcactcacggtagccccactgcctcttcacagagctctgccacaaacatggctatccaccggtcccagccatggtttcaccacaaaatttctagagatgaggctcagcgattgattattcagcaaggacttgtggatggagttttcttggtacgggatagtcagagtaaccccaaaactttcgtactgtcaatgagtcatggacaaaaaataaagcactttcaaattataccagtagaagatgacggtgaaatgttccacacactggatgatggccacacaagatttacagatctaatacagctggtggagttctatcaactcaataagggcgttcttccttgcaagttgaaacattattgtgctaggattgctctctagacaagccagaagtgacttattaaactattgaaggaaaaggactcaagaaaaataataaaagaccataaataagggcgaaaacattaccatgtgaaaagaatgtatttcacctgcaagttacaaaaaaatagtttgtgcattgcaaataagcaaagacttggattgactttacattcatcatttaaaattcattagttaaaattaaaccttaggaaaaaaatgac

SEQ ID NO: 12334 - DNA, 4231 bp, Homo sapiens
agatgaggctcagcgattgattattcagcaaggacttgtggatgggtaagtttggtatttttaattttgagtacttgtgaattggatttctcctataagcagaaattatttattccatagccacaaagagttcttgatttgggcttatcataaaacagaagtgacattgttctataaatgaggtcatcactgtattctaacagtatctatattatacctggtacatagtgtgtgtctggtatttgtatataaatggacaaataacggaatagagtatcttgttcttaaccagtgatcactaatattacccattatgtcctgattctagcatctcagatatcaattgatgggggaaaatgaacttctttttaagtgtcaatattttgatttgaacatatgatttcgaagtatggtttatattatgacattatgtcaaatgtatttttttaggtatgatgcaacatgtattaagtaaaaagctgtttcttaagtgttttgaacacttatttttttgtgtgtttacatccctattgtcctttctctaaattttaacatcttaaagtaatatagatccgtgaaaagagtacctttcaactgtttctcatgttgtcttttagtggggtaccatggaatacaaaagagaaatataaaatgtattatgaaagatttataatgtgaagaattttatttttctcaaattactcagtgtttcagatactttctataatactggctgaattccctttccaaatgcagtacaaatgagggaggttgtattgtggtttagatgagtaatgaaatcattatcaatttaaacaagtggtgatgggatcttttatcttcaaaagttggctaatcatgtcattatcatgacaagatttcaaggtgatttaatactgaaatttggataacaatgcttcttcacatggaagattattaataggaagtcagcatttccccagactgtaaataagatattttaatacgtttctttgcatggaatgcagtctttttggaaataaatttgaacaatcagtagaattacaatctgatgaaaccaagaaaataaatgagtcacaaagaattattaaaatgttttgaaagattgtaattttctttatttctgagcccagtatttataaagtgaatgaaatgatcgtataaaaaaagatactatcttatttttagtatttttggtattcttttggagagatgtgatggtgccaagtgatccactaggtggtagtggtgatctacttgggaatgggaaaagaattacagcttgatttaccagtgaaacgcccttttgtcccatttcccagtgatgtaatgtcggaatctcacacagcacaaatgaaatggataaactcgtcagacatctgtgatgctttaaatttggctgcctctttgcccaggcacagtgagattcatattggattcaccagtggggatcatttacacggtgtatttaccagcagttaatacaaaactggttttgcattgcactgccagtgaataagaatccacttctggcagcatttttctcttaggctgttagaggccatgtcttgtttttctagcctgacattatagaggcttttctgctgcattcttcaaggttaaagtatgtgttttttggatgattttttttacttaaagcattttgcttaaatatttaataaataatttcaagatttttttaaaacaatatattgatttctttcttgctattgtgtatgaacagttgaaaccagaatcaaaagaaagggtatccagtatagaagagggggttataataaaataaaatttcaggccaggcgtggtggctcatgcctgtaatctcagcactatgggaggccgaggcaggcggatcacttgaggtctggagttcgaaaccagcccagccaatatggtgaaaccctgtctctgctaaaaatgcaaaaattagctgggcttggtggcatgtgcctgtagtcccaattacctgggaggctgaggtgggagaattgcttgaaccctggaggcggagattgcagtgagccgagagcactccagcctgggtgacagagcgagaccctgtttcaaaagaaaaaaaaaaattcattctaaattcttaccttctttcaaaacttaacatgacccagaaggtaaaataacagtatgaaaatgccttaatctttaggcaaaacagttacatgtgaatacccagtttcccagtgcaaagagaacgtagcaccaattgttgatgcagacataacagtgtattgtttattgtgatcaaacaaacaatctgactaatgggttgtgtatttagcctattaaaattacagtagcagtgatgacagctttatagtgcagattatattataccatattgattgccaagttggataatcccacccattgaatacatagtaaaggagtccccagctacatttatgcatacacttcttggatttattaatgctatagttctatgaaatccatgagtaaatatagaaacattgaaattccttctctctctttagagttttcttggtacgggatagtcagagtaaccccaaaactttcgtactgtcaatgagtcatggacaaaaaataaagcactttcaaattataccagtaagtaattcgtgatttcacatttgtgtattagaaatgaccttaatgcataagcttttgatcttaatgcataagcttttggaaactttggttttcttttggtctttttattaaatataatttggcagcttgtgctttgactagagttaactttggcagaaatgattttatgagcctgaattaatataagaaatacaggaattgtaaaaattaaattttcctttttctatgaaatatgatttagcaatattgtatagaccccatgccacctattgttaaaagggcactaaagcttctttctcctgaattccactaacggctctttagaaaacattactttaaagccttttctcctctcttctctcaaaaatgttttttttgttttgttttgtttttaatggctatggctagaaacagagattctatggaactggtgaagacttctgaacacatttttaaaagttctgtgattcggcttctctgtgacacacaacttgctttgggatttctgttgcctcttctgctgtgtgtctgtgtgggtgtgcatgtatgtatgtgatgtgtatagtatattggaactgaatggtggggagtgaagattcagtctttttggaaaggtattccatagtattgctaaattactagtgcgtccttttgaattgcctctttttggagttatccaaaggctatataaaatatcctccctacttcttttattttgtgatcaatgtccccagcaaatacgaattgtttagtaccagaagacttcactgatttaaaaaaaagaaaactgacagaatgacattccattagcataatatgtgattacttcagaataaatctcataaaattatgtaaatattcatttttgtggctaagtagacaacatttagaaaaggaaattaatttctcaagtgggagcattaaaatcttcatttacttttactctgaatattgtagatttctttcattgattcaaaatattcatactgtctttactaacagaatgctgggagaattagaactagatgaagtagagtagcagtgcttctcagggatcagctgatatttcttttaaatgcaagtgatgttaaaaaaaacaagtagatatgccgtaacattcttttcactgtcttttagttttataaacttggcagttttggcatgtggagatagtttgcaatcgaatatgattgtccttctgtgtaatttatcctctttacttatttgttgcttttctttttgcaggtagaagatgacggtgaaatgttccacacactggatgatggccacacaagatttacagatctaatacagctggtggagttctatcaactcaataagggcgttcttccttgcaagttgaaacattattgtgctaggattgctctctagacaagccagaagtgacttattaaactattgaaggaaaaggactcaagaaaaataataaaagaccataaataagggcgaaaacattaccatgtgaaaagaatgtatttcacctgcaagttacaaaaaaatagtttgtgcattgcaaataagcaaagacttggattgactttacattcatcatttaaaattcattagttaaaattaaaccttagga

SEQ ID NO: 12335 - DNA, 406 bp, Homo sapiens
agatgaggctcagcgattgattattcagcaaggacttgtggatgggtagaagatgacggtgaaatgttccacacactggatgatggccacacaagatttacagatctaatacagctggtggagttctatcaactcaataagggcgttcttccttgcaagttgaaacattattgtgctaggattgctctctagacaagccagaagtgacttattaaactattgaaggaaaaggactcaagaaaaataataaaagaccataaataagggcgaaaacattaccatgtgaaaagaatgtatttcacctgcaagttacaaaaaaatagtttgtgcattgcaaataagcaaagacttggattgactttacattcatcatttaaaattcattagttaaaattaaaccttagga

SEQ ID NO: 12336 - DNA, 15969 bp, Homo sapiens
gctggcggcggccgcgggcggcgggcggcggaggtgcggggcctgctcccgccggcaccatggccaagaccgtggcctatttctacgaccccgacgtgggcaacttccactacggtgaggaaacagggatatgcatgaggggttgggacacggaggttttgaggcggggttgcaactccaggggtgagagctgacgaactctcttctccccacccccaggagctggacaccctatgaagccccatcgcctggcattgacccatagcctggtcctgcattacggtctctataagaagatgatcgtgagttccgccgcctcggccgggggttggggggtggggcgagctgtggccgtagggataggtgggctggactgagtgcatgaagtgcgacccgcccctagagtatcggggagctggatagaagtcaccaggagtaccttgaaagtgcagggtgttgggggtggcgtcctctgcttaatggaaagtactttctcacctcaggtcggccaccctctgactgtaggcacactagcccttggcctagggttagcgtgatgtggggctggtttgaagacagaaggtgtgttcctcctctgcattttagagtgtggatagggccttggcctcaggaattagggttaggggagcggatatcactgtatcagggtgtgaggtttaccctcagttcccactcctcttttaccacctttctttacctccaaggagctagggctccagggtggaacgatgctgccgtctttgtaaatgtgtatgtgcgtgtggaacagaggcgatattttagatattcctttttcagcctggaatacctctacatggttctgcttaatcgctatccagtttttcatctaccagacatacacatgctgtcttcccagcttggaatttatggctgtgatatgggatagtaacagttaagccacgccaggcgtggtggcccatgcctgtaatcccagcactttgggaggttgaaatgggggggatcgcttgaggccaggagttggagaccagcttgggccacagtgggacccacatctacaaaaaataaaaataaaaaaagtagccatgtgcggtgggtgtgcctgtagtcccaactacttgggaggccgaggcgagaggatggcttgggcccaggagtttaaagttacagtgatctatgatcagcagcctgagttgacagggaggaccttgtctcaaaagaaaaaataagacaaaacagctaaacccaggctttatgtgttgctagggaaactagtgaacaatatgaatgaatgttcattgcttgtgccaaggcacagacaaatggactggtcatagaaaagactgaggtgatgttagtgcaggaatctatatcccttgagattgtttgcctgtatgtacctgtgtgcattttctgggagaagaaaagctctttcttgtgcagttttcaaagaggtgtgacacatccccctgaccttccaaagataataaatctttgattttaattagaaagttgacatatatcccatatatttgactccagaaagaagaatccagaggaaagaggacagaatcagagcttgggggaggagatgagcatggagagaactgggaataggagattccaaggaacagggcaggtggatcagggctcaaagttgagaaggtacgataggctgagctggaggtggaaaggaaaagaagtggtcttcagggggctcatttgtaataacttacctggttaatcggagtctctctactgacttaaggattgtgggatgaggggaatgctatgtttggcttcatatagtctccaggactgggttcagtatgggtggtctgagcctgtggagtggggctgaccctgcctgggttcatcttgtgtctccatcccgaggtcttcaagccataccaggcctcccaacatgacatgtgccgcttccactccgaggactacattgacttcctgcagagagtcagccccaccaatatgcaaggcttcaccaagagtcttaatgccttcaacgtaggcgatgactggtgagggaggactgggagttttgatgtctaacagtttaatgccaagcccttcagtgaggtcttttggcagcagtgggaagatctcaaggggggcctacttgtcaatgcatcataattcattttatttgtttattcaataaatatttattggtcacttgttctaggcaggccctgtgctaagtgctgggaatgcagtgatgaacaaaaacaaaattttaatatcgtatttttgctaagtcttataaagaggaggtgtatgacagattatgagagtgtatacgtggaggattgtttagcttggtggagtggctggtcggtggggccttcctagaggaagtaaagattgagctgagatctgaaaaaagagtagaagtaatcagatgaaagatggttggagggtgaggggagaagtatagcaggcagtagggacaagtgctaagggtctgtggtaggactgagtatgactcatttgaggaacagaaaaaaggccaagtgcagagtatgaagaggaggtgaactgaattgaggctaaagaaataggaccttttaaaagcaaacagctctattatgaattggggtttttacccgtagagtagagggaagctatcaaagtgttttaaaaagcaagggatcttaagagggctatgggcagttaaaaaaacaaaaaaaacaacgaaggagtggtttgatatcattaggtttacattgagcttgtatcatccatagaagagtcagggttagaccctctggggaagagagtggacaacaaagataagccacactctactctatatccatgaaaaaatagtaaccatcacagctaccagttgctcaattctacttacttttgtttttaaactttttattagggaaaatttcaaaaatttctgaaagtgaagtagtgcagtgacctcccatacgtccatcacctagcttcaacgcttatgagcaaatggccactctttttttttttttttttttttttgagacagagtctcactctgtagcccaggctggagtgcagtggtgcagtcttggctcactgcaacctctgcctcctgggttcaagcgattctcatgcctcagactcccgagtagctgggattacaggcgcctgccaccatgcctggctaatttttgtatgtttagtagagatggggtttcactatgttggtcaggctggttttgaactcctgacctcaggtgatccaccagcctcagcctccaaaagtgctgggattacagacgtgagccatcgcacccagctgagcaagtggccactcttacttcatctatactccctcatgttagattgttttaaagcagatcctagatgttatatccttttatccataaatattttattatgtatctctaaatgatactcttttaaaaaaacatagtatcattatcaaacctaaaaagttaacagtgattccttaatgtcatcaaatatgggatcaatattcaaatttctgcagttgtctcataattattttgtagctaatttaaatccagatctaaacaaggtctatacagtgcatttggttgatatgtctcttaagacttttaatttgtagcttttctgtcacccccttgaatttatttcttgaagaaaccaggttgttgatcctgtagaatttcttatgatagctaccatttactgagtgcttactctgctaggtattatgccaagggttgctggtaaatccacttaattctcataccaatccttagatgtattataatagacctttttctgatgttatatataagtaaattgaggtttgggaatatctaggtaacttagccgtagtcacataactggtcattggagggggcatgatccagatcccgggtttttaaaccactaatctgttttcctgaaagatcttaatgacagaagcagccagggctgtaggatagaggccaactcattaggctggcattggcacctttccaactttatccctacacctcagctgcacaggatgccttcctggaatgcccttagttctctattcaacctcttcaaggccttctcagccttcacaccatctccatgaaacctttcttgaccacaccagcccatagagctctgtcttgcacacactgcactgctcatttggtgttcagtcacatgctgtttggggaggtttcttgtttttttgttagtattcctgctgttatttctgagctcactttctagctctgtgaatacagggtcagcccttacgccacactggggtcccgtagatgctctttgtgcgattagggaatgctaattagaatactatctctgggctatttatgctgcatcagtcttcctgtcaaacaagttacagttgtgcttatctgtatttccgatgagaatcaggaatttttcttctgtttaatgaatttctgattggtttcaaagtattctaacataagtagccaaattgtactataggcctttaaatgaaaaaaataaaaaagtagtcccaagccgggcgcagtggctcacgcctgtaatcccagcactttcggaggccgaggcgggtggaccacctaaggtcaggagttcaagaccagcctggccaacatggtgaaaccccatctctactaaaaatacaaaaattagtcatgtgtggtggcacgtgcctgtagtcccagctactccaggaggctgaggcaggagaattgcttgaacccgggagttggaggttgcagtgacctgagattgcaccactgcactccagcctgggcaacagagtgagactctgtcttaaaaaaaaaaaaaaaaaaaaattccagacctctccttttcacccataaatccctctgcccagtgacagccactttcagctcctttcccctatgtcttctggtatttacctttggatttctaaataataatattaattgactgttattactaatctgtaatccttaggtaatacctgttatatactaggtactgttctaagtgctttacagccattagcttatttaatctcaacaacccctatgaagcagggtctattattgtttccttttaccgatgaggacacttaagcacagaaaggttaaacagtttgtacaacctcactatcattagtaggtgttaaagaacctaggtagtctagctccagaatcggtgcttgtaatcatactcccctcctgtattgtctctcattgctatttcttcgtctgtcaattttaggcattatctgttaagcttttagtatgggatatgagcatttagtcttcttacaccatcacattggcttcctttcccctttcagcttcatagtaatttaaaaataaatcagtattctgtgtttacattattataactctgaaagattcatttactatcaagccaaatagtgtagtgtgatttaatctattttcttctaaagctttttgtttttcctggagctgacaattgcattattttttcatttgcttagttttctggtattaatcactaattctttccaagccttttgagaaactataaaaccctacaattcttgcttgaacccgggaggcggaggctgcagtgagccgagatcgcaccattgcaccccagcctgggcgacagagcaagaccccatctcaaaaaacaaacaaacaaaaaacccctacagttctgtttttcacatggtcaaatgtatcagctgcactattttttttttttgagacctaaaactagggattgcctaagcctttcctttttaaaaagtcaggtttatataggtataacttgcatacagtaaaattaaccttttttaggtgtaagagttctgagaggtttgatagaatatatcaaggtatagggccagcgccgatggctcacacctgtagtcccaacaatttgggaggccaaggcgggaggatcacttaggcccaggagtttgagaccagcttgggcaacatagtgagaccctgtctctacaaaaaaaaaaaaaaaaaaggtatcaaggtacaggaaatttccactacccaacaaaggtcactcacccttttgtagttaataacttctctgcaacctagatccagccaactactgataagatgtctgtccttgtattttaccttttccagaatgttacataaatggagtcatacagtaagtaggcttttgtgtctggcttcaagcctttactttttataaagaataacaatggtaataattatagctgacatttattaaaggctgagcggatactgtatactgtgctacaggcttttcgtgggttatctcatcactgtttcacatatgtaggtatacagttctttctttaaaatatgtgactgaaaaatattattgaacattatgctaaaatttgttacactgagaagactaagaaaaacagagctcatgttttctttcaactgatttcctttttacattgtacttgagtacctggaagctgcttgcttctttccgcagctaggatacaaactccctgacagttaagtgcttctttacttcccatccagtgccttgcacagggcttggtacatggtttggtccaaaatatttgttgaataaatttgcagatagcccacgtgtgtaggagagggagagaaggttcttgaaaaatggagattggaggaatctaggatggggagggagatatgggaagggcccagacagaggcaggagggttccaacttgttcctcttccctgcagcccagtgtttcccgggctctttgagttctgctcgcgttacacaggcgcatctctgcaaggagcaacccagctgaacaacaaggtgacatagtcccgagtcctgttcttcctttcctctggatccctggactcgggatttaaccctgatcctgggctcccagcttgaggggtgggcaggaaggactgtgacttaggtgtttgtctttcagatctgtgatattgccattaactgggctggtggtctgcaccatgccaagaagtttgaggtgagtgaggaggtgatgggaaagacagtggccatcctagggtaggtgtttaggatgatggtggggggcagctgggaggggaattgctcttctctttatgagaccactgtcttgccataggcctctggcttctgctatgtcaacgacattgtgattggcatcctggagctgctcaagtaagtagcccaggaggagatgggggcagttacgggattcttggctgaggaggtctctcagtctcaaccctgaccttgacctccctcctccctgattagcttctcccaagttcttgatgctttattcaggctgcctcttccactgctgcagattccctactgcctgctcacatttcagccttctctgcatatccctctcctgtccctgcctctagcctctaggctggagcccccagttgcctttagggaactggtgacattaagtttcaggtgaccagggcagaagcagactcttcacaattcgagacccggtgtttgagaggagtgggttggggggttcacttctagctcagaccctggctttggcttccctctaggtaccaccctcgggtgctctacattgacattgacatccaccatggtgacggggttcaagaagctttctacctcactgaccgggtcatgacggtgtccttccacaaatacggaaattacttcttccctggcacaggtatgggaatagggattactttcccctttgcacccttcagctctttactatgagtgcctccttctcagccttctagtctcatctcaggtgtcccctcctcagagaagcctttccttaccactccagttatcataatcacctccttccccattcctctgttacatcagcctcattgtttccctcagaacactcactgctatttgtgtttattgtggttttttgttttgttttgtttactgcctccctcctcctcatggctattccctaagaatataagcgtggtgggatatcgtaaatttcattagttccattcgttgctgcatccctactgcctagtacacagttggctcagagtggatcccccaaaactatttgcccaatgaatgcaagctgcaagagatttagtggctctagggagtttatggtgaagctacatagatggaatgagaggctcccagagtgcagattggggctgaaacagctgggttgtgggtgcttcccatgtgtggctaccaccacccacttccctacaggtgacatgtatgaagtcggggcagagagtggccgctactactgtctgaacgtgcccctgcgggatggcattgatgaccagagtaagtaccgaagtcttccctctgttccctaggccccttctttttctccttgaaataacctcttctgcctggtattgtctgctgttgggccagttgtccttaaggatgaatggccttcagagggaccatgaatctctggaaattgtatgcaacatatcatgtgtatgtgcatttttctgggaaaagtcattggctttcatcagtcactcatagcagtctgggatcccttccagaagtttcagaccagtgatttgattcttttgggtggcccctttcctgggctacatgctcgctcaaccccctttttccttttgttccctgtctccccatccccttggggtgccaggtgcccatctttggccctctcccaggttacaagcaccttttccagccggttatcaaccaggtagtggacttctaccaacccacgtgcattgtgctccaggtaatactgtcagttcctcctcaggagtgttctgcctgggcttggggaaagagagcaagggaagaggaggttctttaggttggtggtggaaggggtatctgtgatgttctgatcagttctgatcactgcactttcctggggttttgctttttgcagtgtggagctgactctctgggctgtgatcgattgggctgctttaacctcagcatccgagggcatgggtgagacttgctctccttcttctccccaaggtttttaagtggccttggacttcagtacgtgggtgggggtagttggggaatgggcctcacctcttcttggaaatcaaaaatagctacaaattgtacttgaactagaaatgtcatcttgaacagggttccctagatggtcattcattcacgatatatttttattaagcacctgttatgttccaggcatcataccacatcatggggatggaataaggagtctcccatggagtttacagtttaggaaacagacaaaaaataaataatcaaatgaaataaatagattcttataaattctgtgaaagaaaaaaagaaagctgagacacaggatacaatgggggacctacttgagatagcatggtttcggaaagtttttctgaggaagtaaaatttgagttgagacctggagactaagaaggagtgagtcataagaggagcagagagaagcctgacccaagcatggacaaaggcccacaaaaggctctgagggctgggcccagtggcacacacctataatcccaacacttccagaggccaaggtgggagaatcgcctgaggctaggagtttgaggccagcctgggcaacatagtgagagccatctctacagaaaataaaaaacaaaatcagctgggcatgatggtgcatgcctatagtcctagctactcaggaagctgaggcaggaggatcacttgagcctaggagtttgaggttacagtgaactatgattgtgccactggacttcagtctgttgaggtgaggtccgagaagctggccatggtgagattgtgcagagcctttaaaccctggtaaggagtttgaattatattccaaagatgatgggaaaccattgaaggattttaagcaggaaagtgacatgatccaatttgtgtttgaaagtgacaattctgactgctgaatagagaaaggtttgggtaggggggatggagatggaagtagaaagaccagttaggaagccatggtgttggttaggtgcccagactaaggtggagggggtggcaatggagagaagtagatgatctgagaggtgtgtgtgtgtgtgtgtgtatatatatatatatacacacacacacacacatatatatgtttttttttttcttttttgagatggagtcttgctctgtcacccaggctggagtgcagtggcacgatcttggctcagtgcaagctctgcctcctgggttcaagcatttctcctgcctcagcctcctgagtagctgggactactacaaaggcgtgagcaccgcgccgggcgtgagttatattttcaaggctagaattgacagaacttgggttgatgagaatagttgattagcaggcagggtgccagggagggtgttgagcagaacagaggggggactgtgctttattttaaaatttttattgagacacagcatataaagtatacccaaatcttaagggtataacataatgaatttcactatcaagataaagatttagaacatttatagttttcttgtgctcctttcaggcaatacctaaaggtatttaccttgtcttttgataacctcctccacatcttcctctggttccttttaacagggaatgcgttgaatatgtcaagagcttcaatatccctctactcgtgctgggtggtggtggttatactgtccgaaatgttgcccgctgctggtgagcactctcctgatttcctcccctgttgtccagtgtgagctagggtgtccctcagatatggccacatgggtccttcagcccacttggtcagcctgctcccctctgctggttggtttcaggacatatgagacatcgctgctggtagaagaggccattagtgaggagcttccctatagtggtaaggaccaccccacaacacccccataacaggaaggccattctcaccagattccagaatgacctggtttgaaggcacatgggaaattttacactctcagagctctgcagactaaacccctgggctcagagcagggaagagattgggcagctattatgtaggtgctctggatgggaaggaaaaagattgggaagtcttgttagctgcctttctcagtctgagccatactttctcctctcctccccaagaatacttcgagtactttgccccagacttcacacttcatccagatgtcagcacccgcatcgagaatcagaactcacgccaggtcagcagctcagaaaagctgagcacaaacttctcctgaaaggtggagcccaggagaggtcaaagatgtgggaagtaggaaaaaccaaagagaaggaagttctaagccatcacagtcactgttattgactaggaggcagtccagtttaaagtagaggcagttggggttggtggggagggagagctatcagttgggggacctgaactagaggtaccactgagatgaaaaccagtatggtaggggtaaaaggcagctaggagattccatgtcctgggaatctctggaaactgctcactctgtattcctcatttccaaccagtatctggaccagatccgccagacaatctttgaaaacctgaagatgctgaaccatgcacctagtgtccagattcatgacgtgcctgcagacctcctgacctatgacaggactgatgaggctgatgcagaggagaggggtcctgaggagaactatagcaggtctgggagcagggacttcagcctactttcaataggcttgctggggaggtttaaaagggaaaaagtaaatgggaaggtattagtttaattgcctctggcttacctcctttagtctgctacaatttcctcactcttttctttgttatttttaatgacaaaagtaacacgtatttattgcaaaattttaaaacagcaccaaaatatggtgttggcgttcacacaatcccagacctattccacaggagtaaccactgttaatagtttttattgttttggatagacctttttctatagattgcaaatatactattctgtatgtacatataaacaaacacatatacactcatttacagtttgtgtggtttttggtttttcgtaaatacaaatagggtcattctacgtatgctgctttacatcatatagctgttttcagctagctaatatagatctgcttcagtattttatcagctgtataataatttactatgtggatagattattttccatttttttggtattacaataataatgtggcaatgaacccccttacattatacatctttgcattcttgtttgagtgggttagatagtagaatggttgctgctaggtcaaaggctgtgtgcattaattttttttttttttttttttttgagacagggtctcattctgtcacccaggctggagtacagtggcatgattatagctcactgcaatcttgaactcctgggttcaagcgatcctcctgcctcagcccctcgagtagctggaatcataggtgtgcaccacgacacctggctaatttttttttttttttttttttttttttttttttttggtagagacggagtcttgccttgttgcccaggctggtctcaaactcctgggctcaaatgtcctcctgccccagccttccaaagtgctgggattataggcgtgagccactgagcctggcctaaaattttttatatttgctgccaaattgccgtccagaaagtctgtagcaccctatagtcttgccagcatttttctcagtctttccaggtcttgagctggacaggtcactgcctgcgtaatactctctaaggctctttgatttctttgctctgttaattttttcgggtgggataattgcattgtggttatgttttttttttttttttaaaagtctttatctttctgagatacatacaaaatatttgtagatggaatgaattaggggggaaaaaggataggatggaatttttttttaatcccaaaactttgctgaaaaatgaaagggaaagacaacagaaccaagaagtgcagaaacagatgcacttaatggggaacagatttccttacatgactgagggataaccacagctggacacttgtgggacacgctgtcttgctcccacgcagggttagaggtttgagccggctctgctgcagagcctgatgggcttctcagccccttctagaatctgcttctgtcttagaattcaggcctccgaatctctcctctggacctgggctttactgctctgactcttggggatctctgcaactctcttcctccaaggatatcccccgatcccttctgagtgaggaagtgtctgaacatctggaagtgtctggcttcagggcttccaggactattggaaattgcttttcattgtctggtttggtttggtaaaacctgtttttaagttcttccttttgggttttttatcaatagctccaggctggcatctggacctagtctctgcattataataataccaagccctgtcacagccagcagaagcctcaggcctcttcctgttcctaagccctacctctctgtcaggccacccactgagtttctgttcttctttgatgcctatagctccagcttgcatatgacttgcagagtagaaataggaagagttaccactttttgtaggtttgccaagcaccagacactactaagtgctatctattacaacatatatatgatcattctgttgccatcagacaactctgatggctcttattttcagattaacacgggaggaatctaaggctcagagagtctaagtaactttctttctttcttttttttgagacggagtttcgctctttttgcccaggctggagtgcaatggcatgatctcagctcaccacaacctctgcctcccgggttcaagcgattctcctgccttagcctcccaagtagctggattacaggcatgagcctccacgcctggctaattttttttgtatttttagaagagatggggtttctccatgttagtcaggctggtctcgaactcctgacctcaggtgatctgcctgcctcggcctcccaaagtgctaggattacaggctacaggtgtgagccaccgcccccggcgagacttaagtaactttctgaaggtcacatggctagttaaagatcagggctgagattcaacctgattctctgactccacacctttaaccctgtgcacttagaagtaactgagacattgctcaccatgcagataaggcctttcctggcttagtgcctcagcttctctttgatgactttctcaattctctgtgtcccagagaatactttttcttttctttcttttttttttttgagatggagtctcactctgttgccaggctggagtgcagtggctaatcccggctcactgcaacctccgcctcccaggttcaagcgattctcctgcctcagcctcctcagtagctgagattacaggcatgtgccaccacacccggctaactttagtatttttagtagagacggggtttcaccatgttggccaggatggtcttgatctcttgaccttgtgatccacctgccttggcctcccaaagtgctgggattacaggtgtgagctaccacgcccggcttttgagaatactttttcaaaaagaaagaaaccaatattgagtacctgttgggccctgttttgctttcacatccattctttcactatgggtttataataccacgtcactcttcttaaaattaaaactctcctttaccttgcacttagaagaaaatccaaaattttgactgtggcttaaaaaggtcctgcatgctagcccttacctacatccaggatctcatctctaactactctcctccatgcacagtgctcccggctgtcctggcctccttgttcttactggaatacatcagtctctttccatttcatgacctctgtagttggttttcttgcagcttggaatggccttcctgaagtctttgcctgcttagctcctcctcagactttaggtcttatgtcccaatagtcctgtctgaaatttcacccttttcctctcatcaccttcagtcctatcacttcattttattaattgtactctccatcatctgaaattattatatttatttactttgttagttactagtctcatttattaggtaagctttttgaggatagacaaccttgtccagcttgttactctactgtattgctaaggtttatgacagtgtctgtatagagtagttccttaatgtttatttgatacgtgaatgggtgaatgaatagcagtctctaccaacaagaggaggagtggttctcaacggggcctgagaaatggctttggaaaagggtgctgggagaagattagaacttagagtgagatcctgacctctctccccttgctttgcaggccagaggcacccaatgagttctatgatggagaccatgacaatgacaaggaaagcgatgtggagatttaagagtggcttgggatgctgtgtcccaaggaatttcttttcacctcttggttgggctggagggaaaaggagtggctcctagagtcctgggggtcaccccagggcttttgctgactctgggaaagagtctggagaccacatttggttctcgaaccatctacctgcttttcctctctctcccaaggcctgacaatggtacctattagggatgagatacagacaaggatagctatctgggacattattggcagtgggccctggaggccagtccctagccccccttgccccttatttcttccctgcttccctcgaacccagagatttttgagggatgaacgggtagacaaggactgagattgcctctgacttcctcctcccctgggttctgacttcttcctccccttgcttccagggaagatgaagagagagagatttggaaggggctctggctccctaacacctgaatcccagatgatgggaagtatgttttcaagtgtggggaggatatgaaaatgttctgttctcacttttggctttatgtccattttaccactgtttttatccaataaactaagtcggtattttttgta

SEQ ID NO: 12337 - DNA, 1933 bp, Homo sapiens
gctggcggcggccgcgggcggcgggcggcggaggtgcggggcctgctcccgccggcaccatggccaagaccgtggcctatttctacgaccccgacgtgggcaacttccactacggagctggacaccctatgaagccccatcgcctggcattgacccatagcctggtcctgcattacggtctctataagaagatgatcgtcttcaagccataccaggcctcccaacatgacatgtgccgcttccactccgaggactacattgacttcctgcagagagtcagccccaccaatatgcaaggcttcaccaagagtcttaatgccttcaacgtaggcgatgactgcccagtgtttcccgggctctttgagttctgctcgcgttacacaggcgcatctctgcaaggagcaacccagctgaacaacaagatctgtgatattgccattaactgggctggtggtctgcaccatgccaagaagtttgaggcctctggcttctgctatgtcaacgacattgtgattggcatcctggagctgctcaagtaccaccctcgggtgctctacattgacattgacatccaccatggtgacggggttcaagaagctttctacctcactgaccgggtcatgacggtgtccttccacaaatacggaaattacttcttccctggcacaggtgacatgtatgaagtcggggcagagagtggccgctactactgtctgaacgtgcccctgcgggatggcattgatgaccagagttacaagcaccttttccagccggttatcaaccaggtagtggacttctaccaacccacgtgcattgtgctccagtgtggagctgactctctgggctgtgatcgattgggctgctttaacctcagcatccgagggcatggggaatgcgttgaatatgtcaagagcttcaatatccctctactcgtgctgggtggtggtggttatactgtccgaaatgttgcccgctgctggacatatgagacatcgctgctggtagaagaggccattagtgaggagcttccctatagtgaatacttcgagtactttgccccagacttcacacttcatccagatgtcagcacccgcatcgagaatcagaactcacgccagtatctggaccagatccgccagacaatctttgaaaacctgaagatgctgaaccatgcacctagtgtccagattcatgacgtgcctgcagacctcctgacctatgacaggactgatgaggctgatgcagaggagaggggtcctgaggagaactatagcaggccagaggcacccaatgagttctatgatggagaccatgacaatgacaaggaaagcgatgtggagatttaagagtggcttgggatgctgtgtcccaaggaatttcttttcacctcttggttgggctggagggaaaaggagtggctcctagagtcctgggggtcaccccagggcttttgctgactctgggaaagagtctggagaccacatttggttctcgaaccatctacctgcttttcctctctctcccaaggcctgacaatggtacctattagggatgagatacagacaaggatagctatctgggacattattggcagtgggccctggaggccagtccctagccccccttgccccttatttcttccctgcttccctcgaacccagagatttttgagggatgaacgggtagacaaggactgagattgcctctgacttcctcctcccctgggttctgacttcttcctccccttgcttccagggaagatgaagagagagagatttggaaggggctctggctccctaacacctgaatcccagatgatgggaagtatgttttcaagtgtggggaggatatgaaaatgttctgttctcacttttggctttatgtccattttaccactgtttttatccaataaactaagtcggtattttttgta

SEQ ID NO: 12338 - DNA, 7078 bp, Homo sapiens
cagagtaagtaccgaagtcttccctctgttccctaggccccttctttttctccttgaaataacctcttctgcctggtattgtctgctgttgggccagttgtccttaaggatgaatggccttcagagggaccatgaatctctggaaattgtatgcaacatatcatgtgtatgtgcatttttctgggaaaagtcattggctttcatcagtcactcatagcagtctgggatcccttccagaagtttcagaccagtgatttgattcttttgggtggcccctttcctgggctacatgctcgctcaaccccctttttccttttgttccctgtctccccatccccttggggtgccaggtgcccatctttggccctctcccaggttacaagcaccttttccagccggttatcaaccaggtagtggacttctaccaacccacgtgcattgtgctccaggtaatactgtcagttcctcctcaggagtgttctgcctgggcttggggaaagagagcaagggaagaggaggttctttaggttggtggtggaaggggtatctgtgatgttctgatcagttctgatcactgcactttcctggggttttgctttttgcagtgtggagctgactctctgggctgtgatcgattgggctgctttaacctcagcatccgagggcatgggtgagacttgctctccttcttctccccaaggtttttaagtggccttggacttcagtacgtgggtgggggtagttggggaatgggcctcacctcttcttggaaatcaaaaatagctacaaattgtacttgaactagaaatgtcatcttgaacagggttccctagatggtcattcattcacgatatatttttattaagcacctgttatgttccaggcatcataccacatcatggggatggaataaggagtctcccatggagtttacagtttaggaaacagacaaaaaataaataatcaaatgaaataaatagattcttataaattctgtgaaagaaaaaaagaaagctgagacacaggatacaatgggggacctacttgagatagcatggtttcggaaagtttttctgaggaagtaaaatttgagttgagacctggagactaagaaggagtgagtcataagaggagcagagagaagcctgacccaagcatggacaaaggcccacaaaaggctctgagggctgggcccagtggcacacacctataatcccaacacttccagaggccaaggtgggagaatcgcctgaggctaggagtttgaggccagcctgggcaacatagtgagagccatctctacagaaaataaaaaacaaaatcagctgggcatgatggtgcatgcctatagtcctagctactcaggaagctgaggcaggaggatcacttgagcctaggagtttgaggttacagtgaactatgattgtgccactggacttcagtctgttgaggtgaggtccgagaagctggccatggtgagattgtgcagagcctttaaaccctggtaaggagtttgaattatattccaaagatgatgggaaaccattgaaggattttaagcaggaaagtgacatgatccaatttgtgtttgaaagtgacaattctgactgctgaatagagaaaggtttgggtaggggggatggagatggaagtagaaagaccagttaggaagccatggtgttggttaggtgcccagactaaggtggagggggtggcaatggagagaagtagatgatctgagaggtgtgtgtgtgtgtgtgtgtatatatatatatatacacacacacacacacatatatatgtttttttttttcttttttgagatggagtcttgctctgtcacccaggctggagtgcagtggcacgatcttggctcagtgcaagctctgcctcctgggttcaagcatttctcctgcctcagcctcctgagtagctgggactactacaaaggcgtgagcaccgcgccgggcgtgagttatattttcaaggctagaattgacagaacttgggttgatgagaatagttgattagcaggcagggtgccagggagggtgttgagcagaacagaggggggactgtgctttattttaaaatttttattgagacacagcatataaagtatacccaaatcttaagggtataacataatgaatttcactatcaagataaagatttagaacatttatagttttcttgtgctcctttcaggcaatacctaaaggtatttaccttgtcttttgataacctcctccacatcttcctctggttccttttaacagggaatgcgttgaatatgtcaagagcttcaatatccctctactcgtgctgggtggtggtggttatactgtccgaaatgttgcccgctgctggtgagcactctcctgatttcctcccctgttgtccagtgtgagctagggtgtccctcagatatggccacatgggtccttcagcccacttggtcagcctgctcccctctgctggttggtttcaggacatatgagacatcgctgctggtagaagaggccattagtgaggagcttccctatagtggtaaggaccaccccacaacacccccataacaggaaggccattctcaccagattccagaatgacctggtttgaaggcacatgggaaattttacactctcagagctctgcagactaaacccctgggctcagagcagggaagagattgggcagctattatgtaggtgctctggatgggaaggaaaaagattgggaagtcttgttagctgcctttctcagtctgagccatactttctcctctcctccccaagaatacttcgagtactttgccccagacttcacacttcatccagatgtcagcacccgcatcgagaatcagaactcacgccaggtcagcagctcagaaaagctgagcacaaacttctcctgaaaggtggagcccaggagaggtcaaagatgtgggaagtaggaaaaaccaaagagaaggaagttctaagccatcacagtcactgttattgactaggaggcagtccagtttaaagtagaggcagttggggttggtggggagggagagctatcagttgggggacctgaactagaggtaccactgagatgaaaaccagtatggtaggggtaaaaggcagctaggagattccatgtcctgggaatctctggaaactgctcactctgtattcctcatttccaaccagtatctggaccagatccgccagacaatctttgaaaacctgaagatgctgaaccatgcacctagtgtccagattcatgacgtgcctgcagacctcctgacctatgacaggactgatgaggctgatgcagaggagaggggtcctgaggagaactatagcaggtctgggagcagggacttcagcctactttcaataggcttgctggggaggtttaaaagggaaaaagtaaatgggaaggtattagtttaattgcctctggcttacctcctttagtctgctacaatttcctcactcttttctttgttatttttaatgacaaaagtaacacgtatttattgcaaaattttaaaacagcaccaaaatatggtgttggcgttcacacaatcccagacctattccacaggagtaaccactgttaatagtttttattgttttggatagacctttttctatagattgcaaatatactattctgtatgtacatataaacaaacacatatacactcatttacagtttgtgtggtttttggtttttcgtaaatacaaatagggtcattctacgtatgctgctttacatcatatagctgttttcagctagctaatatagatctgcttcagtattttatcagctgtataataatttactatgtggatagattattttccatttttttggtattacaataataatgtggcaatgaacccccttacattatacatctttgcattcttgtttgagtgggttagatagtagaatggttgctgctaggtcaaaggctgtgtgcattaattttttttttttttttttttttgagacagggtctcattctgtcacccaggctggagtacagtggcatgattatagctcactgcaatcttgaactcctgggttcaagcgatcctcctgcctcagcccctcgagtagctggaatcataggtgtgcaccacgacacctggctaatttttttttttttttttttttttttttttttttttggtagagacggagtcttgccttgttgcccaggctggtctcaaactcctgggctcaaatgtcctcctgccccagccttccaaagtgctgggattataggcgtgagccactgagcctggcctaaaattttttatatttgctgccaaattgccgtccagaaagtctgtagcaccctatagtcttgccagcatttttctcagtctttccaggtcttgagctggacaggtcactgcctgcgtaatactctctaaggctctttgatttctttgctctgttaattttttcgggtgggataattgcattgtggttatgttttttttttttttttaaaagtctttatctttctgagatacatacaaaatatttgtagatggaatgaattaggggggaaaaaggataggatggaatttttttttaatcccaaaactttgctgaaaaatgaaagggaaagacaacagaaccaagaagtgcagaaacagatgcacttaatggggaacagatttccttacatgactgagggataaccacagctggacacttgtgggacacgctgtcttgctcccacgcagggttagaggtttgagccggctctgctgcagagcctgatgggcttctcagccccttctagaatctgcttctgtcttagaattcaggcctccgaatctctcctctggacctgggctttactgctctgactcttggggatctctgcaactctcttcctccaaggatatcccccgatcccttctgagtgaggaagtgtctgaacatctggaagtgtctggcttcagggcttccaggactattggaaattgcttttcattgtctggtttggtttggtaaaacctgtttttaagttcttccttttgggttttttatcaatagctccaggctggcatctggacctagtctctgcattataataataccaagccctgtcacagccagcagaagcctcaggcctcttcctgttcctaagccctacctctctgtcaggccacccactgagtttctgttcttctttgatgcctatagctccagcttgcatatgacttgcagagtagaaataggaagagttaccactttttgtaggtttgccaagcaccagacactactaagtgctatctattacaacatatatatgatcattctgttgccatcagacaactctgatggctcttattttcagattaacacgggaggaatctaaggctcagagagtctaagtaactttctttctttcttttttttgagacggagtttcgctctttttgcccaggctggagtgcaatggcatgatctcagctcaccacaacctctgcctcccgggttcaagcgattctcctgccttagcctcccaagtagctggattacaggcatgagcctccacgcctggctaattttttttgtatttttagaagagatggggtttctccatgttagtcaggctggtctcgaactcctgacctcaggtgatctgcctgcctcggcctcccaaagtgctaggattacaggctacaggtgtgagccaccgcccccggcgagacttaagtaactttctgaaggtcacatggctagttaaagatcagggctgagattcaacctgattctctgactccacacctttaaccctgtgcacttagaagtaactgagacattgctcaccatgcagataaggcctttcctggcttagtgcctcagcttctctttgatgactttctcaattctctgtgtcccagagaatactttttcttttctttcttttttttttttgagatggagtctcactctgttgccaggctggagtgcagtggctaatcccggctcactgcaacctccgcctcccaggttcaagcgattctcctgcctcagcctcctcagtagctgagattacaggcatgtgccaccacacccggctaactttagtatttttagtagagacggggtttcaccatgttggccaggatggtcttgatctcttgaccttgtgatccacctgccttggcctcccaaagtgctgggattacaggtgtgagctaccacgcccggcttttgagaatactttttcaaaaagaaagaaaccaatattgagtacctgttgggccctgttttgctttcacatccattctttcactatgggtttataataccacgtcactcttcttaaaattaaaactctcctttaccttgcacttagaagaaaatccaaaattttgactgtggcttaaaaaggtcctgcatgctagcccttacctacatccaggatctcatctctaactactctcctccatgcacagtgctcccggctgtcctggcctccttgttcttactggaatacatcagtctctttccatttcatgacctctgtagttggttttcttgcagcttggaatggccttcctgaagtctttgcctgcttagctcctcctcagactttaggtcttatgtcccaatagtcctgtctgaaatttcacccttttcctctcatcaccttcagtcctatcacttcattttattaattgtactctccatcatctgaaattattatatttatttactttgttagttactagtctcatttattaggtaagctttttgaggatagacaaccttgtccagcttgttactctactgtattgctaaggtttatgacagtgtctgtatagagtagttccttaatgtttatttgatacgtgaatgggtgaatgaatagcagtctctaccaacaagaggaggagtggttctcaacggggcctgagaaatggctttggaaaagggtgctgggagaagattagaacttagagtgagatcctgacctctctccccttgctttgcaggccagaggcacccaatgagttctatgatggagaccatgacaatgacaaggaaa

SEQ ID NO: 12339 - DNA, 524 bp, Homo sapiens
cagagttacaagcaccttttccagccggttatcaaccaggtagtggacttctaccaacccacgtgcattgtgctccagtgtggagctgactctctgggctgtgatcgattgggctgctttaacctcagcatccgagggcatggggaatgcgttgaatatgtcaagagcttcaatatccctctactcgtgctgggtggtggtggttatactgtccgaaatgttgcccgctgctgaatacttcgagtactttgccccagacttcacacttcatccagatgtcagcacccgcatcgagaatcagaactcacgccagtatctggaccagatccgccagacaatctttgaaaacctgaagatgctgaaccatgcacctagtgtccagattcatgacgtgcctgcagacctcctgacctatgacaggactgatgaggctgatgcagaggagaggggtcctgaggagaactatagcaggccagaggcacccaatgagttctatgatggagaccatgacaatgacaaggaaa

SEQ ID NO: 12340 - DNA, 4272 bp, Homo sapiens
gctcccagcttgaggggtgggcaggaaggactgtgacttaggtgtttgtctttcagatctgtgatattgccattaactgggctggtggtctgcaccatgccaagaagtttgaggtgagtgaggaggtgatgggaaagacagtggccatcctagggtaggtgtttaggatgatggtggggggcagctgggaggggaattgctcttctctttatgagaccactgtcttgccataggcctctggcttctgctatgtcaacgacattgtgattggcatcctggagctgctcaagtaagtagcccaggaggagatgggggcagttacgggattcttggctgaggaggtctctcagtctcaaccctgaccttgacctccctcctccctgattagcttctcccaagttcttgatgctttattcaggctgcctcttccactgctgcagattccctactgcctgctcacatttcagccttctctgcatatccctctcctgtccctgcctctagcctctaggctggagcccccagttgcctttagggaactggtgacattaagtttcaggtgaccagggcagaagcagactcttcacaattcgagacccggtgtttgagaggagtgggttggggggttcacttctagctcagaccctggctttggcttccctctaggtaccaccctcgggtgctctacattgacattgacatccaccatggtgacggggttcaagaagctttctacctcactgaccgggtcatgacggtgtccttccacaaatacggaaattacttcttccctggcacaggtatgggaatagggattactttcccctttgcacccttcagctctttactatgagtgcctccttctcagccttctagtctcatctcaggtgtcccctcctcagagaagcctttccttaccactccagttatcataatcacctccttccccattcctctgttacatcagcctcattgtttccctcagaacactcactgctatttgtgtttattgtggttttttgttttgttttgtttactgcctccctcctcctcatggctattccctaagaatataagcgtggtgggatatcgtaaatttcattagttccattcgttgctgcatccctactgcctagtacacagttggctcagagtggatcccccaaaactatttgcccaatgaatgcaagctgcaagagatttagtggctctagggagtttatggtgaagctacatagatggaatgagaggctcccagagtgcagattggggctgaaacagctgggttgtgggtgcttcccatgtgtggctaccaccacccacttccctacaggtgacatgtatgaagtcggggcagagagtggccgctactactgtctgaacgtgcccctgcgggatggcattgatgaccagagtaagtaccgaagtcttccctctgttccctaggccccttctttttctccttgaaataacctcttctgcctggtattgtctgctgttgggccagttgtccttaaggatgaatggccttcagagggaccatgaatctctggaaattgtatgcaacatatcatgtgtatgtgcatttttctgggaaaagtcattggctttcatcagtcactcatagcagtctgggatcccttccagaagtttcagaccagtgatttgattcttttgggtggcccctttcctgggctacatgctcgctcaaccccctttttccttttgttccctgtctccccatccccttggggtgccaggtgcccatctttggccctctcccaggttacaagcaccttttccagccggttatcaaccaggtagtggacttctaccaacccacgtgcattgtgctccaggtaatactgtcagttcctcctcaggagtgttctgcctgggcttggggaaagagagcaagggaagaggaggttctttaggttggtggtggaaggggtatctgtgatgttctgatcagttctgatcactgcactttcctggggttttgctttttgcagtgtggagctgactctctgggctgtgatcgattgggctgctttaacctcagcatccgagggcatgggtgagacttgctctccttcttctccccaaggtttttaagtggccttggacttcagtacgtgggtgggggtagttggggaatgggcctcacctcttcttggaaatcaaaaatagctacaaattgtacttgaactagaaatgtcatcttgaacagggttccctagatggtcattcattcacgatatatttttattaagcacctgttatgttccaggcatcataccacatcatggggatggaataaggagtctcccatggagtttacagtttaggaaacagacaaaaaataaataatcaaatgaaataaatagattcttataaattctgtgaaagaaaaaaagaaagctgagacacaggatacaatgggggacctacttgagatagcatggtttcggaaagtttttctgaggaagtaaaatttgagttgagacctggagactaagaaggagtgagtcataagaggagcagagagaagcctgacccaagcatggacaaaggcccacaaaaggctctgagggctgggcccagtggcacacacctataatcccaacacttccagaggccaaggtgggagaatcgcctgaggctaggagtttgaggccagcctgggcaacatagtgagagccatctctacagaaaataaaaaacaaaatcagctgggcatgatggtgcatgcctatagtcctagctactcaggaagctgaggcaggaggatcacttgagcctaggagtttgaggttacagtgaactatgattgtgccactggacttcagtctgttgaggtgaggtccgagaagctggccatggtgagattgtgcagagcctttaaaccctggtaaggagtttgaattatattccaaagatgatgggaaaccattgaaggattttaagcaggaaagtgacatgatccaatttgtgtttgaaagtgacaattctgactgctgaatagagaaaggtttgggtaggggggatggagatggaagtagaaagaccagttaggaagccatggtgttggttaggtgcccagactaaggtggagggggtggcaatggagagaagtagatgatctgagaggtgtgtgtgtgtgtgtgtgtatatatatatatatacacacacacacacacatatatatgtttttttttttcttttttgagatggagtcttgctctgtcacccaggctggagtgcagtggcacgatcttggctcagtgcaagctctgcctcctgggttcaagcatttctcctgcctcagcctcctgagtagctgggactactacaaaggcgtgagcaccgcgccgggcgtgagttatattttcaaggctagaattgacagaacttgggttgatgagaatagttgattagcaggcagggtgccagggagggtgttgagcagaacagaggggggactgtgctttattttaaaatttttattgagacacagcatataaagtatacccaaatcttaagggtataacataatgaatttcactatcaagataaagatttagaacatttatagttttcttgtgctcctttcaggcaatacctaaaggtatttaccttgtcttttgataacctcctccacatcttcctctggttccttttaacagggaatgcgttgaatatgtcaagagcttcaatatccctctactcgtgctgggtggtggtggttatactgtccgaaatgttgcccgctgctggtgagcactctcctgatttcctcccctgttgtccagtgtgagctagggtgtccctcagatatggccacatgggtccttcagcccacttggtcagcctgctcccctctgctggttggtttcaggacatatgagacatcgctgctggtagaagaggccattagtgaggagcttccctatagtggtaaggaccaccccacaacacccccataacaggaaggccattctcaccagattccagaatgacctggtttgaaggcacatgggaaattttacactctcagagctctgcagactaaacccctgggctcagagcagggaagagattgggcagctattatgtaggtgctctggatgggaaggaaaaagattgggaagtcttgttagctgcctttctcagtctgagccatactttctcctctcctccccaagaatacttcgagtactttgccccagacttcacacttcatccagatgtcagcacccgcatcgagaa

SEQ ID NO: 12341 - DNA, 663 bp, Homo sapiens
gctcccagcttgaggggtgggcaggaaggactgtgacttaggtgtttgtctttcagatctgtgatattgccattaactgggctggtggtctgcaccatgccaagaagtttgaggtgagtgaggaggtgatgggaaagacagtggccatcctagggtaggtgtttaggatgatggtggggggcagctgggaggggaattgctcttctctttatgagaccactgtcttgccataggcctctggcttctgctatgtcaacgacattgtgattggcatcctggagctgctcaagtgacatgtatgaagtcggggcagagagtggccgctactactgtctgaacgtgcccctgcgggatggcattgatgaccagagttacaagcaccttttccagccggttatcaaccaggtagtggacttctaccaacccacgtgcattgtgctccagtgtggagctgactctctgggctgtgatcgattgggctgctttaacctcagcatccgagggcatggggaatgcgttgaatatgtcaagagcttcaatatccctctactcgtgctgggtggtggtggttatactgtccgaaatgttgcccgctgctgaatacttcgagtactttgccccagacttcacacttcatccagatgtcagcacccgcatcgagaa

SEQ ID NO: 12342 - DNA, 5146 bp, Homo sapiens
acatatgagacatcgctgctggtagaagaggccattagtgaggagcttccctatagtggtaaggaccaccccacaacacccccataacaggaaggccattctcaccagattccagaatgacctggtttgaaggcacatgggaaattttacactctcagagctctgcagactaaacccctgggctcagagcagggaagagattgggcagctattatgtaggtgctctggatgggaaggaaaaagattgggaagtcttgttagctgcctttctcagtctgagccatactttctcctctcctccccaagaatacttcgagtactttgccccagacttcacacttcatccagatgtcagcacccgcatcgagaatcagaactcacgccaggtcagcagctcagaaaagctgagcacaaacttctcctgaaaggtggagcccaggagaggtcaaagatgtgggaagtaggaaaaaccaaagagaaggaagttctaagccatcacagtcactgttattgactaggaggcagtccagtttaaagtagaggcagttggggttggtggggagggagagctatcagttgggggacctgaactagaggtaccactgagatgaaaaccagtatggtaggggtaaaaggcagctaggagattccatgtcctgggaatctctggaaactgctcactctgtattcctcatttccaaccagtatctggaccagatccgccagacaatctttgaaaacctgaagatgctgaaccatgcacctagtgtccagattcatgacgtgcctgcagacctcctgacctatgacaggactgatgaggctgatgcagaggagaggggtcctgaggagaactatagcaggtctgggagcagggacttcagcctactttcaataggcttgctggggaggtttaaaagggaaaaagtaaatgggaaggtattagtttaattgcctctggcttacctcctttagtctgctacaatttcctcactcttttctttgttatttttaatgacaaaagtaacacgtatttattgcaaaattttaaaacagcaccaaaatatggtgttggcgttcacacaatcccagacctattccacaggagtaaccactgttaatagtttttattgttttggatagacctttttctatagattgcaaatatactattctgtatgtacatataaacaaacacatatacactcatttacagtttgtgtggtttttggtttttcgtaaatacaaatagggtcattctacgtatgctgctttacatcatatagctgttttcagctagctaatatagatctgcttcagtattttatcagctgtataataatttactatgtggatagattattttccatttttttggtattacaataataatgtggcaatgaacccccttacattatacatctttgcattcttgtttgagtgggttagatagtagaatggttgctgctaggtcaaaggctgtgtgcattaattttttttttttttttttttttgagacagggtctcattctgtcacccaggctggagtacagtggcatgattatagctcactgcaatcttgaactcctgggttcaagcgatcctcctgcctcagcccctcgagtagctggaatcataggtgtgcaccacgacacctggctaatttttttttttttttttttttttttttttttttttggtagagacggagtcttgccttgttgcccaggctggtctcaaactcctgggctcaaatgtcctcctgccccagccttccaaagtgctgggattataggcgtgagccactgagcctggcctaaaattttttatatttgctgccaaattgccgtccagaaagtctgtagcaccctatagtcttgccagcatttttctcagtctttccaggtcttgagctggacaggtcactgcctgcgtaatactctctaaggctctttgatttctttgctctgttaattttttcgggtgggataattgcattgtggttatgttttttttttttttttaaaagtctttatctttctgagatacatacaaaatatttgtagatggaatgaattaggggggaaaaaggataggatggaatttttttttaatcccaaaactttgctgaaaaatgaaagggaaagacaacagaaccaagaagtgcagaaacagatgcacttaatggggaacagatttccttacatgactgagggataaccacagctggacacttgtgggacacgctgtcttgctcccacgcagggttagaggtttgagccggctctgctgcagagcctgatgggcttctcagccccttctagaatctgcttctgtcttagaattcaggcctccgaatctctcctctggacctgggctttactgctctgactcttggggatctctgcaactctcttcctccaaggatatcccccgatcccttctgagtgaggaagtgtctgaacatctggaagtgtctggcttcagggcttccaggactattggaaattgcttttcattgtctggtttggtttggtaaaacctgtttttaagttcttccttttgggttttttatcaatagctccaggctggcatctggacctagtctctgcattataataataccaagccctgtcacagccagcagaagcctcaggcctcttcctgttcctaagccctacctctctgtcaggccacccactgagtttctgttcttctttgatgcctatagctccagcttgcatatgacttgcagagtagaaataggaagagttaccactttttgtaggtttgccaagcaccagacactactaagtgctatctattacaacatatatatgatcattctgttgccatcagacaactctgatggctcttattttcagattaacacgggaggaatctaaggctcagagagtctaagtaactttctttctttcttttttttgagacggagtttcgctctttttgcccaggctggagtgcaatggcatgatctcagctcaccacaacctctgcctcccgggttcaagcgattctcctgccttagcctcccaagtagctggattacaggcatgagcctccacgcctggctaattttttttgtatttttagaagagatggggtttctccatgttagtcaggctggtctcgaactcctgacctcaggtgatctgcctgcctcggcctcccaaagtgctaggattacaggctacaggtgtgagccaccgcccccggcgagacttaagtaactttctgaaggtcacatggctagttaaagatcagggctgagattcaacctgattctctgactccacacctttaaccctgtgcacttagaagtaactgagacattgctcaccatgcagataaggcctttcctggcttagtgcctcagcttctctttgatgactttctcaattctctgtgtcccagagaatactttttcttttctttcttttttttttttgagatggagtctcactctgttgccaggctggagtgcagtggctaatcccggctcactgcaacctccgcctcccaggttcaagcgattctcctgcctcagcctcctcagtagctgagattacaggcatgtgccaccacacccggctaactttagtatttttagtagagacggggtttcaccatgttggccaggatggtcttgatctcttgaccttgtgatccacctgccttggcctcccaaagtgctgggattacaggtgtgagctaccacgcccggcttttgagaatactttttcaaaaagaaagaaaccaatattgagtacctgttgggccctgttttgctttcacatccattctttcactatgggtttataataccacgtcactcttcttaaaattaaaactctcctttaccttgcacttagaagaaaatccaaaattttgactgtggcttaaaaaggtcctgcatgctagcccttacctacatccaggatctcatctctaactactctcctccatgcacagtgctcccggctgtcctggcctccttgttcttactggaatacatcagtctctttccatttcatgacctctgtagttggttttcttgcagcttggaatggccttcctgaagtctttgcctgcttagctcctcctcagactttaggtcttatgtcccaatagtcctgtctgaaatttcacccttttcctctcatcaccttcagtcctatcacttcattttattaattgtactctccatcatctgaaattattatatttatttactttgttagttactagtctcatttattaggtaagctttttgaggatagacaaccttgtccagcttgttactctactgtattgctaaggtttatgacagtgtctgtatagagtagttccttaatgtttatttgatacgtgaatgggtgaatgaatagcagtctctaccaacaagaggaggagtggttctcaacggggcctgagaaatggctttggaaaagggtgctgggagaagattagaacttagagtgagatcctgacctctctccccttgctttgcaggccagaggcacccaatgagttctatgatggagaccatgacaatgacaaggaaagcgatgtggagatttaagagtggcttgggatgctgtgtcccaaggaatttcttttcacctcttggttgggctggagggaaaaggagtggctcctagagtcctgggggtcaccccagggcttttgctgactctgggaaagagtctggagaccacatttggttctcgaaccatctacctgcttttcctctctctcccaaggcctgacaatggtacctattagggatgagatacagacaaggatagctatctgggacattattggcagtgggccctggaggccagtccctagccccccttgccccttatttcttccctgcttccctcgaacccagagatttttgagggatgaacgggtagacaaggactgagattgcctctgacttcctcctcccctgggttctgacttcttcctccccttgcttccagggaagatgaagagagagagatttggaaggggctctggctccctaacacctgaatcccagatgatgggaagtatgttttcaagtgtggggaggatatgaaaatgttctgttctcacttttggctttatgtccatt

SEQ ID NO: 12343 - DNA, 829 bp, Homo sapiens
acatatgagacatcgctgctggtagaagaggccattagtgaggagcttccctatagtgtatctggaccagatccgccagacaatctttgaaaacctgaagatgctgaaccatgcacctagtgtccagattcatgacgtgcctgcagacctcctgacctatgacaggactgatgaggctgatgcagaggagaggggtcctgaggagaactatagcaggccagaggcacccaatgagttctatgatggagaccatgacaatgacaaggaaagcgatgtggagatttaagagtggcttgggatgctgtgtcccaaggaatttcttttcacctcttggttgggctggagggaaaaggagtggctcctagagtcctgggggtcaccccagggcttttgctgactctgggaaagagtctggagaccacatttggttctcgaaccatctacctgcttttcctctctctcccaaggcctgacaatggtacctattagggatgagatacagacaaggatagctatctgggacattattggcagtgggccctggaggccagtccctagccccccttgccccttatttcttccctgcttccctcgaacccagagatttttgagggatgaacgggtagacaaggactgagattgcctctgacttcctcctcccctgggttctgacttcttcctccccttgcttccagggaagatgaagagagagagatttggaaggggctctggctccctaacacctgaatcccagatgatgggaagtatgttttcaagtgtggggaggatatgaaaatgttctgttctcacttttggctttatgtccatt

SEQ ID NO: 12344 - DNA, 14289 bp, Homo sapiens
ggtggaaaggaaaagaagtggtcttcagggggctcatttgtaataacttacctggttaatcggagtctctctactgacttaaggattgtgggatgaggggaatgctatgtttggcttcatatagtctccaggactgggttcagtatgggtggtctgagcctgtggagtggggctgaccctgcctgggttcatcttgtgtctccatcccgaggtcttcaagccataccaggcctcccaacatgacatgtgccgcttccactccgaggactacattgacttcctgcagagagtcagccccaccaatatgcaaggcttcaccaagagtcttaatgccttcaacgtaggcgatgactggtgagggaggactgggagttttgatgtctaacagtttaatgccaagcccttcagtgaggtcttttggcagcagtgggaagatctcaaggggggcctacttgtcaatgcatcataattcattttatttgtttattcaataaatatttattggtcacttgttctaggcaggccctgtgctaagtgctgggaatgcagtgatgaacaaaaacaaaattttaatatcgtatttttgctaagtcttataaagaggaggtgtatgacagattatgagagtgtatacgtggaggattgtttagcttggtggagtggctggtcggtggggccttcctagaggaagtaaagattgagctgagatctgaaaaaagagtagaagtaatcagatgaaagatggttggagggtgaggggagaagtatagcaggcagtagggacaagtgctaagggtctgtggtaggactgagtatgactcatttgaggaacagaaaaaaggccaagtgcagagtatgaagaggaggtgaactgaattgaggctaaagaaataggaccttttaaaagcaaacagctctattatgaattggggtttttacccgtagagtagagggaagctatcaaagtgttttaaaaagcaagggatcttaagagggctatgggcagttaaaaaaacaaaaaaaacaacgaaggagtggtttgatatcattaggtttacattgagcttgtatcatccatagaagagtcagggttagaccctctggggaagagagtggacaacaaagataagccacactctactctatatccatgaaaaaatagtaaccatcacagctaccagttgctcaattctacttacttttgtttttaaactttttattagggaaaatttcaaaaatttctgaaagtgaagtagtgcagtgacctcccatacgtccatcacctagcttcaacgcttatgagcaaatggccactctttttttttttttttttttttttgagacagagtctcactctgtagcccaggctggagtgcagtggtgcagtcttggctcactgcaacctctgcctcctgggttcaagcgattctcatgcctcagactcccgagtagctgggattacaggcgcctgccaccatgcctggctaatttttgtatgtttagtagagatggggtttcactatgttggtcaggctggttttgaactcctgacctcaggtgatccaccagcctcagcctccaaaagtgctgggattacagacgtgagccatcgcacccagctgagcaagtggccactcttacttcatctatactccctcatgttagattgttttaaagcagatcctagatgttatatccttttatccataaatattttattatgtatctctaaatgatactcttttaaaaaaacatagtatcattatcaaacctaaaaagttaacagtgattccttaatgtcatcaaatatgggatcaatattcaaatttctgcagttgtctcataattattttgtagctaatttaaatccagatctaaacaaggtctatacagtgcatttggttgatatgtctcttaagacttttaatttgtagcttttctgtcacccccttgaatttatttcttgaagaaaccaggttgttgatcctgtagaatttcttatgatagctaccatttactgagtgcttactctgctaggtattatgccaagggttgctggtaaatccacttaattctcataccaatccttagatgtattataatagacctttttctgatgttatatataagtaaattgaggtttgggaatatctaggtaacttagccgtagtcacataactggtcattggagggggcatgatccagatcccgggtttttaaaccactaatctgttttcctgaaagatcttaatgacagaagcagccagggctgtaggatagaggccaactcattaggctggcattggcacctttccaactttatccctacacctcagctgcacaggatgccttcctggaatgcccttagttctctattcaacctcttcaaggccttctcagccttcacaccatctccatgaaacctttcttgaccacaccagcccatagagctctgtcttgcacacactgcactgctcatttggtgttcagtcacatgctgtttggggaggtttcttgtttttttgttagtattcctgctgttatttctgagctcactttctagctctgtgaatacagggtcagcccttacgccacactggggtcccgtagatgctctttgtgcgattagggaatgctaattagaatactatctctgggctatttatgctgcatcagtcttcctgtcaaacaagttacagttgtgcttatctgtatttccgatgagaatcaggaatttttcttctgtttaatgaatttctgattggtttcaaagtattctaacataagtagccaaattgtactataggcctttaaatgaaaaaaataaaaaagtagtcccaagccgggcgcagtggctcacgcctgtaatcccagcactttcggaggccgaggcgggtggaccacctaaggtcaggagttcaagaccagcctggccaacatggtgaaaccccatctctactaaaaatacaaaaattagtcatgtgtggtggcacgtgcctgtagtcccagctactccaggaggctgaggcaggagaattgcttgaacccgggagttggaggttgcagtgacctgagattgcaccactgcactccagcctgggcaacagagtgagactctgtcttaaaaaaaaaaaaaaaaaaaaattccagacctctccttttcacccataaatccctctgcccagtgacagccactttcagctcctttcccctatgtcttctggtatttacctttggatttctaaataataatattaattgactgttattactaatctgtaatccttaggtaatacctgttatatactaggtactgttctaagtgctttacagccattagcttatttaatctcaacaacccctatgaagcagggtctattattgtttccttttaccgatgaggacacttaagcacagaaaggttaaacagtttgtacaacctcactatcattagtaggtgttaaagaacctaggtagtctagctccagaatcggtgcttgtaatcatactcccctcctgtattgtctctcattgctatttcttcgtctgtcaattttaggcattatctgttaagcttttagtatgggatatgagcatttagtcttcttacaccatcacattggcttcctttcccctttcagcttcatagtaatttaaaaataaatcagtattctgtgtttacattattataactctgaaagattcatttactatcaagccaaatagtgtagtgtgatttaatctattttcttctaaagctttttgtttttcctggagctgacaattgcattattttttcatttgcttagttttctggtattaatcactaattctttccaagccttttgagaaactataaaaccctacaattcttgcttgaacccgggaggcggaggctgcagtgagccgagatcgcaccattgcaccccagcctgggcgacagagcaagaccccatctcaaaaaacaaacaaacaaaaaacccctacagttctgtttttcacatggtcaaatgtatcagctgcactattttttttttttgagacctaaaactagggattgcctaagcctttcctttttaaaaagtcaggtttatataggtataacttgcatacagtaaaattaaccttttttaggtgtaagagttctgagaggtttgatagaatatatcaaggtatagggccagcgccgatggctcacacctgtagtcccaacaatttgggaggccaaggcgggaggatcacttaggcccaggagtttgagaccagcttgggcaacatagtgagaccctgtctctacaaaaaaaaaaaaaaaaaaggtatcaaggtacaggaaatttccactacccaacaaaggtcactcacccttttgtagttaataacttctctgcaacctagatccagccaactactgataagatgtctgtccttgtattttaccttttccagaatgttacataaatggagtcatacagtaagtaggcttttgtgtctggcttcaagcctttactttttataaagaataacaatggtaataattatagctgacatttattaaaggctgagcggatactgtatactgtgctacaggcttttcgtgggttatctcatcactgtttcacatatgtaggtatacagttctttctttaaaatatgtgactgaaaaatattattgaacattatgctaaaatttgttacactgagaagactaagaaaaacagagctcatgttttctttcaactgatttcctttttacattgtacttgagtacctggaagctgcttgcttctttccgcagctaggatacaaactccctgacagttaagtgcttctttacttcccatccagtgccttgcacagggcttggtacatggtttggtccaaaatatttgttgaataaatttgcagatagcccacgtgtgtaggagagggagagaaggttcttgaaaaatggagattggaggaatctaggatggggagggagatatgggaagggcccagacagaggcaggagggttccaacttgttcctcttccctgcagcccagtgtttcccgggctctttgagttctgctcgcgttacacaggcgcatctctgcaaggagcaacccagctgaacaacaaggtgacatagtcccgagtcctgttcttcctttcctctggatccctggactcgggatttaaccctgatcctgggctcccagcttgaggggtgggcaggaaggactgtgacttaggtgtttgtctttcagatctgtgatattgccattaactgggctggtggtctgcaccatgccaagaagtttgaggtgagtgaggaggtgatgggaaagacagtggccatcctagggtaggtgtttaggatgatggtggggggcagctgggaggggaattgctcttctctttatgagaccactgtcttgccataggcctctggcttctgctatgtcaacgacattgtgattggcatcctggagctgctcaagtaagtagcccaggaggagatgggggcagttacgggattcttggctgaggaggtctctcagtctcaaccctgaccttgacctccctcctccctgattagcttctcccaagttcttgatgctttattcaggctgcctcttccactgctgcagattccctactgcctgctcacatttcagccttctctgcatatccctctcctgtccctgcctctagcctctaggctggagcccccagttgcctttagggaactggtgacattaagtttcaggtgaccagggcagaagcagactcttcacaattcgagacccggtgtttgagaggagtgggttggggggttcacttctagctcagaccctggctttggcttccctctaggtaccaccctcgggtgctctacattgacattgacatccaccatggtgacggggttcaagaagctttctacctcactgaccgggtcatgacggtgtccttccacaaatacggaaattacttcttccctggcacaggtatgggaatagggattactttcccctttgcacccttcagctctttactatgagtgcctccttctcagccttctagtctcatctcaggtgtcccctcctcagagaagcctttccttaccactccagttatcataatcacctccttccccattcctctgttacatcagcctcattgtttccctcagaacactcactgctatttgtgtttattgtggttttttgttttgttttgtttactgcctccctcctcctcatggctattccctaagaatataagcgtggtgggatatcgtaaatttcattagttccattcgttgctgcatccctactgcctagtacacagttggctcagagtggatcccccaaaactatttgcccaatgaatgcaagctgcaagagatttagtggctctagggagtttatggtgaagctacatagatggaatgagaggctcccagagtgcagattggggctgaaacagctgggttgtgggtgcttcccatgtgtggctaccaccacccacttccctacaggtgacatgtatgaagtcggggcagagagtggccgctactactgtctgaacgtgcccctgcgggatggcattgatgaccagagtaagtaccgaagtcttccctctgttccctaggccccttctttttctccttgaaataacctcttctgcctggtattgtctgctgttgggccagttgtccttaaggatgaatggccttcagagggaccatgaatctctggaaattgtatgcaacatatcatgtgtatgtgcatttttctgggaaaagtcattggctttcatcagtcactcatagcagtctgggatcccttccagaagtttcagaccagtgatttgattcttttgggtggcccctttcctgggctacatgctcgctcaaccccctttttccttttgttccctgtctccccatccccttggggtgccaggtgcccatctttggccctctcccaggttacaagcaccttttccagccggttatcaaccaggtagtggacttctaccaacccacgtgcattgtgctccaggtaatactgtcagttcctcctcaggagtgttctgcctgggcttggggaaagagagcaagggaagaggaggttctttaggttggtggtggaaggggtatctgtgatgttctgatcagttctgatcactgcactttcctggggttttgctttttgcagtgtggagctgactctctgggctgtgatcgattgggctgctttaacctcagcatccgagggcatgggtgagacttgctctccttcttctccccaaggtttttaagtggccttggacttcagtacgtgggtgggggtagttggggaatgggcctcacctcttcttggaaatcaaaaatagctacaaattgtacttgaactagaaatgtcatcttgaacagggttccctagatggtcattcattcacgatatatttttattaagcacctgttatgttccaggcatcataccacatcatggggatggaataaggagtctcccatggagtttacagtttaggaaacagacaaaaaataaataatcaaatgaaataaatagattcttataaattctgtgaaagaaaaaaagaaagctgagacacaggatacaatgggggacctacttgagatagcatggtttcggaaagtttttctgaggaagtaaaatttgagttgagacctggagactaagaaggagtgagtcataagaggagcagagagaagcctgacccaagcatggacaaaggcccacaaaaggctctgagggctgggcccagtggcacacacctataatcccaacacttccagaggccaaggtgggagaatcgcctgaggctaggagtttgaggccagcctgggcaacatagtgagagccatctctacagaaaataaaaaacaaaatcagctgggcatgatggtgcatgcctatagtcctagctactcaggaagctgaggcaggaggatcacttgagcctaggagtttgaggttacagtgaactatgattgtgccactggacttcagtctgttgaggtgaggtccgagaagctggccatggtgagattgtgcagagcctttaaaccctggtaaggagtttgaattatattccaaagatgatgggaaaccattgaaggattttaagcaggaaagtgacatgatccaatttgtgtttgaaagtgacaattctgactgctgaatagagaaaggtttgggtaggggggatggagatggaagtagaaagaccagttaggaagccatggtgttggttaggtgcccagactaaggtggagggggtggcaatggagagaagtagatgatctgagaggtgtgtgtgtgtgtgtgtgtatatatatatatatacacacacacacacacatatatatgtttttttttttcttttttgagatggagtcttgctctgtcacccaggctggagtgcagtggcacgatcttggctcagtgcaagctctgcctcctgggttcaagcatttctcctgcctcagcctcctgagtagctgggactactacaaaggcgtgagcaccgcgccgggcgtgagttatattttcaaggctagaattgacagaacttgggttgatgagaatagttgattagcaggcagggtgccagggagggtgttgagcagaacagaggggggactgtgctttattttaaaatttttattgagacacagcatataaagtatacccaaatcttaagggtataacataatgaatttcactatcaagataaagatttagaacatttatagttttcttgtgctcctttcaggcaatacctaaaggtatttaccttgtcttttgataacctcctccacatcttcctctggttccttttaacagggaatgcgttgaatatgtcaagagcttcaatatccctctactcgtgctgggtggtggtggttatactgtccgaaatgttgcccgctgctggtgagcactctcctgatttcctcccctgttgtccagtgtgagctagggtgtccctcagatatggccacatgggtccttcagcccacttggtcagcctgctcccctctgctggttggtttcaggacatatgagacatcgctgctggtagaagaggccattagtgaggagcttccctatagtggtaaggaccaccccacaacacccccataacaggaaggccattctcaccagattccagaatgacctggtttgaaggcacatgggaaattttacactctcagagctctgcagactaaacccctgggctcagagcagggaagagattgggcagctattatgtaggtgctctggatgggaaggaaaaagattgggaagtcttgttagctgcctttctcagtctgagccatactttctcctctcctccccaagaatacttcgagtactttgccccagacttcacacttcatccagatgtcagcacccgcatcgagaatcagaactcacgccaggtcagcagctcagaaaagctgagcacaaacttctcctgaaaggtggagcccaggagaggtcaaagatgtgggaagtaggaaaaaccaaagagaaggaagttctaagccatcacagtcactgttattgactaggaggcagtccagtttaaagtagaggcagttggggttggtggggagggagagctatcagttgggggacctgaactagaggtaccactgagatgaaaaccagtatggtaggggtaaaaggcagctaggagattccatgtcctgggaatctctggaaactgctcactctgtattcctcatttccaaccagtatctggaccagatccgccagacaatctttgaaaacctgaagatgctgaaccatgcacctagtgtccagattcatgacgtgcctgcagacctcctgacctatgacaggactgatgaggctgatgcagaggagaggggtcctgaggagaactatagcaggtctgggagcagggacttcagcctactttcaataggcttgctggggaggtttaaaagggaaaaagtaaatgggaaggtattagtttaattgcctctggcttacctcctttagtctgctacaatttcctcactcttttctttgttatttttaatgacaaaagtaacacgtatttattgcaaaattttaaaacagcaccaaaatatggtgttggcgttcacacaatcccagacctattccacaggagtaaccactgttaatagtttttattgttttggatagacctttttctatagattgcaaatatactattctgtatgtacatataaacaaacacatatacactcatttacagtttgtgtggtttttggtttttcgtaaatacaaatagggtcattctacgtatgctgctttacatcatatagctgttttcagctagctaatatagatctgcttcagtattttatcagctgtataataatttactatgtggatagattattttccatttttttggtattacaataataatgtggcaatgaacccccttacattatacatctttgcattcttgtttgagtgggttagatagtagaatggttgctgctaggtcaaaggctgtgtgcattaattttttttttttttttttttttgagacagggtctcattctgtcacccaggctggagtacagtggcatgattatagctcactgcaatcttgaactcctgggttcaagcgatcctcctgcctcagcccctcgagtagctggaatcataggtgtgcaccacgacacctggctaatttttttttttttttttttttttttttttttttttggtagagacggagtcttgccttgttgcccaggctggtctcaaactcctgggctcaaatgtcctcctgccccagccttccaaagtgctgggattataggcgtgagccactgagcctggcctaaaattttttatatttgctgccaaattgccgtccagaaagtctgtagcaccctatagtcttgccagcatttttctcagtctttccaggtcttgagctggacaggtcactgcctgcgtaatactctctaaggctctttgatttctttgctctgttaattttttcgggtgggataattgcattgtggttatgttttttttttttttttaaaagtctttatctttctgagatacatacaaaatatttgtagatggaatgaattaggggggaaaaaggataggatggaatttttttttaatcccaaaactttgctgaaaaatgaaagggaaagacaacagaaccaagaagtgcagaaacagatgcacttaatggggaacagatttccttacatgactgagggataaccacagctggacacttgtgggacacgctgtcttgctcccacgcagggttagaggtttgagccggctctgctgcagagcctgatgggcttctcagccccttctagaatctgcttctgtcttagaattcaggcctccgaatctctcctctggacctgggctttactgctctgactcttggggatctctgcaactctcttcctccaaggatatcccccgatcccttctgagtgaggaagtgtctgaacatctggaagtgtctggcttcagggcttccaggactattggaaattgcttttcattgtctggtttggtttggtaaaacctgtttttaagttcttccttttgggttttttatcaatagctccaggctggcatctggacctagtctctgcattataataataccaagccctgtcacagccagcagaagcctcaggcctcttcctgttcctaagccctacctctctgtcaggccacccactgagtttctgttcttctttgatgcctatagctccagcttgcatatgacttgcagagtagaaataggaagagttaccactttttgtaggtttgccaagcaccagacactactaagtgctatctattacaacatatatatgatcattctgttgccatcagacaactctgatggctcttattttcagattaacacgggaggaatctaaggctcagagagtctaagtaactttctttctttcttttttttgagacggagtttcgctctttttgcccaggctggagtgcaatggcatgatctcagctcaccacaacctctgcctcccgggttcaagcgattctcctgccttagcctcccaagtagctggattacaggcatgagcctccacgcctggctaattttttttgtatttttagaagagatggggtttctccatgttagtcaggctggtctcgaactcctgacctcaggtgatctgcctgcctcggcctcccaaagtgctaggattacaggctacaggtgtgagccaccgcccccggcgagacttaagtaactttctgaaggtcacatggctagttaaagatcagggctgagattcaacctgattctctgactccacacctttaaccctgtgcacttagaagtaactgagacattgctcaccatgcagataaggcctttcctggcttagtgcctcagcttctctttgatgactttctcaattctctgtgtcccagagaatactttttcttttctttcttttttttttttgagatggagtctcactctgttgccaggctggagtgcagtggctaatcccggctcactgcaacctccgcctcccaggttcaagcgattctcctgcctcagcctcctcagtagctgagattacaggcatgtgccaccacacccggctaactttagtatttttagtagagacggggtttcaccatgttggccaggatggtcttgatctcttgaccttgtgatccacctgccttggcctcccaaagtgctgggattacaggtgtgagctaccacgcccggcttttgagaatactttttcaaaaagaaagaaaccaatattgagtacctgttgggccctgttttgctttcacatccattctttcactatgggtttataataccacgtcactcttcttaaaattaaaactctcctttaccttgcacttagaagaaaatccaaaattttgactgtggcttaaaaaggtcctgcatgctagcccttacctacatccaggatctcatctctaactactctcctccatgcacagtgctcccggctgtcctggcctccttgttcttactggaatacatcagtctctttccatttcatgacctctgtagttggttttcttgcagcttggaatggccttcctgaagtctttgcctgcttagctcctcctcagactttaggtcttatgtcccaatagtcctgtctgaaatttcacccttttcctctcatcaccttcagtcctatcacttcattttattaattgtactctccatcatctgaaattattatatttatttactttgttagttactagtctcatttattaggtaagctttttgaggatagacaaccttgtccagcttgttactctactgtattgctaaggtttatgacagtgtctgtatagagtagttccttaatgtttatttgatacgtgaatgggtgaatgaatagcagtctctaccaacaagaggaggagtggttctcaacggggcctgagaaatggctttggaaaagggtgctgggagaagattagaacttagagtgagatcctgacctctctccccttgctttgcaggccagaggcacccaatgagttctatgatggagaccatgacaatgacaaggaaagcgatgtggagatttaagagtggcttgggatgctgtgtcccaaggaatttcttttcacctcttggttgggctggagggaaaaggagtggctcctagagtcctgggggtcaccccagggcttttgctgactctgggaaagagtctggagaccacatttggttctcgaaccatctacctgcttttcctctctctcccaaggcctgacaatggtacctattagggatgagatacagacaaggatagctatctgggacattattggcagtgggccctggaggccagtccctagccccccttgccccttatttcttccctgcttccctcgaacccagagatttttgagggatgaacgggtagacaaggactgagattgcctctgacttcctcctcccctgggttctgacttcttcctccccttgcttccagggaagatgaagagagagagatttggaaggggctctggctccctaacacctgaatcccagatgatgggaagtatgttttcaagtgtggggaggatatgaaaatgttctgttctcacttttggctttatgtccattttaccactgtttttatccaataaactaagtcggtattttttgtaccttt

SEQ ID NO: 12345 - DNA, 1952 bp, Homo sapiens
ggtggaaaggaaaagaagtggtcttcagggggctcatttgtaataacttacctggttaatcggagtctctctactgacttaaggattgtgggatgaggggaatgctatgtttggcttcatatagtctccaggactgggttcagtatgggtggtctgagcctgtggagtggggctgaccctgcctgggttcatcttgtgtctccatcccgaggtcttcaagccataccaggcctcccaacatgacatgtgccgcttccactccgaggactacattgacttcctgcagagagtcagccccaccaatatgcaaggcttcaccaagagtcttaatgccttcaacgtaggcgatgactgcccagtgtttcccgggctctttgagttctgctcgcgttacacaggcgcatctctgcaaggagcaacccagctgaacaacaagatctgtgatattgccattaactgggctggtggtctgcaccatgccaagaagtttgaggcctctggcttctgctatgtcaacgacattgtgattggcatcctggagctgctcaagtaccaccctcgggtgctctacattgacattgacatccaccatggtgacggggttcaagaagctttctacctcactgaccgggtcatgacggtgtccttccacaaatacggaaattacttcttccctggcacaggtgacatgtatgaagtcggggcagagagtggccgctactactgtctgaacgtgcccctgcgggatggcattgatgaccagagttacaagcaccttttccagccggttatcaaccaggtagtggacttctaccaacccacgtgcattgtgctccagtgtggagctgactctctgggctgtgatcgattgggctgctttaacctcagcatccgagggcatggggaatgcgttgaatatgtcaagagcttcaatatccctctactcgtgctgggtggtggtggttatactgtccgaaatgttgcccgctgctggacatatgagacatcgctgctggtagaagaggccattagtgaggagcttccctatagtgaatacttcgagtactttgccccagacttcacacttcatccagatgtcagcacccgcatcgagaatcagaactcacgccagtatctggaccagatccgccagacaatctttgaaaacctgaagatgctgaaccatgcacctagtgtccagattcatgacgtgcctgcagacctcctgacctatgacaggactgatgaggctgatgcagaggagaggggtcctgaggagaactatagcaggccagaggcacccaatgagttctatgatggagaccatgacaatgacaaggaaagcgatgtggagatttaagagtggcttgggatgctgtgtcccaaggaatttcttttcacctcttggttgggctggagggaaaaggagtggctcctagagtcctgggggtcaccccagggcttttgctgactctgggaaagagtctggagaccacatttggttctcgaaccatctacctgcttttcctctctctcccaaggcctgacaatggtacctattagggatgagatacagacaaggatagctatctgggacattattggcagtgggccctggaggccagtccctagccccccttgccccttatttcttccctgcttccctcgaacccagagatttttgagggatgaacgggtagacaaggactgagattgcctctgacttcctcctcccctgggttctgacttcttcctccccttgcttccagggaagatgaagagagagagatttggaaggggctctggctccctaacacctgaatcccagatgatgggaagtatgttttcaagtgtggggaggatatgaaaatgttctgttctcacttttggctttatgtccattttaccactgtttttatccaataaactaagtcggtattttttgtaccttt

SEQ ID NO: 12346 - DNA, 5591 bp, Homo sapiens
aaggcttcaccaagagtcttaatgccttcaacgtaggcgatgactggtgagggaggactgggagttttgatgtctaacagtttaatgccaagcccttcagtgaggtcttttggcagcagtgggaagatctcaaggggggcctacttgtcaatgcatcataattcattttatttgtttattcaataaatatttattggtcacttgttctaggcaggccctgtgctaagtgctgggaatgcagtgatgaacaaaaacaaaattttaatatcgtatttttgctaagtcttataaagaggaggtgtatgacagattatgagagtgtatacgtggaggattgtttagcttggtggagtggctggtcggtggggccttcctagaggaagtaaagattgagctgagatctgaaaaaagagtagaagtaatcagatgaaagatggttggagggtgaggggagaagtatagcaggcagtagggacaagtgctaagggtctgtggtaggactgagtatgactcatttgaggaacagaaaaaaggccaagtgcagagtatgaagaggaggtgaactgaattgaggctaaagaaataggaccttttaaaagcaaacagctctattatgaattggggtttttacccgtagagtagagggaagctatcaaagtgttttaaaaagcaagggatcttaagagggctatgggcagttaaaaaaacaaaaaaaacaacgaaggagtggtttgatatcattaggtttacattgagcttgtatcatccatagaagagtcagggttagaccctctggggaagagagtggacaacaaagataagccacactctactctatatccatgaaaaaatagtaaccatcacagctaccagttgctcaattctacttacttttgtttttaaactttttattagggaaaatttcaaaaatttctgaaagtgaagtagtgcagtgacctcccatacgtccatcacctagcttcaacgcttatgagcaaatggccactctttttttttttttttttttttttgagacagagtctcactctgtagcccaggctggagtgcagtggtgcagtcttggctcactgcaacctctgcctcctgggttcaagcgattctcatgcctcagactcccgagtagctgggattacaggcgcctgccaccatgcctggctaatttttgtatgtttagtagagatggggtttcactatgttggtcaggctggttttgaactcctgacctcaggtgatccaccagcctcagcctccaaaagtgctgggattacagacgtgagccatcgcacccagctgagcaagtggccactcttacttcatctatactccctcatgttagattgttttaaagcagatcctagatgttatatccttttatccataaatattttattatgtatctctaaatgatactcttttaaaaaaacatagtatcattatcaaacctaaaaagttaacagtgattccttaatgtcatcaaatatgggatcaatattcaaatttctgcagttgtctcataattattttgtagctaatttaaatccagatctaaacaaggtctatacagtgcatttggttgatatgtctcttaagacttttaatttgtagcttttctgtcacccccttgaatttatttcttgaagaaaccaggttgttgatcctgtagaatttcttatgatagctaccatttactgagtgcttactctgctaggtattatgccaagggttgctggtaaatccacttaattctcataccaatccttagatgtattataatagacctttttctgatgttatatataagtaaattgaggtttgggaatatctaggtaacttagccgtagtcacataactggtcattggagggggcatgatccagatcccgggtttttaaaccactaatctgttttcctgaaagatcttaatgacagaagcagccagggctgtaggatagaggccaactcattaggctggcattggcacctttccaactttatccctacacctcagctgcacaggatgccttcctggaatgcccttagttctctattcaacctcttcaaggccttctcagccttcacaccatctccatgaaacctttcttgaccacaccagcccatagagctctgtcttgcacacactgcactgctcatttggtgttcagtcacatgctgtttggggaggtttcttgtttttttgttagtattcctgctgttatttctgagctcactttctagctctgtgaatacagggtcagcccttacgccacactggggtcccgtagatgctctttgtgcgattagggaatgctaattagaatactatctctgggctatttatgctgcatcagtcttcctgtcaaacaagttacagttgtgcttatctgtatttccgatgagaatcaggaatttttcttctgtttaatgaatttctgattggtttcaaagtattctaacataagtagccaaattgtactataggcctttaaatgaaaaaaataaaaaagtagtcccaagccgggcgcagtggctcacgcctgtaatcccagcactttcggaggccgaggcgggtggaccacctaaggtcaggagttcaagaccagcctggccaacatggtgaaaccccatctctactaaaaatacaaaaattagtcatgtgtggtggcacgtgcctgtagtcccagctactccaggaggctgaggcaggagaattgcttgaacccgggagttggaggttgcagtgacctgagattgcaccactgcactccagcctgggcaacagagtgagactctgtcttaaaaaaaaaaaaaaaaaaaaattccagacctctccttttcacccataaatccctctgcccagtgacagccactttcagctcctttcccctatgtcttctggtatttacctttggatttctaaataataatattaattgactgttattactaatctgtaatccttaggtaatacctgttatatactaggtactgttctaagtgctttacagccattagcttatttaatctcaacaacccctatgaagcagggtctattattgtttccttttaccgatgaggacacttaagcacagaaaggttaaacagtttgtacaacctcactatcattagtaggtgttaaagaacctaggtagtctagctccagaatcggtgcttgtaatcatactcccctcctgtattgtctctcattgctatttcttcgtctgtcaattttaggcattatctgttaagcttttagtatgggatatgagcatttagtcttcttacaccatcacattggcttcctttcccctttcagcttcatagtaatttaaaaataaatcagtattctgtgtttacattattataactctgaaagattcatttactatcaagccaaatagtgtagtgtgatttaatctattttcttctaaagctttttgtttttcctggagctgacaattgcattattttttcatttgcttagttttctggtattaatcactaattctttccaagccttttgagaaactataaaaccctacaattcttgcttgaacccgggaggcggaggctgcagtgagccgagatcgcaccattgcaccccagcctgggcgacagagcaagaccccatctcaaaaaacaaacaaacaaaaaacccctacagttctgtttttcacatggtcaaatgtatcagctgcactattttttttttttgagacctaaaactagggattgcctaagcctttcctttttaaaaagtcaggtttatataggtataacttgcatacagtaaaattaaccttttttaggtgtaagagttctgagaggtttgatagaatatatcaaggtatagggccagcgccgatggctcacacctgtagtcccaacaatttgggaggccaaggcgggaggatcacttaggcccaggagtttgagaccagcttgggcaacatagtgagaccctgtctctacaaaaaaaaaaaaaaaaaaggtatcaaggtacaggaaatttccactacccaacaaaggtcactcacccttttgtagttaataacttctctgcaacctagatccagccaactactgataagatgtctgtccttgtattttaccttttccagaatgttacataaatggagtcatacagtaagtaggcttttgtgtctggcttcaagcctttactttttataaagaataacaatggtaataattatagctgacatttattaaaggctgagcggatactgtatactgtgctacaggcttttcgtgggttatctcatcactgtttcacatatgtaggtatacagttctttctttaaaatatgtgactgaaaaatattattgaacattatgctaaaatttgttacactgagaagactaagaaaaacagagctcatgttttctttcaactgatttcctttttacattgtacttgagtacctggaagctgcttgcttctttccgcagctaggatacaaactccctgacagttaagtgcttctttacttcccatccagtgccttgcacagggcttggtacatggtttggtccaaaatatttgttgaataaatttgcagatagcccacgtgtgtaggagagggagagaaggttcttgaaaaatggagattggaggaatctaggatggggagggagatatgggaagggcccagacagaggcaggagggttccaacttgttcctcttccctgcagcccagtgtttcccgggctctttgagttctgctcgcgttacacaggcgcatctctgcaaggagcaacccagctgaacaacaaggtgacatagtcccgagtcctgttcttcctttcctctggatccctggactcgggatttaaccctgatcctgggctcccagcttgaggggtgggcaggaaggactgtgacttaggtgtttgtctttcagatctgtgatattgccattaactgggctggtggtctgcaccatgccaagaagtttgaggtgagtgaggaggtgatgggaaagacagtggccatcctagggtaggtgtttaggatgatggtggggggcagctgggaggggaattgctcttctctttatgagaccactgtcttgccataggcctctggcttctgctatgtcaacgacattgtgattggcatcctggagctgctcaagtaagtagcccaggaggagatgggggcagttacgggattcttggctgaggaggtctctcagtctcaaccctgaccttgacctccctcctccctgattagcttctcccaagttcttgatgctttattcaggctgcctcttccactgctgcagattccctactgcctgctcacatttcagccttctctgcatatccctctcctgtccctgcctctagcctctaggctggagcccccagttgcctttagggaactggtgacattaagtttcaggtgaccagggcagaagcagactcttcacaattcgagacccggtgtttgagaggagtgggttggggggttcacttctagctcagaccctggctttggcttccctctaggtaccaccctcgggtgctctacattgacattgacatccacc

SEQ ID NO: 12347 - DNA, 529 bp, Homo sapiens
aaggcttcaccaagagtcttaatgccttcaacgtaggcgatgactgcccagtgtttcccgggctctttgagttctgctcgcgttacacaggcgcatctctgcaaggagcaacccagctgaacaacaaggtgacatagtcccgagtcctgttcttcctttcctctggatccctggactcgggatttaaccctgatcctgggctcccagcttgaggggtgggcaggaaggactgtgacttaggtgtttgtctttcagatctgtgatattgccattaactgggctggtggtctgcaccatgccaagaagtttgaggtgagtgaggaggtgatgggaaagacagtggccatcctagggtaggtgtttaggatgatggtggggggcagctgggaggggaattgctcttctctttatgagaccactgtcttgccataggcctctggcttctgctatgtcaacgacattgtgattggcatcctggagctgctcaagtaccaccctcgggtgctctacattgacattgacatccacc

SEQ ID NO: 12348 - DNA, 419 bp, Homo sapiens
gtatacccaaatcttaagggtataacataatgaatttcactatcaagataaagatttagaacatttatagttttcttgtgctcctttcaggcaatacctaaaggtatttaccttgtcttttgataacctcctccacatcttcctctggttccttttaacagggaatgcgttgaatatgtcaagagcttcaatatccctctactcgtgctgggtggtggtggttatactgtccgaaatgttgcccgctgctggtgagcactctcctgatttcctcccctgttgtccagtgtgagctagggtgtccctcagatatggccacatgggtccttcagcccacttggtcagcctgctcccctctgctggttggtttcaggacatatgagacatcgctgctggtagaagaggccattagtgaggag

SEQ ID NO: 12349 - DNA, 297 bp, Homo sapiens
gtatacccaaatcttaagggtataacataatgaatttcactatcaagataaagatttagaacatttatagttttcttgtgctcctttcaggcaatacctaaaggtatttaccttgtcttttgataacctcctccacatcttcctctggttccttttaacagggaatgcgttgaatatgtcaagagcttcaatatccctctactcgtgctgggtggtggtggttatactgtccgaaatgttgcccgctgctggacatatgagacatcgctgctggtagaagaggccattagtgaggag

SEQ ID NO: 12350 - DNA, 1326 bp, Homo sapiens
gtcatgacggtgtccttccacaaatacggaaattacttcttccctggcacaggtatgggaatagggattactttcccctttgcacccttcagctctttactatgagtgcctccttctcagccttctagtctcatctcaggtgtcccctcctcagagaagcctttccttaccactccagttatcataatcacctccttccccattcctctgttacatcagcctcattgtttccctcagaacactcactgctatttgtgtttattgtggttttttgttttgttttgtttactgcctccctcctcctcatggctattccctaagaatataagcgtggtgggatatcgtaaatttcattagttccattcgttgctgcatccctactgcctagtacacagttggctcagagtggatcccccaaaactatttgcccaatgaatgcaagctgcaagagatttagtggctctagggagtttatggtgaagctacatagatggaatgagaggctcccagagtgcagattggggctgaaacagctgggttgtgggtgcttcccatgtgtggctaccaccacccacttccctacaggtgacatgtatgaagtcggggcagagagtggccgctactactgtctgaacgtgcccctgcgggatggcattgatgaccagagtaagtaccgaagtcttccctctgttccctaggccccttctttttctccttgaaataacctcttctgcctggtattgtctgctgttgggccagttgtccttaaggatgaatggccttcagagggaccatgaatctctggaaattgtatgcaacatatcatgtgtatgtgcatttttctgggaaaagtcattggctttcatcagtcactcatagcagtctgggatcccttccagaagtttcagaccagtgatttgattcttttgggtggcccctttcctgggctacatgctcgctcaaccccctttttccttttgttccctgtctccccatccccttggggtgccaggtgcccatctttggccctctcccaggttacaagcaccttttccagccggttatcaaccaggtagtggacttctaccaacccacgtgcattgtgctccaggtaatactgtcagttcctcctcaggagtgttctgcctgggcttggggaaagagagcaagggaagaggaggttctttaggttggtggtggaaggggtatctgtgatgttctgatcagttctgatcactgcactttcctggggttttgctttttgcagtgtggagctgactctctgggctgtgatcgattgggctgctttaacctcagcatccgagg

SEQ ID NO: 12351 - DNA, 422 bp, Homo sapiens
gtcatgacggtgtccttccacaaatacggaaattacttcttccctggcacaggtgacatgtatgaagtcggggcagagagtggccgctactactgtctgaacgtgcccctgcgggatggcattgatgaccagagttacaagcaccttttccagccggttatcaaccaggtagtggacttctaccaacccacgtgcattgtgctccaggtaatactgtcagttcctcctcaggagtgttctgcctgggcttggggaaagagagcaagggaagaggaggttctttaggttggtggtggaaggggtatctgtgatgttctgatcagttctgatcactgcactttcctggggttttgctttttgcagtgtggagctgactctctgggctgtgatcgattgggctgctttaacctcagcatccgagg

SEQ ID NO: 12352 - DNA, 1278 bp, Homo sapiens
gtgctttattttaaaatttttattgagacacagcatataaagtatacccaaatcttaagggtataacataatgaatttcactatcaagataaagatttagaacatttatagttttcttgtgctcctttcaggcaatacctaaaggtatttaccttgtcttttgataacctcctccacatcttcctctggttccttttaacagggaatgcgttgaatatgtcaagagcttcaatatccctctactcgtgctgggtggtggtggttatactgtccgaaatgttgcccgctgctggtgagcactctcctgatttcctcccctgttgtccagtgtgagctagggtgtccctcagatatggccacatgggtccttcagcccacttggtcagcctgctcccctctgctggttggtttcaggacatatgagacatcgctgctggtagaagaggccattagtgaggagcttccctatagtggtaaggaccaccccacaacacccccataacaggaaggccattctcaccagattccagaatgacctggtttgaaggcacatgggaaattttacactctcagagctctgcagactaaacccctgggctcagagcagggaagagattgggcagctattatgtaggtgctctggatgggaaggaaaaagattgggaagtcttgttagctgcctttctcagtctgagccatactttctcctctcctccccaagaatacttcgagtactttgccccagacttcacacttcatccagatgtcagcacccgcatcgagaatcagaactcacgccaggtcagcagctcagaaaagctgagcacaaacttctcctgaaaggtggagcccaggagaggtcaaagatgtgggaagtaggaaaaaccaaagagaaggaagttctaagccatcacagtcactgttattgactaggaggcagtccagtttaaagtagaggcagttggggttggtggggagggagagctatcagttgggggacctgaactagaggtaccactgagatgaaaaccagtatggtaggggtaaaaggcagctaggagattccatgtcctgggaatctctggaaactgctcactctgtattcctcatttccaaccagtatctggaccagatccgccagacaatctttgaaaacctgaagatgctgaaccatgcacctagtgtccagattcatgacgtgcctgcagacctcctgacctatgacaggactgatgaggctgatgcagaggagaggggtcctgaggagaactatagcag

SEQ ID NO: 12353 - DNA, 711 bp, Homo sapiens
gtgctttattttaaaatttttattgagacacagcatataaagtatacccaaatcttaagggtataacataatgaatttcactatcaagataaagatttagaacatttatagttttcttgtgctcctttcaggcaatacctaaaggtatttaccttgtcttttgataacctcctccacatcttcctctggttccttttaacagggaatgcgttgaatatgtcaagagcttcaatatccctctactcgtgctgggtggtggtggttatactgtccgaaatgttgcccgctgctggtgagcactctcctgatttcctcccctgttgtccagtgtgagctagggtgtccctcagatatggccacatgggtccttcagcccacttggtcagcctgctcccctctgctggttggtttcaggacatatgagacatcgctgctggtagaagaggccattagtgaggagcttccctatagtgaatacttcgagtactttgccccagacttcacacttcatccagatgtcagcacccgcatcgagaatcagaactcacgccagtatctggaccagatccgccagacaatctttgaaaacctgaagatgctgaaccatgcacctagtgtccagattcatgacgtgcctgcagacctcctgacctatgacaggactgatgaggctgatgcagaggagaggggtcctgaggagaactatagcag

SEQ ID NO: 12354 - DNA, 1138 bp, Homo sapiens
taggcctctggcttctgctatgtcaacgacattgtgattggcatcctggagctgctcaagtaagtagcccaggaggagatgggggcagttacgggattcttggctgaggaggtctctcagtctcaaccctgaccttgacctccctcctccctgattagcttctcccaagttcttgatgctttattcaggctgcctcttccactgctgcagattccctactgcctgctcacatttcagccttctctgcatatccctctcctgtccctgcctctagcctctaggctggagcccccagttgcctttagggaactggtgacattaagtttcaggtgaccagggcagaagcagactcttcacaattcgagacccggtgtttgagaggagtgggttggggggttcacttctagctcagaccctggctttggcttccctctaggtaccaccctcgggtgctctacattgacattgacatccaccatggtgacggggttcaagaagctttctacctcactgaccgggtcatgacggtgtccttccacaaatacggaaattacttcttccctggcacaggtatgggaatagggattactttcccctttgcacccttcagctctttactatgagtgcctccttctcagccttctagtctcatctcaggtgtcccctcctcagagaagcctttccttaccactccagttatcataatcacctccttccccattcctctgttacatcagcctcattgtttccctcagaacactcactgctatttgtgtttattgtggttttttgttttgttttgtttactgcctccctcctcctcatggctattccctaagaatataagcgtggtgggatatcgtaaatttcattagttccattcgttgctgcatccctactgcctagtacacagttggctcagagtggatcccccaaaactatttgcccaatgaatgcaagctgcaagagatttagtggctctagggagtttatggtgaagctacatagatggaatgagaggctcccagagtgcagattggggctgaaacagctgggttgtgggtgcttcccatgtgtggctaccaccacccacttccctacaggtgacatgtatgaagtcggggcagagagtggccgc

SEQ ID NO: 12355 - DNA, 605 bp, Homo sapiens
taggcctctggcttctgctatgtcaacgacattgtgattggcatcctggagctgctcaagtaagtagcccaggaggagatgggggcagttacgggattcttggctgaggaggtctctcagtctcaaccctgaccttgacctccctcctccctgattagcttctcccaagttcttgatgctttattcaggctgcctcttccactgctgcagattccctactgcctgctcacatttcagccttctctgcatatccctctcctgtccctgcctctagcctctaggctggagcccccagttgcctttagggaactggtgacattaagtttcaggtgaccagggcagaagcagactcttcacaattcgagacccggtgtttgagaggagtgggttggggggttcacttctagctcagaccctggctttggcttccctctaggtaccaccctcgggtgctctacattgacattgacatccaccatggtgacggggttcaagaagctttctacctcactgaccgggtcatgacggtgtccttccacaaatacggaaattacttcttccctggcacaggtgacatgtatgaagtcggggcagagagtggccgc

SEQ ID NO: 12356 - DNA, 3075 bp, Homo sapiens
tgtgatcgattgggctgctttaacctcagcatccgagggcatgggtgagacttgctctccttcttctccccaaggtttttaagtggccttggacttcagtacgtgggtgggggtagttggggaatgggcctcacctcttcttggaaatcaaaaatagctacaaattgtacttgaactagaaatgtcatcttgaacagggttccctagatggtcattcattcacgatatatttttattaagcacctgttatgttccaggcatcataccacatcatggggatggaataaggagtctcccatggagtttacagtttaggaaacagacaaaaaataaataatcaaatgaaataaatagattcttataaattctgtgaaagaaaaaaagaaagctgagacacaggatacaatgggggacctacttgagatagcatggtttcggaaagtttttctgaggaagtaaaatttgagttgagacctggagactaagaaggagtgagtcataagaggagcagagagaagcctgacccaagcatggacaaaggcccacaaaaggctctgagggctgggcccagtggcacacacctataatcccaacacttccagaggccaaggtgggagaatcgcctgaggctaggagtttgaggccagcctgggcaacatagtgagagccatctctacagaaaataaaaaacaaaatcagctgggcatgatggtgcatgcctatagtcctagctactcaggaagctgaggcaggaggatcacttgagcctaggagtttgaggttacagtgaactatgattgtgccactggacttcagtctgttgaggtgaggtccgagaagctggccatggtgagattgtgcagagcctttaaaccctggtaaggagtttgaattatattccaaagatgatgggaaaccattgaaggattttaagcaggaaagtgacatgatccaatttgtgtttgaaagtgacaattctgactgctgaatagagaaaggtttgggtaggggggatggagatggaagtagaaagaccagttaggaagccatggtgttggttaggtgcccagactaaggtggagggggtggcaatggagagaagtagatgatctgagaggtgtgtgtgtgtgtgtgtgtatatatatatatatacacacacacacacacatatatatgtttttttttttcttttttgagatggagtcttgctctgtcacccaggctggagtgcagtggcacgatcttggctcagtgcaagctctgcctcctgggttcaagcatttctcctgcctcagcctcctgagtagctgggactactacaaaggcgtgagcaccgcgccgggcgtgagttatattttcaaggctagaattgacagaacttgggttgatgagaatagttgattagcaggcagggtgccagggagggtgttgagcagaacagaggggggactgtgctttattttaaaatttttattgagacacagcatataaagtatacccaaatcttaagggtataacataatgaatttcactatcaagataaagatttagaacatttatagttttcttgtgctcctttcaggcaatacctaaaggtatttaccttgtcttttgataacctcctccacatcttcctctggttccttttaacagggaatgcgttgaatatgtcaagagcttcaatatccctctactcgtgctgggtggtggtggttatactgtccgaaatgttgcccgctgctggtgagcactctcctgatttcctcccctgttgtccagtgtgagctagggtgtccctcagatatggccacatgggtccttcagcccacttggtcagcctgctcccctctgctggttggtttcaggacatatgagacatcgctgctggtagaagaggccattagtgaggagcttccctatagtggtaaggaccaccccacaacacccccataacaggaaggccattctcaccagattccagaatgacctggtttgaaggcacatgggaaattttacactctcagagctctgcagactaaacccctgggctcagagcagggaagagattgggcagctattatgtaggtgctctggatgggaaggaaaaagattgggaagtcttgttagctgcctttctcagtctgagccatactttctcctctcctccccaagaatacttcgagtactttgccccagacttcacacttcatccagatgtcagcacccgcatcgagaatcagaactcacgccaggtcagcagctcagaaaagctgagcacaaacttctcctgaaaggtggagcccaggagaggtcaaagatgtgggaagtaggaaaaaccaaagagaaggaagttctaagccatcacagtcactgttattgactaggaggcagtccagtttaaagtagaggcagttggggttggtggggagggagagctatcagttgggggacctgaactagaggtaccactgagatgaaaaccagtatggtaggggtaaaaggcagctaggagattccatgtcctgggaatctctggaaactgctcactctgtattcctcatttccaaccagtatctggaccagatccgccagacaatctttgaaaacctgaagatgctgaaccatgcacctagtgtccagattcatgacgtgcctgcagacctcctgacctatgacaggactgatgaggctgatgcagaggagaggggtcctgaggagaactatagcaggtctgggagcagggacttcagcctactttcaataggcttgctggggaggtttaaaagggaaaaagtaaatgggaaggtattagtttaattgcctctggcttacctcctttagtctgctacaatttcctcactcttttctttgttatttttaatgacaaaagtaacacgtatttattgcaaaattttaaaacagcaccaaaatatggtgttggcgttcacacaatcccagacctattccacaggagtaaccactgttaatagtttttattgttttggatagacctttttctatagattgcaaatatactattctgtatgtacatataaacaaacacatatacactca

SEQ ID NO: 12357 - DNA, 777 bp, Homo sapiens
tgtgatcgattgggctgctttaacctcagcatccgagggcatggggaatgcgttgaatatgtcaagagcttcaatatccctctactcgtgctgggtggtggtggttatactgtccgaaatgttgcccgctgctggacatatgagacatcgctgctggtagaagaggccattagtgaggagcttccctatagtgaatacttcgagtactttgccccagacttcacacttcatccagatgtcagcacccgcatcgagaatcagaactcacgccagtatctggaccagatccgccagacaatctttgaaaacctgaagatgctgaaccatgcacctagtgtccagattcatgacgtgcctgcagacctcctgacctatgacaggactgatgaggctgatgcagaggagaggggtcctgaggagaactatagcaggtctgggagcagggacttcagcctactttcaataggcttgctggggaggtttaaaagggaaaaagtaaatgggaaggtattagtttaattgcctctggcttacctcctttagtctgctacaatttcctcactcttttctttgttatttttaatgacaaaagtaacacgtatttattgcaaaattttaaaacagcaccaaaatatggtgttggcgttcacacaatcccagacctattccacaggagtaaccactgttaatagtttttattgttttggatagacctttttctatagattgcaaatatactattctgtatgtacatataaacaaacacatatacactca

SEQ ID NO: 12358 - DNA, 3509 bp, Homo sapiens
cggggttcaagaagctttctacctcactgaccgggtcatgacggtgtccttccacaaatacggaaattacttcttccctggcacaggtatgggaatagggattactttcccctttgcacccttcagctctttactatgagtgcctccttctcagccttctagtctcatctcaggtgtcccctcctcagagaagcctttccttaccactccagttatcataatcacctccttccccattcctctgttacatcagcctcattgtttccctcagaacactcactgctatttgtgtttattgtggttttttgttttgttttgtttactgcctccctcctcctcatggctattccctaagaatataagcgtggtgggatatcgtaaatttcattagttccattcgttgctgcatccctactgcctagtacacagttggctcagagtggatcccccaaaactatttgcccaatgaatgcaagctgcaagagatttagtggctctagggagtttatggtgaagctacatagatggaatgagaggctcccagagtgcagattggggctgaaacagctgggttgtgggtgcttcccatgtgtggctaccaccacccacttccctacaggtgacatgtatgaagtcggggcagagagtggccgctactactgtctgaacgtgcccctgcgggatggcattgatgaccagagtaagtaccgaagtcttccctctgttccctaggccccttctttttctccttgaaataacctcttctgcctggtattgtctgctgttgggccagttgtccttaaggatgaatggccttcagagggaccatgaatctctggaaattgtatgcaacatatcatgtgtatgtgcatttttctgggaaaagtcattggctttcatcagtcactcatagcagtctgggatcccttccagaagtttcagaccagtgatttgattcttttgggtggcccctttcctgggctacatgctcgctcaaccccctttttccttttgttccctgtctccccatccccttggggtgccaggtgcccatctttggccctctcccaggttacaagcaccttttccagccggttatcaaccaggtagtggacttctaccaacccacgtgcattgtgctccaggtaatactgtcagttcctcctcaggagtgttctgcctgggcttggggaaagagagcaagggaagaggaggttctttaggttggtggtggaaggggtatctgtgatgttctgatcagttctgatcactgcactttcctggggttttgctttttgcagtgtggagctgactctctgggctgtgatcgattgggctgctttaacctcagcatccgagggcatgggtgagacttgctctccttcttctccccaaggtttttaagtggccttggacttcagtacgtgggtgggggtagttggggaatgggcctcacctcttcttggaaatcaaaaatagctacaaattgtacttgaactagaaatgtcatcttgaacagggttccctagatggtcattcattcacgatatatttttattaagcacctgttatgttccaggcatcataccacatcatggggatggaataaggagtctcccatggagtttacagtttaggaaacagacaaaaaataaataatcaaatgaaataaatagattcttataaattctgtgaaagaaaaaaagaaagctgagacacaggatacaatgggggacctacttgagatagcatggtttcggaaagtttttctgaggaagtaaaatttgagttgagacctggagactaagaaggagtgagtcataagaggagcagagagaagcctgacccaagcatggacaaaggcccacaaaaggctctgagggctgggcccagtggcacacacctataatcccaacacttccagaggccaaggtgggagaatcgcctgaggctaggagtttgaggccagcctgggcaacatagtgagagccatctctacagaaaataaaaaacaaaatcagctgggcatgatggtgcatgcctatagtcctagctactcaggaagctgaggcaggaggatcacttgagcctaggagtttgaggttacagtgaactatgattgtgccactggacttcagtctgttgaggtgaggtccgagaagctggccatggtgagattgtgcagagcctttaaaccctggtaaggagtttgaattatattccaaagatgatgggaaaccattgaaggattttaagcaggaaagtgacatgatccaatttgtgtttgaaagtgacaattctgactgctgaatagagaaaggtttgggtaggggggatggagatggaagtagaaagaccagttaggaagccatggtgttggttaggtgcccagactaaggtggagggggtggcaatggagagaagtagatgatctgagaggtgtgtgtgtgtgtgtgtgtatatatatatatatacacacacacacacacatatatatgtttttttttttcttttttgagatggagtcttgctctgtcacccaggctggagtgcagtggcacgatcttggctcagtgcaagctctgcctcctgggttcaagcatttctcctgcctcagcctcctgagtagctgggactactacaaaggcgtgagcaccgcgccgggcgtgagttatattttcaaggctagaattgacagaacttgggttgatgagaatagttgattagcaggcagggtgccagggagggtgttgagcagaacagaggggggactgtgctttattttaaaatttttattgagacacagcatataaagtatacccaaatcttaagggtataacataatgaatttcactatcaagataaagatttagaacatttatagttttcttgtgctcctttcaggcaatacctaaaggtatttaccttgtcttttgataacctcctccacatcttcctctggttccttttaacagggaatgcgttgaatatgtcaagagcttcaatatccctctactcgtgctgggtggtggtggttatactgtccgaaatgttgcccgctgctggtgagcactctcctgatttcctcccctgttgtccagtgtgagctagggtgtccctcagatatggccacatgggtccttcagcccacttggtcagcctgctcccctctgctggttggtttcaggacatatgagacatcgctgctggtagaagaggccattagtgaggagcttccctatagtggtaaggaccaccccacaacacccccataacaggaaggccattctcaccagattccagaatgacctggtttgaaggcacatgggaaattttacactctcagagctctgcagactaaacccctgggctcagagcagggaagagattgggcagctattatgtaggtgctctggatgggaaggaaaaagattgggaagtcttgttagctgcctttctcagtctgagccatactttctcctctcctccccaagaatacttcgagtact

SEQ ID NO: 12359 - DNA, 782 bp, Homo sapiens
cggggttcaagaagctttctacctcactgaccgggtcatgacggtgtccttccacaaatacggaaattacttcttccctggcacaggtgacatgtatgaagtcggggcagagagtggccgctactactgtctgaacgtgcccctgcgggatggcattgatgaccagagtaagtaccgaagtcttccctctgttccctaggccccttctttttctccttgaaataacctcttctgcctggtattgtctgctgttgggccagttgtccttaaggatgaatggccttcagagggaccatgaatctctggaaattgtatgcaacatatcatgtgtatgtgcatttttctgggaaaagtcattggctttcatcagtcactcatagcagtctgggatcccttccagaagtttcagaccagtgatttgattcttttgggtggcccctttcctgggctacatgctcgctcaaccccctttttccttttgttccctgtctccccatccccttggggtgccaggtgcccatctttggccctctcccaggttacaagcaccttttccagccggttatcaaccaggtagtggacttctaccaacccacgtgcattgtgctccagtgtggagctgactctctgggctgtgatcgattgggctgctttaacctcagcatccgagggcatggggaatgcgttgaatatgtcaagagcttcaatatccctctactcgtgctgggtggtggtggttatactgtccgaaatgttgcccgctgctgaatacttcgagtact

SEQ ID NO: 12360 - DNA, 935 bp, Homo sapiens
ggcggccgcgggcggcgggcggcggaggtgcggggcctgctcccgccggcaccatggccaagaccgtggcctatttctacgaccccgacgtgggcaacttccactacggtgaggaaacagggatatgcatgaggggttgggacacggaggttttgaggcggggttgcaactccaggggtgagagctgacgaactctcttctccccacccccaggagctggacaccctatgaagccccatcgcctggcattgacccatagcctggtcctgcattacggtctctataagaagatgatcgtgagttccgccgcctcggccgggggttggggggtggggcgagctgtggccgtagggataggtgggctggactgagtgcatgaagtgcgacccgcccctagagtatcggggagctggatagaagtcaccaggagtaccttgaaagtgcagggtgttgggggtggcgtcctctgcttaatggaaagtactttctcacctcaggtcggccaccctctgactgtaggcacactagcccttggcctagggttagcgtgatgtggggctggtttgaagacagaaggtgtgttcctcctctgcattttagagtgtggatagggccttggcctcaggaattagggttaggggagcggatatcactgtatcagggtgtgaggtttaccctcagttcccactcctcttttaccacctttctttacctccaaggagctagggctccagggtggaacgatgctgccgtctttgtaaatgtgtatgtgcgtgtggaacagaggcgatattttagatattcctttttcagcctggaatacctctacatggttctgcttaatcgctatccagtttttcatctaccagacatacacatgctgtcttcccagcttggaatttatggctgtgatatgggatagtaacagttaagcc

SEQ ID NO: 12361 - DNA, 830 bp, Homo sapiens
ggcggccgcgggcggcgggcggcggaggtgcggggcctgctcccgccggcaccatggccaagaccgtggcctatttctacgaccccgacgtgggcaacttccactacggagctggacaccctatgaagccccatcgcctggcattgacccatagcctggtcctgcattacggtctctataagaagatgatcgtgagttccgccgcctcggccgggggttggggggtggggcgagctgtggccgtagggataggtgggctggactgagtgcatgaagtgcgacccgcccctagagtatcggggagctggatagaagtcaccaggagtaccttgaaagtgcagggtgttgggggtggcgtcctctgcttaatggaaagtactttctcacctcaggtcggccaccctctgactgtaggcacactagcccttggcctagggttagcgtgatgtggggctggtttgaagacagaaggtgtgttcctcctctgcattttagagtgtggatagggccttggcctcaggaattagggttaggggagcggatatcactgtatcagggtgtgaggtttaccctcagttcccactcctcttttaccacctttctttacctccaaggagctagggctccagggtggaacgatgctgccgtctttgtaaatgtgtatgtgcgtgtggaacagaggcgatattttagatattcctttttcagcctggaatacctctacatggttctgcttaatcgctatccagtttttcatctaccagacatacacatgctgtcttcccagcttggaatttatggctgtgatatgggatagtaacagttaagcc

SEQ ID NO: 12362 - DNA, 8267 bp, Homo sapiens
gcggcggaggtgcggggcctgctcccgccggcaccatggccaagaccgtggcctatttctacgaccccgacgtgggcaacttccactacggtgaggaaacagggatatgcatgaggggttgggacacggaggttttgaggcggggttgcaactccaggggtgagagctgacgaactctcttctccccacccccaggagctggacaccctatgaagccccatcgcctggcattgacccatagcctggtcctgcattacggtctctataagaagatgatcgtgagttccgccgcctcggccgggggttggggggtggggcgagctgtggccgtagggataggtgggctggactgagtgcatgaagtgcgacccgcccctagagtatcggggagctggatagaagtcaccaggagtaccttgaaagtgcagggtgttgggggtggcgtcctctgcttaatggaaagtactttctcacctcaggtcggccaccctctgactgtaggcacactagcccttggcctagggttagcgtgatgtggggctggtttgaagacagaaggtgtgttcctcctctgcattttagagtgtggatagggccttggcctcaggaattagggttaggggagcggatatcactgtatcagggtgtgaggtttaccctcagttcccactcctcttttaccacctttctttacctccaaggagctagggctccagggtggaacgatgctgccgtctttgtaaatgtgtatgtgcgtgtggaacagaggcgatattttagatattcctttttcagcctggaatacctctacatggttctgcttaatcgctatccagtttttcatctaccagacatacacatgctgtcttcccagcttggaatttatggctgtgatatgggatagtaacagttaagccacgccaggcgtggtggcccatgcctgtaatcccagcactttgggaggttgaaatgggggggatcgcttgaggccaggagttggagaccagcttgggccacagtgggacccacatctacaaaaaataaaaataaaaaaagtagccatgtgcggtgggtgtgcctgtagtcccaactacttgggaggccgaggcgagaggatggcttgggcccaggagtttaaagttacagtgatctatgatcagcagcctgagttgacagggaggaccttgtctcaaaagaaaaaataagacaaaacagctaaacccaggctttatgtgttgctagggaaactagtgaacaatatgaatgaatgttcattgcttgtgccaaggcacagacaaatggactggtcatagaaaagactgaggtgatgttagtgcaggaatctatatcccttgagattgtttgcctgtatgtacctgtgtgcattttctgggagaagaaaagctctttcttgtgcagttttcaaagaggtgtgacacatccccctgaccttccaaagataataaatctttgattttaattagaaagttgacatatatcccatatatttgactccagaaagaagaatccagaggaaagaggacagaatcagagcttgggggaggagatgagcatggagagaactgggaataggagattccaaggaacagggcaggtggatcagggctcaaagttgagaaggtacgataggctgagctggaggtggaaaggaaaagaagtggtcttcagggggctcatttgtaataacttacctggttaatcggagtctctctactgacttaaggattgtgggatgaggggaatgctatgtttggcttcatatagtctccaggactgggttcagtatgggtggtctgagcctgtggagtggggctgaccctgcctgggttcatcttgtgtctccatcccgaggtcttcaagccataccaggcctcccaacatgacatgtgccgcttccactccgaggactacattgacttcctgcagagagtcagccccaccaatatgcaaggcttcaccaagagtcttaatgccttcaacgtaggcgatgactggtgagggaggactgggagttttgatgtctaacagtttaatgccaagcccttcagtgaggtcttttggcagcagtgggaagatctcaaggggggcctacttgtcaatgcatcataattcattttatttgtttattcaataaatatttattggtcacttgttctaggcaggccctgtgctaagtgctgggaatgcagtgatgaacaaaaacaaaattttaatatcgtatttttgctaagtcttataaagaggaggtgtatgacagattatgagagtgtatacgtggaggattgtttagcttggtggagtggctggtcggtggggccttcctagaggaagtaaagattgagctgagatctgaaaaaagagtagaagtaatcagatgaaagatggttggagggtgaggggagaagtatagcaggcagtagggacaagtgctaagggtctgtggtaggactgagtatgactcatttgaggaacagaaaaaaggccaagtgcagagtatgaagaggaggtgaactgaattgaggctaaagaaataggaccttttaaaagcaaacagctctattatgaattggggtttttacccgtagagtagagggaagctatcaaagtgttttaaaaagcaagggatcttaagagggctatgggcagttaaaaaaacaaaaaaaacaacgaaggagtggtttgatatcattaggtttacattgagcttgtatcatccatagaagagtcagggttagaccctctggggaagagagtggacaacaaagataagccacactctactctatatccatgaaaaaatagtaaccatcacagctaccagttgctcaattctacttacttttgtttttaaactttttattagggaaaatttcaaaaatttctgaaagtgaagtagtgcagtgacctcccatacgtccatcacctagcttcaacgcttatgagcaaatggccactctttttttttttttttttttttttgagacagagtctcactctgtagcccaggctggagtgcagtggtgcagtcttggctcactgcaacctctgcctcctgggttcaagcgattctcatgcctcagactcccgagtagctgggattacaggcgcctgccaccatgcctggctaatttttgtatgtttagtagagatggggtttcactatgttggtcaggctggttttgaactcctgacctcaggtgatccaccagcctcagcctccaaaagtgctgggattacagacgtgagccatcgcacccagctgagcaagtggccactcttacttcatctatactccctcatgttagattgttttaaagcagatcctagatgttatatccttttatccataaatattttattatgtatctctaaatgatactcttttaaaaaaacatagtatcattatcaaacctaaaaagttaacagtgattccttaatgtcatcaaatatgggatcaatattcaaatttctgcagttgtctcataattattttgtagctaatttaaatccagatctaaacaaggtctatacagtgcatttggttgatatgtctcttaagacttttaatttgtagcttttctgtcacccccttgaatttatttcttgaagaaaccaggttgttgatcctgtagaatttcttatgatagctaccatttactgagtgcttactctgctaggtattatgccaagggttgctggtaaatccacttaattctcataccaatccttagatgtattataatagacctttttctgatgttatatataagtaaattgaggtttgggaatatctaggtaacttagccgtagtcacataactggtcattggagggggcatgatccagatcccgggtttttaaaccactaatctgttttcctgaaagatcttaatgacagaagcagccagggctgtaggatagaggccaactcattaggctggcattggcacctttccaactttatccctacacctcagctgcacaggatgccttcctggaatgcccttagttctctattcaacctcttcaaggccttctcagccttcacaccatctccatgaaacctttcttgaccacaccagcccatagagctctgtcttgcacacactgcactgctcatttggtgttcagtcacatgctgtttggggaggtttcttgtttttttgttagtattcctgctgttatttctgagctcactttctagctctgtgaatacagggtcagcccttacgccacactggggtcccgtagatgctctttgtgcgattagggaatgctaattagaatactatctctgggctatttatgctgcatcagtcttcctgtcaaacaagttacagttgtgcttatctgtatttccgatgagaatcaggaatttttcttctgtttaatgaatttctgattggtttcaaagtattctaacataagtagccaaattgtactataggcctttaaatgaaaaaaataaaaaagtagtcccaagccgggcgcagtggctcacgcctgtaatcccagcactttcggaggccgaggcgggtggaccacctaaggtcaggagttcaagaccagcctggccaacatggtgaaaccccatctctactaaaaatacaaaaattagtcatgtgtggtggcacgtgcctgtagtcccagctactccaggaggctgaggcaggagaattgcttgaacccgggagttggaggttgcagtgacctgagattgcaccactgcactccagcctgggcaacagagtgagactctgtcttaaaaaaaaaaaaaaaaaaaaattccagacctctccttttcacccataaatccctctgcccagtgacagccactttcagctcctttcccctatgtcttctggtatttacctttggatttctaaataataatattaattgactgttattactaatctgtaatccttaggtaatacctgttatatactaggtactgttctaagtgctttacagccattagcttatttaatctcaacaacccctatgaagcagggtctattattgtttccttttaccgatgaggacacttaagcacagaaaggttaaacagtttgtacaacctcactatcattagtaggtgttaaagaacctaggtagtctagctccagaatcggtgcttgtaatcatactcccctcctgtattgtctctcattgctatttcttcgtctgtcaattttaggcattatctgttaagcttttagtatgggatatgagcatttagtcttcttacaccatcacattggcttcctttcccctttcagcttcatagtaatttaaaaataaatcagtattctgtgtttacattattataactctgaaagattcatttactatcaagccaaatagtgtagtgtgatttaatctattttcttctaaagctttttgtttttcctggagctgacaattgcattattttttcatttgcttagttttctggtattaatcactaattctttccaagccttttgagaaactataaaaccctacaattcttgcttgaacccgggaggcggaggctgcagtgagccgagatcgcaccattgcaccccagcctgggcgacagagcaagaccccatctcaaaaaacaaacaaacaaaaaacccctacagttctgtttttcacatggtcaaatgtatcagctgcactattttttttttttgagacctaaaactagggattgcctaagcctttcctttttaaaaagtcaggtttatataggtataacttgcatacagtaaaattaaccttttttaggtgtaagagttctgagaggtttgatagaatatatcaaggtatagggccagcgccgatggctcacacctgtagtcccaacaatttgggaggccaaggcgggaggatcacttaggcccaggagtttgagaccagcttgggcaacatagtgagaccctgtctctacaaaaaaaaaaaaaaaaaaggtatcaaggtacaggaaatttccactacccaacaaaggtcactcacccttttgtagttaataacttctctgcaacctagatccagccaactactgataagatgtctgtccttgtattttaccttttccagaatgttacataaatggagtcatacagtaagtaggcttttgtgtctggcttcaagcctttactttttataaagaataacaatggtaataattatagctgacatttattaaaggctgagcggatactgtatactgtgctacaggcttttcgtgggttatctcatcactgtttcacatatgtaggtatacagttctttctttaaaatatgtgactgaaaaatattattgaacattatgctaaaatttgttacactgagaagactaagaaaaacagagctcatgttttctttcaactgatttcctttttacattgtacttgagtacctggaagctgcttgcttctttccgcagctaggatacaaactccctgacagttaagtgcttctttacttcccatccagtgccttgcacagggcttggtacatggtttggtccaaaatatttgttgaataaatttgcagatagcccacgtgtgtaggagagggagagaaggttcttgaaaaatggagattggaggaatctaggatggggagggagatatgggaagggcccagacagaggcaggagggttccaacttgttcctcttccctgcagcccagtgtttcccgggctctttgagttctgctcgcgttacacaggcgcatctctgcaaggagcaacccagctgaacaacaaggtgacatagtcccgagtcctgttcttcctttcctctggatccctggactcgggatttaaccctgatcctgggctcccagcttgaggggtgggcaggaaggactgtgacttaggtgtttgtctttcagatctgtgatattgccattaactgggctggtggtctgcaccatgccaagaagtttgaggtgagtgaggaggtgatgggaaagacagtggccatcctagggtaggtgtttaggatgatggtggggggcagctgggaggggaattgctcttctctttatgagaccactgtcttgccataggcctctggcttctgctatgtcaacgacattgtgattggcatcctggagctgctcaagtaagtagcccaggaggagatgggggcagttacgggattcttggctgaggaggtctctcagtctcaaccctgaccttgacctccctcctccctgattagcttctcccaagttcttgatgctttattcaggctgcctcttccactgctgcagattccctactgcctgctcacatttcagccttctctgcatatccctctcctgtccctgcctctagcctctaggctggagcccccagttgcctttagggaactggtgacattaagtttcaggtgaccagggcagaagcagactcttcacaattcgagacccggtgtttgagaggagtgggttggggggttcacttctagctcagaccctggctttggcttccctctaggtaccaccctcgggtgctctacattgacattgacatccaccatggtgacggggttcaagaagctttctacctcactgaccgggtcatgacggtgtccttccacaaatacggaaattacttcttccctggcacaggtatgggaatagggattactttcccctttgcacccttcagctctttactatgagtgcctccttctcagccttctagtctcatctcaggtgtcccctcctcagagaagcctttccttaccactccagttatcataatcacctccttccccattcctctgttacatcagcctcattgtttccctcagaacactcactgctatttgtgtttattgtggttttttgttttgttttgtttactgcctccctcctcctcatggctattccctaagaatataagcgtggtgggatatcgtaaatttcattagttccattcgttgctgcatccctactgcctagtacacagttggctcagagtggatcccccaaaactatttgcccaatgaatgcaagctgcaagagatttagtggctctagggagtttatggtgaagctacatagatggaatgagaggctcccagagtgcagattggggctgaaacagctgggttgtgggtgcttcccatgtgtggctaccaccacccacttccctacaggtgacatgtatgaagtcggggcagagagtggccgctactactgtctgaacgtgcccctgcgggatggcattgatgaccaga

SEQ ID NO: 12363 - DNA, 797 bp, Homo sapiens
gcggcggaggtgcggggcctgctcccgccggcaccatggccaagaccgtggcctatttctacgaccccgacgtgggcaacttccactacggagctggacaccctatgaagccccatcgcctggcattgacccatagcctggtcctgcattacggtctctataagaagatgatcgtcttcaagccataccaggcctcccaacatgacatgtgccgcttccactccgaggactacattgacttcctgcagagagtcagccccaccaatatgcaaggcttcaccaagagtcttaatgccttcaacgtaggcgatgactgcccagtgtttcccgggctctttgagttctgctcgcgttacacaggcgcatctctgcaaggagcaacccagctgaacaacaaggtgacatagtcccgagtcctgttcttcctttcctctggatccctggactcgggatttaaccctgatcctgggctcccagcttgaggggtgggcaggaaggactgtgacttaggtgtttgtctttcagatctgtgatattgccattaactgggctggtggtctgcaccatgccaagaagtttgaggtaccaccctcgggtgctctacattgacattgacatccaccatggtgacggggttcaagaagctttctacctcactgaccgggtcatgacggtgtccttccacaaatacggaaattacttcttccctggcacaggtgacatgtatgaagtcggggcagagagtggccgctactactgtctgaacgtgcccctgcgggatggcattgatgaccaga

SEQ ID NO: 12364 - DNA, 8947 bp, Homo sapiens
ccgcgggcggcgggcggcggaggtgcggggcctgctcccgccggcaccatggccaagaccgtggcctatttctacgaccccgacgtgggcaacttccactacggtgaggaaacagggatatgcatgaggggttgggacacggaggttttgaggcggggttgcaactccaggggtgagagctgacgaactctcttctccccacccccaggagctggacaccctatgaagccccatcgcctggcattgacccatagcctggtcctgcattacggtctctataagaagatgatcgtgagttccgccgcctcggccgggggttggggggtggggcgagctgtggccgtagggataggtgggctggactgagtgcatgaagtgcgacccgcccctagagtatcggggagctggatagaagtcaccaggagtaccttgaaagtgcagggtgttgggggtggcgtcctctgcttaatggaaagtactttctcacctcaggtcggccaccctctgactgtaggcacactagcccttggcctagggttagcgtgatgtggggctggtttgaagacagaaggtgtgttcctcctctgcattttagagtgtggatagggccttggcctcaggaattagggttaggggagcggatatcactgtatcagggtgtgaggtttaccctcagttcccactcctcttttaccacctttctttacctccaaggagctagggctccagggtggaacgatgctgccgtctttgtaaatgtgtatgtgcgtgtggaacagaggcgatattttagatattcctttttcagcctggaatacctctacatggttctgcttaatcgctatccagtttttcatctaccagacatacacatgctgtcttcccagcttggaatttatggctgtgatatgggatagtaacagttaagccacgccaggcgtggtggcccatgcctgtaatcccagcactttgggaggttgaaatgggggggatcgcttgaggccaggagttggagaccagcttgggccacagtgggacccacatctacaaaaaataaaaataaaaaaagtagccatgtgcggtgggtgtgcctgtagtcccaactacttgggaggccgaggcgagaggatggcttgggcccaggagtttaaagttacagtgatctatgatcagcagcctgagttgacagggaggaccttgtctcaaaagaaaaaataagacaaaacagctaaacccaggctttatgtgttgctagggaaactagtgaacaatatgaatgaatgttcattgcttgtgccaaggcacagacaaatggactggtcatagaaaagactgaggtgatgttagtgcaggaatctatatcccttgagattgtttgcctgtatgtacctgtgtgcattttctgggagaagaaaagctctttcttgtgcagttttcaaagaggtgtgacacatccccctgaccttccaaagataataaatctttgattttaattagaaagttgacatatatcccatatatttgactccagaaagaagaatccagaggaaagaggacagaatcagagcttgggggaggagatgagcatggagagaactgggaataggagattccaaggaacagggcaggtggatcagggctcaaagttgagaaggtacgataggctgagctggaggtggaaaggaaaagaagtggtcttcagggggctcatttgtaataacttacctggttaatcggagtctctctactgacttaaggattgtgggatgaggggaatgctatgtttggcttcatatagtctccaggactgggttcagtatgggtggtctgagcctgtggagtggggctgaccctgcctgggttcatcttgtgtctccatcccgaggtcttcaagccataccaggcctcccaacatgacatgtgccgcttccactccgaggactacattgacttcctgcagagagtcagccccaccaatatgcaaggcttcaccaagagtcttaatgccttcaacgtaggcgatgactggtgagggaggactgggagttttgatgtctaacagtttaatgccaagcccttcagtgaggtcttttggcagcagtgggaagatctcaaggggggcctacttgtcaatgcatcataattcattttatttgtttattcaataaatatttattggtcacttgttctaggcaggccctgtgctaagtgctgggaatgcagtgatgaacaaaaacaaaattttaatatcgtatttttgctaagtcttataaagaggaggtgtatgacagattatgagagtgtatacgtggaggattgtttagcttggtggagtggctggtcggtggggccttcctagaggaagtaaagattgagctgagatctgaaaaaagagtagaagtaatcagatgaaagatggttggagggtgaggggagaagtatagcaggcagtagggacaagtgctaagggtctgtggtaggactgagtatgactcatttgaggaacagaaaaaaggccaagtgcagagtatgaagaggaggtgaactgaattgaggctaaagaaataggaccttttaaaagcaaacagctctattatgaattggggtttttacccgtagagtagagggaagctatcaaagtgttttaaaaagcaagggatcttaagagggctatgggcagttaaaaaaacaaaaaaaacaacgaaggagtggtttgatatcattaggtttacattgagcttgtatcatccatagaagagtcagggttagaccctctggggaagagagtggacaacaaagataagccacactctactctatatccatgaaaaaatagtaaccatcacagctaccagttgctcaattctacttacttttgtttttaaactttttattagggaaaatttcaaaaatttctgaaagtgaagtagtgcagtgacctcccatacgtccatcacctagcttcaacgcttatgagcaaatggccactctttttttttttttttttttttttgagacagagtctcactctgtagcccaggctggagtgcagtggtgcagtcttggctcactgcaacctctgcctcctgggttcaagcgattctcatgcctcagactcccgagtagctgggattacaggcgcctgccaccatgcctggctaatttttgtatgtttagtagagatggggtttcactatgttggtcaggctggttttgaactcctgacctcaggtgatccaccagcctcagcctccaaaagtgctgggattacagacgtgagccatcgcacccagctgagcaagtggccactcttacttcatctatactccctcatgttagattgttttaaagcagatcctagatgttatatccttttatccataaatattttattatgtatctctaaatgatactcttttaaaaaaacatagtatcattatcaaacctaaaaagttaacagtgattccttaatgtcatcaaatatgggatcaatattcaaatttctgcagttgtctcataattattttgtagctaatttaaatccagatctaaacaaggtctatacagtgcatttggttgatatgtctcttaagacttttaatttgtagcttttctgtcacccccttgaatttatttcttgaagaaaccaggttgttgatcctgtagaatttcttatgatagctaccatttactgagtgcttactctgctaggtattatgccaagggttgctggtaaatccacttaattctcataccaatccttagatgtattataatagacctttttctgatgttatatataagtaaattgaggtttgggaatatctaggtaacttagccgtagtcacataactggtcattggagggggcatgatccagatcccgggtttttaaaccactaatctgttttcctgaaagatcttaatgacagaagcagccagggctgtaggatagaggccaactcattaggctggcattggcacctttccaactttatccctacacctcagctgcacaggatgccttcctggaatgcccttagttctctattcaacctcttcaaggccttctcagccttcacaccatctccatgaaacctttcttgaccacaccagcccatagagctctgtcttgcacacactgcactgctcatttggtgttcagtcacatgctgtttggggaggtttcttgtttttttgttagtattcctgctgttatttctgagctcactttctagctctgtgaatacagggtcagcccttacgccacactggggtcccgtagatgctctttgtgcgattagggaatgctaattagaatactatctctgggctatttatgctgcatcagtcttcctgtcaaacaagttacagttgtgcttatctgtatttccgatgagaatcaggaatttttcttctgtttaatgaatttctgattggtttcaaagtattctaacataagtagccaaattgtactataggcctttaaatgaaaaaaataaaaaagtagtcccaagccgggcgcagtggctcacgcctgtaatcccagcactttcggaggccgaggcgggtggaccacctaaggtcaggagttcaagaccagcctggccaacatggtgaaaccccatctctactaaaaatacaaaaattagtcatgtgtggtggcacgtgcctgtagtcccagctactccaggaggctgaggcaggagaattgcttgaacccgggagttggaggttgcagtgacctgagattgcaccactgcactccagcctgggcaacagagtgagactctgtcttaaaaaaaaaaaaaaaaaaaaattccagacctctccttttcacccataaatccctctgcccagtgacagccactttcagctcctttcccctatgtcttctggtatttacctttggatttctaaataataatattaattgactgttattactaatctgtaatccttaggtaatacctgttatatactaggtactgttctaagtgctttacagccattagcttatttaatctcaacaacccctatgaagcagggtctattattgtttccttttaccgatgaggacacttaagcacagaaaggttaaacagtttgtacaacctcactatcattagtaggtgttaaagaacctaggtagtctagctccagaatcggtgcttgtaatcatactcccctcctgtattgtctctcattgctatttcttcgtctgtcaattttaggcattatctgttaagcttttagtatgggatatgagcatttagtcttcttacaccatcacattggcttcctttcccctttcagcttcatagtaatttaaaaataaatcagtattctgtgtttacattattataactctgaaagattcatttactatcaagccaaatagtgtagtgtgatttaatctattttcttctaaagctttttgtttttcctggagctgacaattgcattattttttcatttgcttagttttctggtattaatcactaattctttccaagccttttgagaaactataaaaccctacaattcttgcttgaacccgggaggcggaggctgcagtgagccgagatcgcaccattgcaccccagcctgggcgacagagcaagaccccatctcaaaaaacaaacaaacaaaaaacccctacagttctgtttttcacatggtcaaatgtatcagctgcactattttttttttttgagacctaaaactagggattgcctaagcctttcctttttaaaaagtcaggtttatataggtataacttgcatacagtaaaattaaccttttttaggtgtaagagttctgagaggtttgatagaatatatcaaggtatagggccagcgccgatggctcacacctgtagtcccaacaatttgggaggccaaggcgggaggatcacttaggcccaggagtttgagaccagcttgggcaacatagtgagaccctgtctctacaaaaaaaaaaaaaaaaaaggtatcaaggtacaggaaatttccactacccaacaaaggtcactcacccttttgtagttaataacttctctgcaacctagatccagccaactactgataagatgtctgtccttgtattttaccttttccagaatgttacataaatggagtcatacagtaagtaggcttttgtgtctggcttcaagcctttactttttataaagaataacaatggtaataattatagctgacatttattaaaggctgagcggatactgtatactgtgctacaggcttttcgtgggttatctcatcactgtttcacatatgtaggtatacagttctttctttaaaatatgtgactgaaaaatattattgaacattatgctaaaatttgttacactgagaagactaagaaaaacagagctcatgttttctttcaactgatttcctttttacattgtacttgagtacctggaagctgcttgcttctttccgcagctaggatacaaactccctgacagttaagtgcttctttacttcccatccagtgccttgcacagggcttggtacatggtttggtccaaaatatttgttgaataaatttgcagatagcccacgtgtgtaggagagggagagaaggttcttgaaaaatggagattggaggaatctaggatggggagggagatatgggaagggcccagacagaggcaggagggttccaacttgttcctcttccctgcagcccagtgtttcccgggctctttgagttctgctcgcgttacacaggcgcatctctgcaaggagcaacccagctgaacaacaaggtgacatagtcccgagtcctgttcttcctttcctctggatccctggactcgggatttaaccctgatcctgggctcccagcttgaggggtgggcaggaaggactgtgacttaggtgtttgtctttcagatctgtgatattgccattaactgggctggtggtctgcaccatgccaagaagtttgaggtgagtgaggaggtgatgggaaagacagtggccatcctagggtaggtgtttaggatgatggtggggggcagctgggaggggaattgctcttctctttatgagaccactgtcttgccataggcctctggcttctgctatgtcaacgacattgtgattggcatcctggagctgctcaagtaagtagcccaggaggagatgggggcagttacgggattcttggctgaggaggtctctcagtctcaaccctgaccttgacctccctcctccctgattagcttctcccaagttcttgatgctttattcaggctgcctcttccactgctgcagattccctactgcctgctcacatttcagccttctctgcatatccctctcctgtccctgcctctagcctctaggctggagcccccagttgcctttagggaactggtgacattaagtttcaggtgaccagggcagaagcagactcttcacaattcgagacccggtgtttgagaggagtgggttggggggttcacttctagctcagaccctggctttggcttccctctaggtaccaccctcgggtgctctacattgacattgacatccaccatggtgacggggttcaagaagctttctacctcactgaccgggtcatgacggtgtccttccacaaatacggaaattacttcttccctggcacaggtatgggaatagggattactttcccctttgcacccttcagctctttactatgagtgcctccttctcagccttctagtctcatctcaggtgtcccctcctcagagaagcctttccttaccactccagttatcataatcacctccttccccattcctctgttacatcagcctcattgtttccctcagaacactcactgctatttgtgtttattgtggttttttgttttgttttgtttactgcctccctcctcctcatggctattccctaagaatataagcgtggtgggatatcgtaaatttcattagttccattcgttgctgcatccctactgcctagtacacagttggctcagagtggatcccccaaaactatttgcccaatgaatgcaagctgcaagagatttagtggctctagggagtttatggtgaagctacatagatggaatgagaggctcccagagtgcagattggggctgaaacagctgggttgtgggtgcttcccatgtgtggctaccaccacccacttccctacaggtgacatgtatgaagtcggggcagagagtggccgctactactgtctgaacgtgcccctgcgggatggcattgatgaccagagtaagtaccgaagtcttccctctgttccctaggccccttctttttctccttgaaataacctcttctgcctggtattgtctgctgttgggccagttgtccttaaggatgaatggccttcagagggaccatgaatctctggaaattgtatgcaacatatcatgtgtatgtgcatttttctgggaaaagtcattggctttcatcagtcactcatagcagtctgggatcccttccagaagtttcagaccagtgatttgattcttttgggtggcccctttcctgggctacatgctcgctcaaccccctttttccttttgttccctgtctccccatccccttggggtgccaggtgcccatctttggccctctcccaggttacaagcaccttttccagccggttatcaaccaggtagtggacttctaccaacccacgtgcattgtgctccaggtaatactgtcagttcctcctcaggagtgttctgcctgggcttggggaaagagagcaagggaagaggaggttctttaggttggtggtggaaggggtatctgtgatgttctgatcagttctgatcactgcactttcctggggttttgctttttgcagtgtggagctgactctctgggctgtgatcgattgggctgctttaacctcagcatccgagggcatggg

SEQ ID NO: 12365 - DNA, 736 bp, Homo sapiens
ccgcgggcggcgggcggcggaggtgcggggcctgctcccgccggcaccatggccaagaccgtggcctatttctacgaccccgacgtgggcaacttccactacggagctggacaccctatgaagccccatcgcctggcattgacccatagcctggtcctgcattacggtctctataagaagatgatccccagtgtttcccgggctctttgagttctgctcgcgttacacaggcgcatctctgcaaggagcaacccagctgaacaacaagatctgtgatattgccattaactgggctggtggtctgcaccatgccaagaagtttgaggcctctggcttctgctatgtcaacgacattgtgattggcatcctggagctgctcaagtaccaccctcgggtgctctacattgacattgacatccaccatggtgacggggttcaagaagctttctacctcactgaccgggtcatgacggtgtccttccacaaatacggaaattacttcttccctggcacaggtgacatgtatgaagtcggggcagagagtggccgctactactgtctgaacgtgcccctgcgggatggcattgatgaccagagttacaagcaccttttccagccggttatcaaccaggtagtggacttctaccaacccacgtgcattgtgctccagtgtggagctgactctctgggctgtgatcgattgggctgctttaacctcagcatccgagggcatggg

SEQ ID NO: 12366 - DNA, 10601 bp, Homo sapiens
ggcggcgggcggcggaggtgcggggcctgctcccgccggcaccatggccaagaccgtggcctatttctacgaccccgacgtgggcaacttccactacggtgaggaaacagggatatgcatgaggggttgggacacggaggttttgaggcggggttgcaactccaggggtgagagctgacgaactctcttctccccacccccaggagctggacaccctatgaagccccatcgcctggcattgacccatagcctggtcctgcattacggtctctataagaagatgatcgtgagttccgccgcctcggccgggggttggggggtggggcgagctgtggccgtagggataggtgggctggactgagtgcatgaagtgcgacccgcccctagagtatcggggagctggatagaagtcaccaggagtaccttgaaagtgcagggtgttgggggtggcgtcctctgcttaatggaaagtactttctcacctcaggtcggccaccctctgactgtaggcacactagcccttggcctagggttagcgtgatgtggggctggtttgaagacagaaggtgtgttcctcctctgcattttagagtgtggatagggccttggcctcaggaattagggttaggggagcggatatcactgtatcagggtgtgaggtttaccctcagttcccactcctcttttaccacctttctttacctccaaggagctagggctccagggtggaacgatgctgccgtctttgtaaatgtgtatgtgcgtgtggaacagaggcgatattttagatattcctttttcagcctggaatacctctacatggttctgcttaatcgctatccagtttttcatctaccagacatacacatgctgtcttcccagcttggaatttatggctgtgatatgggatagtaacagttaagccacgccaggcgtggtggcccatgcctgtaatcccagcactttgggaggttgaaatgggggggatcgcttgaggccaggagttggagaccagcttgggccacagtgggacccacatctacaaaaaataaaaataaaaaaagtagccatgtgcggtgggtgtgcctgtagtcccaactacttgggaggccgaggcgagaggatggcttgggcccaggagtttaaagttacagtgatctatgatcagcagcctgagttgacagggaggaccttgtctcaaaagaaaaaataagacaaaacagctaaacccaggctttatgtgttgctagggaaactagtgaacaatatgaatgaatgttcattgcttgtgccaaggcacagacaaatggactggtcatagaaaagactgaggtgatgttagtgcaggaatctatatcccttgagattgtttgcctgtatgtacctgtgtgcattttctgggagaagaaaagctctttcttgtgcagttttcaaagaggtgtgacacatccccctgaccttccaaagataataaatctttgattttaattagaaagttgacatatatcccatatatttgactccagaaagaagaatccagaggaaagaggacagaatcagagcttgggggaggagatgagcatggagagaactgggaataggagattccaaggaacagggcaggtggatcagggctcaaagttgagaaggtacgataggctgagctggaggtggaaaggaaaagaagtggtcttcagggggctcatttgtaataacttacctggttaatcggagtctctctactgacttaaggattgtgggatgaggggaatgctatgtttggcttcatatagtctccaggactgggttcagtatgggtggtctgagcctgtggagtggggctgaccctgcctgggttcatcttgtgtctccatcccgaggtcttcaagccataccaggcctcccaacatgacatgtgccgcttccactccgaggactacattgacttcctgcagagagtcagccccaccaatatgcaaggcttcaccaagagtcttaatgccttcaacgtaggcgatgactggtgagggaggactgggagttttgatgtctaacagtttaatgccaagcccttcagtgaggtcttttggcagcagtgggaagatctcaaggggggcctacttgtcaatgcatcataattcattttatttgtttattcaataaatatttattggtcacttgttctaggcaggccctgtgctaagtgctgggaatgcagtgatgaacaaaaacaaaattttaatatcgtatttttgctaagtcttataaagaggaggtgtatgacagattatgagagtgtatacgtggaggattgtttagcttggtggagtggctggtcggtggggccttcctagaggaagtaaagattgagctgagatctgaaaaaagagtagaagtaatcagatgaaagatggttggagggtgaggggagaagtatagcaggcagtagggacaagtgctaagggtctgtggtaggactgagtatgactcatttgaggaacagaaaaaaggccaagtgcagagtatgaagaggaggtgaactgaattgaggctaaagaaataggaccttttaaaagcaaacagctctattatgaattggggtttttacccgtagagtagagggaagctatcaaagtgttttaaaaagcaagggatcttaagagggctatgggcagttaaaaaaacaaaaaaaacaacgaaggagtggtttgatatcattaggtttacattgagcttgtatcatccatagaagagtcagggttagaccctctggggaagagagtggacaacaaagataagccacactctactctatatccatgaaaaaatagtaaccatcacagctaccagttgctcaattctacttacttttgtttttaaactttttattagggaaaatttcaaaaatttctgaaagtgaagtagtgcagtgacctcccatacgtccatcacctagcttcaacgcttatgagcaaatggccactctttttttttttttttttttttttgagacagagtctcactctgtagcccaggctggagtgcagtggtgcagtcttggctcactgcaacctctgcctcctgggttcaagcgattctcatgcctcagactcccgagtagctgggattacaggcgcctgccaccatgcctggctaatttttgtatgtttagtagagatggggtttcactatgttggtcaggctggttttgaactcctgacctcaggtgatccaccagcctcagcctccaaaagtgctgggattacagacgtgagccatcgcacccagctgagcaagtggccactcttacttcatctatactccctcatgttagattgttttaaagcagatcctagatgttatatccttttatccataaatattttattatgtatctctaaatgatactcttttaaaaaaacatagtatcattatcaaacctaaaaagttaacagtgattccttaatgtcatcaaatatgggatcaatattcaaatttctgcagttgtctcataattattttgtagctaatttaaatccagatctaaacaaggtctatacagtgcatttggttgatatgtctcttaagacttttaatttgtagcttttctgtcacccccttgaatttatttcttgaagaaaccaggttgttgatcctgtagaatttcttatgatagctaccatttactgagtgcttactctgctaggtattatgccaagggttgctggtaaatccacttaattctcataccaatccttagatgtattataatagacctttttctgatgttatatataagtaaattgaggtttgggaatatctaggtaacttagccgtagtcacataactggtcattggagggggcatgatccagatcccgggtttttaaaccactaatctgttttcctgaaagatcttaatgacagaagcagccagggctgtaggatagaggccaactcattaggctggcattggcacctttccaactttatccctacacctcagctgcacaggatgccttcctggaatgcccttagttctctattcaacctcttcaaggccttctcagccttcacaccatctccatgaaacctttcttgaccacaccagcccatagagctctgtcttgcacacactgcactgctcatttggtgttcagtcacatgctgtttggggaggtttcttgtttttttgttagtattcctgctgttatttctgagctcactttctagctctgtgaatacagggtcagcccttacgccacactggggtcccgtagatgctctttgtgcgattagggaatgctaattagaatactatctctgggctatttatgctgcatcagtcttcctgtcaaacaagttacagttgtgcttatctgtatttccgatgagaatcaggaatttttcttctgtttaatgaatttctgattggtttcaaagtattctaacataagtagccaaattgtactataggcctttaaatgaaaaaaataaaaaagtagtcccaagccgggcgcagtggctcacgcctgtaatcccagcactttcggaggccgaggcgggtggaccacctaaggtcaggagttcaagaccagcctggccaacatggtgaaaccccatctctactaaaaatacaaaaattagtcatgtgtggtggcacgtgcctgtagtcccagctactccaggaggctgaggcaggagaattgcttgaacccgggagttggaggttgcagtgacctgagattgcaccactgcactccagcctgggcaacagagtgagactctgtcttaaaaaaaaaaaaaaaaaaaaattccagacctctccttttcacccataaatccctctgcccagtgacagccactttcagctcctttcccctatgtcttctggtatttacctttggatttctaaataataatattaattgactgttattactaatctgtaatccttaggtaatacctgttatatactaggtactgttctaagtgctttacagccattagcttatttaatctcaacaacccctatgaagcagggtctattattgtttccttttaccgatgaggacacttaagcacagaaaggttaaacagtttgtacaacctcactatcattagtaggtgttaaagaacctaggtagtctagctccagaatcggtgcttgtaatcatactcccctcctgtattgtctctcattgctatttcttcgtctgtcaattttaggcattatctgttaagcttttagtatgggatatgagcatttagtcttcttacaccatcacattggcttcctttcccctttcagcttcatagtaatttaaaaataaatcagtattctgtgtttacattattataactctgaaagattcatttactatcaagccaaatagtgtagtgtgatttaatctattttcttctaaagctttttgtttttcctggagctgacaattgcattattttttcatttgcttagttttctggtattaatcactaattctttccaagccttttgagaaactataaaaccctacaattcttgcttgaacccgggaggcggaggctgcagtgagccgagatcgcaccattgcaccccagcctgggcgacagagcaagaccccatctcaaaaaacaaacaaacaaaaaacccctacagttctgtttttcacatggtcaaatgtatcagctgcactattttttttttttgagacctaaaactagggattgcctaagcctttcctttttaaaaagtcaggtttatataggtataacttgcatacagtaaaattaaccttttttaggtgtaagagttctgagaggtttgatagaatatatcaaggtatagggccagcgccgatggctcacacctgtagtcccaacaatttgggaggccaaggcgggaggatcacttaggcccaggagtttgagaccagcttgggcaacatagtgagaccctgtctctacaaaaaaaaaaaaaaaaaaggtatcaaggtacaggaaatttccactacccaacaaaggtcactcacccttttgtagttaataacttctctgcaacctagatccagccaactactgataagatgtctgtccttgtattttaccttttccagaatgttacataaatggagtcatacagtaagtaggcttttgtgtctggcttcaagcctttactttttataaagaataacaatggtaataattatagctgacatttattaaaggctgagcggatactgtatactgtgctacaggcttttcgtgggttatctcatcactgtttcacatatgtaggtatacagttctttctttaaaatatgtgactgaaaaatattattgaacattatgctaaaatttgttacactgagaagactaagaaaaacagagctcatgttttctttcaactgatttcctttttacattgtacttgagtacctggaagctgcttgcttctttccgcagctaggatacaaactccctgacagttaagtgcttctttacttcccatccagtgccttgcacagggcttggtacatggtttggtccaaaatatttgttgaataaatttgcagatagcccacgtgtgtaggagagggagagaaggttcttgaaaaatggagattggaggaatctaggatggggagggagatatgggaagggcccagacagaggcaggagggttccaacttgttcctcttccctgcagcccagtgtttcccgggctctttgagttctgctcgcgttacacaggcgcatctctgcaaggagcaacccagctgaacaacaaggtgacatagtcccgagtcctgttcttcctttcctctggatccctggactcgggatttaaccctgatcctgggctcccagcttgaggggtgggcaggaaggactgtgacttaggtgtttgtctttcagatctgtgatattgccattaactgggctggtggtctgcaccatgccaagaagtttgaggtgagtgaggaggtgatgggaaagacagtggccatcctagggtaggtgtttaggatgatggtggggggcagctgggaggggaattgctcttctctttatgagaccactgtcttgccataggcctctggcttctgctatgtcaacgacattgtgattggcatcctggagctgctcaagtaagtagcccaggaggagatgggggcagttacgggattcttggctgaggaggtctctcagtctcaaccctgaccttgacctccctcctccctgattagcttctcccaagttcttgatgctttattcaggctgcctcttccactgctgcagattccctactgcctgctcacatttcagccttctctgcatatccctctcctgtccctgcctctagcctctaggctggagcccccagttgcctttagggaactggtgacattaagtttcaggtgaccagggcagaagcagactcttcacaattcgagacccggtgtttgagaggagtgggttggggggttcacttctagctcagaccctggctttggcttccctctaggtaccaccctcgggtgctctacattgacattgacatccaccatggtgacggggttcaagaagctttctacctcactgaccgggtcatgacggtgtccttccacaaatacggaaattacttcttccctggcacaggtatgggaatagggattactttcccctttgcacccttcagctctttactatgagtgcctccttctcagccttctagtctcatctcaggtgtcccctcctcagagaagcctttccttaccactccagttatcataatcacctccttccccattcctctgttacatcagcctcattgtttccctcagaacactcactgctatttgtgtttattgtggttttttgttttgttttgtttactgcctccctcctcctcatggctattccctaagaatataagcgtggtgggatatcgtaaatttcattagttccattcgttgctgcatccctactgcctagtacacagttggctcagagtggatcccccaaaactatttgcccaatgaatgcaagctgcaagagatttagtggctctagggagtttatggtgaagctacatagatggaatgagaggctcccagagtgcagattggggctgaaacagctgggttgtgggtgcttcccatgtgtggctaccaccacccacttccctacaggtgacatgtatgaagtcggggcagagagtggccgctactactgtctgaacgtgcccctgcgggatggcattgatgaccagagtaagtaccgaagtcttccctctgttccctaggccccttctttttctccttgaaataacctcttctgcctggtattgtctgctgttgggccagttgtccttaaggatgaatggccttcagagggaccatgaatctctggaaattgtatgcaacatatcatgtgtatgtgcatttttctgggaaaagtcattggctttcatcagtcactcatagcagtctgggatcccttccagaagtttcagaccagtgatttgattcttttgggtggcccctttcctgggctacatgctcgctcaaccccctttttccttttgttccctgtctccccatccccttggggtgccaggtgcccatctttggccctctcccaggttacaagcaccttttccagccggttatcaaccaggtagtggacttctaccaacccacgtgcattgtgctccaggtaatactgtcagttcctcctcaggagtgttctgcctgggcttggggaaagagagcaagggaagaggaggttctttaggttggtggtggaaggggtatctgtgatgttctgatcagttctgatcactgcactttcctggggttttgctttttgcagtgtggagctgactctctgggctgtgatcgattgggctgctttaacctcagcatccgagggcatgggtgagacttgctctccttcttctccccaaggtttttaagtggccttggacttcagtacgtgggtgggggtagttggggaatgggcctcacctcttcttggaaatcaaaaatagctacaaattgtacttgaactagaaatgtcatcttgaacagggttccctagatggtcattcattcacgatatatttttattaagcacctgttatgttccaggcatcataccacatcatggggatggaataaggagtctcccatggagtttacagtttaggaaacagacaaaaaataaataatcaaatgaaataaatagattcttataaattctgtgaaagaaaaaaagaaagctgagacacaggatacaatgggggacctacttgagatagcatggtttcggaaagtttttctgaggaagtaaaatttgagttgagacctggagactaagaaggagtgagtcataagaggagcagagagaagcctgacccaagcatggacaaaggcccacaaaaggctctgagggctgggcccagtggcacacacctataatcccaacacttccagaggccaaggtgggagaatcgcctgaggctaggagtttgaggccagcctgggcaacatagtgagagccatctctacagaaaataaaaaacaaaatcagctgggcatgatggtgcatgcctatagtcctagctactcaggaagctgaggcaggaggatcacttgagcctaggagtttgaggttacagtgaactatgattgtgccactggacttcagtctgttgaggtgaggtccgagaagctggccatggtgagattgtgcagagcctttaaaccctggtaaggagtttgaattatattccaaagatgatgggaaaccattgaaggattttaagcaggaaagtgacatgatccaatttgtgtttgaaagtgacaattctgactgctgaatagagaaaggtttgggtaggggggatggagatggaagtagaaagaccagttaggaagccatggtgttggttaggtgcccagactaaggtggagggggtggcaatggagagaagtagatgatctgagaggtgtgtgtgtgtgtgtgtgtatatatatatatatacacacacacacacacatatatatgtttttttttttcttttttgagatggagtcttgctctgtcacccaggctggagtgcagtggcacgatcttggctcagtgcaagctctgcctcctgggttcaagcatttctcctgcctcagcctcctgagtagctgggactactacaaaggcgtgagcaccgcgccgggcgtgagttatattttcaaggctagaattgacagaacttgggttgatgagaatagttgattagcaggcagggtgccagggagggtgttgagcagaacagaggggggactgtgctttattttaaaatttttattgagacacagcatataaagtatacccaaatcttaagggtataacataatgaatttcactatcaagataaagatttagaacatttatagttttcttgtgctcctttcaggcaatacctaaaggtatttaccttgtcttttgataacctcctccacatcttcctctggttccttttaacagggaatgcgttgaatatgtcaagagcttcaatatccctctactcgtgctggg

SEQ ID NO: 12367 - DNA, 699 bp, Homo sapiens
ggcggcgggcggcggaggtgcggggcctgctcccgccggcaccatggccaagaccgtggcctatttctacgaccccgacgtgggcaacttccactacggagctggacaccctatgaagccccatcgcctggcattgacccatagcctggtcctgcattacggtctctataagaagatgatcatctgtgatattgccattaactgggctggtggtctgcaccatgccaagaagtttgaggcctctggcttctgctatgtcaacgacattgtgattggcatcctggagctgctcaagtaccaccctcgggtgctctacattgacattgacatccaccatggtgacggggttcaagaagctttctacctcactgaccgggtcatgacggtgtccttccacaaatacggaaattacttcttccctggcacaggtgacatgtatgaagtcggggcagagagtggccgctactactgtctgaacgtgcccctgcgggatggcattgatgaccagagttacaagcaccttttccagccggttatcaaccaggtagtggacttctaccaacccacgtgcattgtgctccagtgtggagctgactctctgggctgtgatcgattgggctgctttaacctcagcatccgagggcatggggaatgcgttgaatatgtcaagagcttcaatatccctctactcgtgctggg

SEQ ID NO: 12368 - DNA, 3543 bp, Homo sapiens
gagagctaacttggggtcttttcccaaggtggatgtagaagcgggctccggcgtcccactctcccttccatatgggcttagcgtctgggtcactgagaacgacgtctgaatagggccctgggtccttgccatggatgaatgtggttcccgcatccgccggcgggtgtctctccccaaaaggaaccgtccaagcttggggtgtatttttggcgctcccaccgcggccgagctcgtgcccggagatgaggggaaagaggaggaggaaatggtggctgagaacaggaggcggaaaaccgcgggcgtactgccggttgaggtacagccccttctactctcagattccccggaatgtctcgtccttggaggtggtgatacaaacccggacctcctacgtcacatgcccactgacagaggggtgggagaccagcctaatgacagtgaagtggacatgtttggtgactatgatagctttactgaaaactcctttatagctcaagttgacgacctggaacaaaaatatatgcaactccctgaacataagaaacatgctacagactttgccactgaaaatctttgctcggaaagtatcaaaaacaaactcagcattactaccataggcaaccttactgaattacaaactgataagcacacagagaaccagagtggatatgaaggtgtcactattgaacctggagctgatcttttgtatgatgtaccttcctcacaggctatatactttgaaaatttgcagaactcttcaaatgatttgggtgatcattctatgaaagaaagggattggaagtcatcctctcacaacactgtgaatgaggaactgccccataattgcatagagcaaccccagcaaaatgatgagtcctcttccaaagtcagaactagttcagatatgaacaggagaaaaagtattaaagatcatctaaaaaatgccatgactggaaatgcgaaggcccagacaccaatattttctagaagtaaacagctcaaagacactctcctatctgaggaaattaatgttgctaagaaaacagttgagtcatcatcaaatgaccttggtcctttttattcattacccagcaaagtgagagacctttatgcccaattcaagggaattgaaaaattatatgaatggcaacatacttgtttaacattgaattctgtgcaagaaagaaaaaatttaatatattccttgccaacaagtggtggaaaaaccctcgtggctgagattttaatgctgcaagaactgctttgctgtcggaaagatgttttaatgattcttccatatgtggcaattgtccaagaaaagatttcaggtttgtcaagttttggtatagaactcggtttctttgttgaagaatatgctggaagcaaaggaagatttcctccaactaaaagaagggaaaagaaatcactctatattgccactattgaaaaaggacatagcttggtgaactccttgattgaaactggaagaattgacagtctgggtctggttgttgtagacgagttgcacatgattggtgaaggaagccgtggagctacactggaaatgaccctagcaaaaatcctctacactagcaaaacgactcaaattattggtatgagtgcaacattaaacaatgttgaagacctacaaaagtttcttcaagcagaatattataccagtcaatttagaccagttgagttaaaagaatatctgaaaataaatgatacaatatatgaagttgacagcaaagctgagaatggcatgactttttcacgtcttcttaattataagtattctgataccctaaaaaagatggatcctgatcacttggtagcattggtgacagaagttattcccaattattcctgcttagttttttgtcctagtaagaagaactgtgaaaatgtagcagaaatgatatgcaaatttttaagcaaggaatatctgaaacataaggagaaagaaaaatgtgaggtgattaagaacttgaagaatattggcaatggcaacctgtgtcctgttttaaagcgcactatcccatttggagttgcctatcaccacagtggcttaacaagtgatgaaaggaaactcttggaggaggcctactccacaggagtgctctgtctttttacctgcacatctaccctagcggcaggtgtcaacctaccagctcgaagagttattttaagagctccctatgttgctaaggaatttttaaagaggaatcaatataaacagatgattggcagagctggtcgtgctggaatagatactattggggagagtatcctcatattgcaagaaaaagacaaacaacaggtattggagttaataactaaaccattggaaaactgttacagccatcttgttcaggaattcaccaagggaatccaaacattatttctctctttgattggtttgaagattgcaacgaatcttgatgacatctatcatttcatgaatggtacattttttggtgttcagcaaaaggttttattgaaagaaaaaagtctctgggaaataactgttgaatcacttagatacctgacagaaaaaggactcctacaaaaagacactatttataagtctgaagaagaggtccaatataattttcatattacaaagttgggacgtgcttcatttaagggaactatagatttagcttattgtgacattctgtacagagacttgaagaaaggtcttgaaggacttgtgcttgaaagccttcttcatctaatctacctaacaaccccctatgatctggtttcacagtgtaaccctgattggatgatatacttcaggcagtttagccaactcagtccagcagaacaaaatgtagctgccattcttggagtctctgaaagctttattgggaagaaagcatcaggccaagccatcggaaagaaggtggacaagaacgttgtcaacaggctatatctgtcttttgttctttataccttgctcaaagagaccaacatttggactgtatctgaaaaatttaatatgcctcgaggatatatacaaaatcttctcactggaactgcctcattctcatcttgtgtgttacatttctgtgaggagcttgaggagttttgggtttacagagcccttttggtagaacttaccaagaagctgacttactgtgtaaaggcagaattaatccctctcatggaagttactggagttttagagggtcgagcaaaacagttatacagtgcaggttacaaaagtctaatgcacttagctaatgcaaatcctgaagtgctcgtaaggacaattgatcatttatcaagacgccaagccaagcaaattgtttcatcagcaaagatgctgttgcatgaaaaagcagaagccctgcaagaagaggtagaagagttactaagattgccttctgatttccctggtgctgtggcttcttccactgacaaagcatgaagctatctgatgagaattttcatatatgaattatttattgtacatgtgtgttattaaagataacttatactttataaatgaaaaaatacatttcagttatacattaa

SEQ ID NO: 12369 - DNA, 2067 bp, Homo sapiens
gagagctaacttggggtcttttcccaaggtggatgtagaagcgggctccggcgtcccactctcccttccatatgggcttagcgtctgggtcactgagaacgacgtctgaatagggccctgggtccttgccatggatgaatgtggttcccgcatccgccggcgggtgtctctccccaaaaggaaccgtccaagcttggggtgtatttttggcgctcccaccgcggccgagctcgtgcccggagatgaggggaaagaggaggaggaaatggtggctgagaacaggaggcggaaaaccgcgggcgtactgccggttgaggtacagccccttctactctcagattccccggaatgtctcgtccttggaggtggtgatacaaacccggacctcctacgtcacatgcccactgacagaggggtgggagaccaggtacggaggacttggaacttgaaactgcaaacttttggcatccttcccagatgcaaagagttgaccagttttatcgccttcgtttacttctctcgtcttcgttaccactgttaatcggcacttaggaggtattgattgccttgttatttacatttctatataaatatgaaatgtaaaccccgagacataaaagttgtgcacgcagcagttaagtggcatgactgagacacaaatctaggcttccagataactgcagctcctactgtacaaataaaatctgctgtttattgaagacccgttatgttaagctagttatattatctagattttacgacagtaatcaggccctgaaaagttgagatagtacagttcttgctccaaatcctgttgtcttaatcactttactatattgctgcctccaggtttgtgtgtcttctgtgtagcagaccactccaagtcagtattcagtttctcagtctcaattccaaattcctaggaactccttggagtgtctagtggtacaaccatgtttctgttagaggccagtcactgtagattgtagtctgggagggaagcgctgcagttatcagaaacttcgaatgcgctgacatttcagtagacgtctaccagtcttcctgctgttttagtacagctttaagaattacaatctggccgtgtgcagtggctcatgcctataatcccagtgctttaggaggcagagatgggaggatcacttaagcccagaagttcgcgttcaaaaccagcctaggcaacagagacccagtctctacaaaaaaaaaaaaaaatttttttttcttaattagccgggtgtggtggcctgcacctgtagtcctagctacttgggaggctgaggcaggaggatcgcttgagcccaggatgtcaagactgcagtgagctgtgatcgtgcagtggctggagccactgtgctccagcctgggtgacagagccagaccctgtctcaaaaattagaatctcagtatcatcgtaacactcctgaacctgctgtttaggcaagtaatttaacctctttgggcctccatttcttcagctgtaagatatctatttacatataggtctgtgatccatatgtgaccatataattatatacttggtacagccctaggctgaagtgttttttgggggttttgtttgtttgtttgttttggtttttttgagacagagtcccactctgttgcccaggttggagtgcaatggcgcgatctgggcttaccgcaacctgcgcttcccaggttcaagcaattctcctgcctgagcctccgagtagctgggattacaggagcatgccactatgcccggctaatttttgtattttctgtagacacggggtttgaccatgttggccaggctggtgaagcttttattcttaatgaaactggaattgaccataagcgtttttgttctctttgcagcctaatgacagtgaagtggacatgtttggtgactatgatagctttactgaaaactcctttatagctcaagttgacgacctggaacaaaaatatatgcaactccctgaacataagaaacatgctacagactttgccactgaaaatctttgctcggaaagtatcaaaaacaaactcagcattactaccata

SEQ ID NO: 12370 - DNA, 744 bp, Homo sapiens
gagagctaacttggggtcttttcccaaggtggatgtagaagcgggctccggcgtcccactctcccttccatatgggcttagcgtctgggtcactgagaacgacgtctgaatagggccctgggtccttgccatggatgaatgtggttcccgcatccgccggcgggtgtctctccccaaaaggaaccgtccaagcttggggtgtatttttggcgctcccaccgcggccgagctcgtgcccggagatgaggggaaagaggaggaggaaatggtggctgagaacaggaggcggaaaaccgcgggcgtactgccggttgaggtacagccccttctactctcagattccccggaatgtctcgtccttggaggtggtgatacaaacccggacctcctacgtcacatgcccactgacagaggggtgggagaccaggtacggaggacttggaacttgaaactgcaaacttttggcatccttcccagatgcaaagagttgaccagttttatcgccttcgtttacttctctcgtcttcgttaccactgttaatcggcacttaggagcctaatgacagtgaagtggacatgtttggtgactatgatagctttactgaaaactcctttatagctcaagttgacgacctggaacaaaaatatatgcaactccctgaacataagaaacatgctacagactttgccactgaaaatctttgctcggaaagtatcaaaaacaaactcagcattactaccata

SEQ ID NO: 12371 - DNA, 3429 bp, Homo sapiens
tttcccaaggtggatgtagaagcgggctccggcgtcccactctcccttccatatgggcttagcgtctgggtcactgagaacgacgtctgaatagggccctgggtccttgccatggatgaatgtggttcccgcatccgccggcgggtgtctctccccaaaaggaaccgtccaagcttggggtgtatttttggcgctcccaccgcggccgagctcgtgcccggagatgaggggaaagaggaggaggaaatggtggctgagaacaggaggcggaaaaccgcgggcgtactgccggttgaggtacagccccttctactctcagattccccggaatgtctcgtccttggaggtggtgatacaaacccggacctcctacgtcacatgcccactgacagaggggtgggagaccagcctaatgacagtgaagtggacatgtttggtgactatgatagctttactgaaaactcctttatagctcaagttgacgacctggaacaaaaatatatgcaactccctgaacataagaaacatgctacagactttgccactgaaaatctttgctcggaaagtatcaaaaacaaactcagcattactaccataggcaaccttactgaattacaaactgataagcacacagagaaccagagtggatatgaaggtgtcactattgaacctggagctgatcttttgtatgatgtaccttcctcacaggctatatactttgaaaatttgcagaactcttcaaatgatttgggtgatcattctatgaaagaaagggattggaagtcatcctctcacaacactgtgaatgaggaactgccccataattgcatagagcaaccccagcaaaatgatgagtcctcttccaaagtcagaactagttcagatatgaacaggagaaaaagtattaaagatcatctaaaaaatgccatgactggaaatgcgaaggcccagacaccaatattttctagaagtaaacagctcaaagacactctcctatctgaggaaattaatgttgctaagaaaacagttgagtcatcatcaaatgaccttggtcctttttattcattacccagcaaagtgagagacctttatgcccaattcaagggaattgaaaaattatatgaatggcaacatacttgtttaacattgaattctgtgcaagaaagaaaaaatttaatatattccttgccaacaagtggtggaaaaaccctcgtggctgagattttaatgctgcaagaactgctttgctgtcggaaagatgttttaatgattcttccatatgtggcaattgtccaagaaaagatttcaggtttgtcaagttttggtatagaactcggtttctttgttgaagaatatgctggaagcaaaggaagatttcctccaactaaaagaagggaaaagaaatcactctatattgccactattgaaaaaggacatagcttggtgaactccttgattgaaactggaagaattgacagtctgggtctggttgttgtagacgagttgcacatgattggtgaaggaagccgtggagctacactggaaatgaccctagcaaaaatcctctacactagcagttgagttaaaagaatatctgaaaataaatgatacaatatatgaagttgacagcaaagctgagaatggcatgactttttcacgtcttcttaattataagtattctgataccctaaaaaagatggatcctgatcacttggtagcattggtgacagaagttattcccaattattcctgcttagttttttgtcctagtaagaagaactgtgaaaatgtagcagaaatgatatgcaaatttttaagcaaggaatatctgaaacataaggagaaagaaaaatgtgaggtgattaagaacttgaagaatattggcaatggcaacctgtgtcctgttttaaagcgcactatcccatttggagttgcctatcaccacagtggcttaacaagtgatgaaaggaaactcttggaggaggcctactccacaggagtgctctgtctttttacctgcacatctaccctagcggcaggtgtcaacctaccagctcgaagagttattttaagagctccctatgttgctaaggaatttttaaagaggaatcaatataaacagatgattggcagagctggtcgtgctggaatagatactattggggagagtatcctcatattgcaagaaaaagacaaacaacaggtattggagttaataactaaaccattggaaaactgttacagccatcttgttcaggaattcaccaagggaatccaaacattatttctctctttgattggtttgaagattgcaacgaatcttgatgacatctatcatttcatgaatggtacattttttggtgttcagcaaaaggttttattgaaagaaaaaagtctctgggaaataactgttgaatcacttagatacctgacagaaaaaggactcctacaaaaagacactatttataagtctgaagaagaggtccaatataattttcatattacaaagttgggacgtgcttcatttaagggaactatagatttagcttattgtgacattctgtacagagacttgaagaaaggtcttgaaggacttgtgcttgaaagccttcttcatctaatctacctaacaaccccctatgatctggtttcacagtgtaaccctgattggatgatatacttcaggcagtttagccaactcagtccagcagaacaaaatgtagctgccattcttggagtctctgaaagctttattgggaagaaagcatcaggccaagccatcggaaagaaggtggacaagaacgttgtcaacaggctatatctgtcttttgttctttataccttgctcaaagagaccaacatttggactgtatctgaaaaatttaatatgcctcgaggatatatacaaaatcttctcactggaactgcctcattctcatcttgtgtgttacatttctgtgaggagcttgaggagttttgggtttacagagcccttttggtagaacttaccaagaagctgacttactgtgtaaaggcagaattaatccctctcatggaagttactggagttttagagggtcgagcaaaacagttatacagtgcaggttacaaaagtctaatgcacttagctaatgcaaatcctgaagtgctcgtaaggacaattgatcatttatcaagacgccaagccaagcaaattgtttcatcagcaaagatgctgttgcatgaaaaagcagaagccctgcaagaagaggtagaagagttactaagattgccttctgatttccctggtgctgtggcttcttccactgacaaagcatgaagctatctgatgagaattttcatatatgaattatttattgtacatgtgtgttattaaagataacttatactttataaatgaaaaaatacatttcagttatacattaagaa

SEQ ID NO: 12372 - DNA, 3315 bp, Homo sapiens
gagagctaacttggggtcttttcccaaggtggatgtagaagcgggctccggcgtcccactctcccttccatatgggcttagcgtctgggtcactgagaacgacgtctgaatagggccctgggtccttgccatggatgaatgtggttcccgcatccgccggcgggtgtctctccccaaaaggaaccgtccaagcttggggtgtatttttggcgctcccaccgcggccgagctcgtgcccggagatgaggggaaagaggaggaggaaatggtggctgagaacaggaggcggaaaaccgcgggcgtactgccggttgaggtacagccccttctactctcagattccccggaatgtctcgtccttggaggtggtgatacaaacccggacctcctacgtcacatgcccactgacagaggggtgggagaccagcctaatgacagtgaagtggacatgtttggtgactatgatagctttactgaaaactcctttatagctcaagttgacgacctggaacaaaaatatatgcaactccctgaacataagaaacatgctacagactttgccactgaaaatctttgctcggaaagtatcaaaaacaaactcagcattactaccataggcaaccttactgaattacaaactgataagcacacagagaaccagagtggatatgaaggtgtcactattgaacctggagctgatcttttgtatgatgtaccttcctcacaggctatatactttgaaaatttgcagaactcttcaaatgatttgggtgatcattctatgaaagaaagggattggaagtcatcctctcacaacactgtgaatgaggaactgccccataattgcatagagcaaccccagcaaaatgatgagtcctcttccaaagtcagaactagttcagatatgaacaggagaaaaagtattaaagatcatctaaaaaatgccatgactggaaatgcgaaggcccagacaccaatattttctagaagtaaacagctcaaagacactctcctatctgaggaaattaatgttgctaagaaaacagttgagtcatcatcaaatgaccttggtcctttttattcattacccagcaaagtgagagacctttatgcccaattcaagggaattgaaaaattatatgaatggcaacatacttgtttaacattgaattctgtgcaagaaagaaaaaatttaatatattccttgccaacaagtggtggaaaaaccctcgtggctgagattttaatgctgcaagaactgctttgctgtcggaaagatgttttaatgattcttccatatgtggcaattgtccaagaaaagttgcacatgattggtgaaggaagccgtggagctacactggaaatgaccctagcaaaaatcctctacactagcaaaacgactcaaattattggtatgagtgcaacattaaacaatgttgaagacctacaaaagtttcttcaagcagaatattataccagtcaatttagaccagttgagttaaaagaatatctgaaaataaatgatacaatatatgaagttgacagcaaagctgagaatggcatgactttttcacgtcttcttaattataagtattctgataccctaaaaaagatggatcctgatcacttggtagcattggtgacagaagttattcccaattattcctgcttagttttttgtcctagtaagaagaactgtgaaaatgtagcagaaatgatatgcaaatttttaagcaaggaatatctgaaacataaggagaaagaaaaatgtgaggtgattaagaacttgaagaatattggcaatggcaacctgtgtcctgttttaaagcgcactatcccatttggagttgcctatcaccacagtggcttaacaagtgatgaaaggaaactcttggaggaggcctactccacaggagtgctctgtctttttacctgcacatctaccctagcggcaggtgtcaacctaccagctcgaagagttattttaagagctccctatgttgctaaggaatttttaaagaggaatcaatataaacagatgattggcagagctggtcgtgctggaatagatactattggggagagtatcctcatattgcaagaaaaagacaaacaacaggtattggagttaataactaaaccattggaaaactgttacagccatcttgttcaggaattcaccaagggaatccaaacattatttctctctttgattggtttgaagattgcaacgaatcttgatgacatctatcatttcatgaatggtacattttttggtgttcagcaaaaggttttattgaaagaaaaaagtctctgggaaataactgttgaatcacttagatacctgacagaaaaaggactcctacaaaaagacactatttataagtctgaagaagaggtccaatataattttcatattacaaagttgggacgtgcttcatttaagggaactatagatttagcttattgtgacattctgtacagagacttgaagaaaggtcttgaaggacttgtgcttgaaagccttcttcatctaatctacctaacaaccccctatgatctggtttcacagtgtaaccctgattggatgatatacttcaggcagtttagccaactcagtccagcagaacaaaatgtagctgccattcttggagtctctgaaagctttattgggaagaaagcatcaggccaagccatcggaaagaaggtggacaagaacgttgtcaacaggctatatctgtcttttgttctttataccttgctcaaagagaccaacatttggactgtatctgaaaaatttaatatgcctcgaggatatatacaaaatcttctcactggaactgcctcattctcatcttgtgtgttacatttctgtgaggagcttgaggagttttgggtttacagagcccttttggtagaacttaccaagaagctgacttactgtgtaaaggcagaattaatccctctcatggaagttactggagttttagagggtcgagcaaaacagttatacagtgcaggttacaaaagtctaatgcacttagctaatgcaaatcctgaagtgctcgtaaggacaattgatcatttatcaagacgccaagccaagcaaattgtttcatcagcaaagatgctgttgcatgaaaaagcagaagccctgcaagaagaggtagaagagttactaagattgccttctgatttccctggtgctgtggcttcttccactgacaaagcatgaagctatctgatgagaattttcatatatgaattatttattgtacatgtgtgttattaaagataacttatactttataaatg

SEQ ID NO: 12373 - DNA, 20360 bp, Homo sapiens
ttttaggaactatagatttagcttattgtgacattctgtacagagacttgaagaaaggtcttgaaggacttgtgcttgaaagccttcttcatctaatctacctaacaaccccctatgatctggtttcacagtgtaaccctgattggatgatatacttcaggcaggtgagaatataacgtttttcaacttaggctacttcgtttatgaattattacatgctgttttgttttgttttttagagatgaggctttgccatgttgcccaggctggtctcaaactcctaggctcaagcagtcttcccacattgtcctcccaaagtgctaggattacaagtgtaagccactgtacccggcctattatatgctttttatgaagtgattattcactttttttctctattaaaatatatttggaattggatatttttttctttcagtttttaaaaattataatctggcaacagcatttatggttcgtttaactttaatgttacttttctcttaaatataaacatatttgttattgaaaaaagtaaaggttaaaaaaaagaaaaaaagattatccgtggtcctatttccccacagaaagttactgttatgatcactgcatttgataatgcctagaatgcaaagaaaacagtgaaaaccatctctgatgatttagagtttaattacatgaaagctcggtcagagccaagtatgataatacattaaacccaatgacgttaataactgaaaaggaatatttattttacaacccatcacaaagtagaactgtccatacttattataaagccaagtggtaacatacagtatattatgattttactgtgaacaggctagctgtataaatgtatattagggctgcatgtggtggctcatgcctgtaatcccagcactttgggaggccaaggtgggaggatcacttgaggtctggagtttgagaccagcctgggcaacacggtgaaaccccgtctcttctaaaagaatacagaaattagttggtcatggtggcgcacaccagtagtcccagctactcaggaggctgaggcagtagaatcgcttgaacccaggaggcggaggttgcagtaagctgagatcatgccactgcactccagcctgggtgacagaatgagactgtctcaaaaaaaaaaacaaaaacagaaacaaaaacgtatattagacagaggtagtatacatcttttaatcacaggaaattagctttctttttaatgtcatatttttaaatcattactgtttttttttcttttctccatctcttctcaacttcctgagtttacattactcaggaagtaagttttttttaagtagcactatataatgcaattactctcaaacctttccttctccttcccctcagccatctggtattaaatatagtcatatagtccatggaaaccagtacttgtggctatgcctttaagtaattctaaagtgtgttatatccttgttatatcctaatgatgtaactttaaaacctgcaacatttacaaatatatttatcttgttttttgtatcctgaatcatgagaatgtgatatcaaaagaaatactggatttggttcacatgacagattttttgatgtttccatctatttgctctttttccatgtagtttagccaactcagtccagcagaacaaaatgtagctgccattcttggagtctctgaaagctttattgggaagaaagcatcaggccaagccatcggaaaggtaccacattctttttttcttcctaaataataagttcactcaacacttagttcactcactaagttcactcaacaaaattagtaccattatattgatcttttttggtttacattttttcctttaaattagtataacgttcattttactacttaaaacatacctgagcacccaaaatgtatgaatatttttaaacaacatttatttctgggtagtgtgatgacctttttttgggtagcatgaaatgttttcataatattacacaatcctgatataagttcaattcaaacgaggaaatacattttctagaaactatattaggctttctatttggtatcaaggattctaagataggacaggtctgggttttttgttactgcttttgtcatcctcaaagaactcctagtctagtacttatattacataaagcattttagaaggttaaaggggataagctaatactcgttggtgtgatatattttggtgttttaaaattcagtctgcaggcatgaagcaagttatcaaatgcatacactaactttaagagaaattgaagtaattctttcataaccataccttcgatttccttaagagaatgttattttcccccttgtaatacacttttttttttcattttaaattttatttggcaatccaatttacattgaaacctagttaccttccattttcccccacaccttttttttttttttttttgaggtgcagtctcactctgtcgcccaggctggaatgcagtggcatgatcttgggtcactgacacctccaccttccaggttcaagcaattctcctgcctcagcctcctgagtcactgggattacaggcgcctgccaccacgcctagctaatttttgtatttttaggagagacagggtttcaccatgttggccaggctggtctcaaactcctgacctcaggtgatccacccgcctcgttctcccaaagcattgggattacaggtggctctcaggttgggagccaccacacccaacctcctctataccttttaaatttacatagacagtacagatttcattttgtaaaatggaagatgatgtttacatacacttaaattgatggtgcagtgtcccatgcatcactgtgtcataaaatcaaaaatattgggcccggcacagtggctcatgcctgtaatcccagcactttgggaggccgaggtgggcgaccatgaggtcaggagttcaagaccagcctgaccaacatggtgaaaccctatctccactaaaaatacaaaaattagctatgtgtggtggtgggcacctgtaatcccagctactcaggaggctgaggcaggagactcacgtgatctgggaggcagaggttgcagtaagctgagatcacaccactgcactccagcttgggtgacagagcaagactctgtctcaaaaaaaaattccatgagcccagcacagtggcacacacctgtactcctagcttctcaggaagctgaggcaaaggatttgcttgtactcaggagtttcaggatagcatgggcaacatagtgagaccctgtctcaaaaataaaaataaaagtatctgtagtacttaagcattcatgttatcacaatttttagattgggtcttttactttggaaatggctatgctgtttagaccttcaaaatgctgaataaaaatatttcttaaaacaaaccttttatatcaaactctgaaatgtaaaataaaaacaatatcattaatttggaactaattatcaaataataataaacatgcaaaaatcttattagaataatatatctttttaagcttgaatccagaatttatttttgttacatttaatgtaatatagtcaacaaatatttgccaaattgatacatatttaaaatagtatggacatgaacttatcttaattacaaatggattaattactagtttaatgttttggaggtataattttttaaaactctggagaacatatttaaatacttaaaatctaattgatttctccacattgaaaaagaggccccccacctgaccttttttgaacattcttgatttcttgcaaaagattttttttttttttgatacagagtctcgctcttgtcgcccaggctccaggctgcagtgcaatggcacgatctcagctcactgcaacctccgcctcccaagttcaagtgattttcctgccttagcctcccaagtagctgggattgcaggtgcccgccatcatatacagctaatttttgtatttttagtagagatggagtttcaccatgttggccaggctgatcttaaactcctgacctcaggtgatacgcctacctcaacctccaaaagtgctgggattacaagcgtgagccaccgtgccctgccacaaaagatcttgacattggcataaagcattgtattttgccatataataattatatcatttttcttggcttaggaaatacattctaagaaaaaacctacattgactcaatttatagttagtactgaagatgcactaaaattgggaaattaaatagctctcttttcctacttgatgttcagctgtcatactttttcagcttaatgcttttaaaaaagtgatccagtatcaacatgcagaatatgtaactcatacatccttcaatttgtcaccgtaagttctcatttcattcttttactatggtggaggatataattttatattttattttattttttattattttacagttttttttaaaatagagacaggttttcaccatgttgcccaagctggtcttgaactcctgaacttaagagatcctcctgcctcagccttccaaagtgctgggattacaggtgtgagctaccactcccaacctctattttattttttatacctactttttcttttttaagttcatctttttgccctcaattttaagaattgattagtttctaagctagctatgaaatcctttatgcacaaatgtggtcatcaggcaccacaggccaaagcaggtatacagaatcgaaatcatcaactacaggaagcatttttcaatctctttcaggtgttttagcttggaccatgtggaaatcataggatctaatatttactcttagtttataatatagacaagcttattaacatatttatctaaagtacatttgtctaatttataataataatcacatacgtacacaatttacaaataccaactaactgtaaaagtctctctcaccaattccttcctttcctgtattcattttctacaaccgccataacaaattaccacaaatgggtggcttaaaacaacagaaatttattctcccacagttcaggagaccaaaagtccaaaatcaaggtattagcaatgttgattccttcaggagcctctgaggaaaaagccatccgtgcctctttcctagcttctgatggttactggcagtccttggtgttccttggcttatagatgcatccctccaatctcagcctccatcttcacattgctgccttctctgtgtctctctgtgtcttctcctcttataaggacactaatcattgaatttagagcctactgtaaatccagggtgatttcacctagagatccttaactgattgtatctgcaaatatcttgtttccaagtaagatcacattcacaggtaccaggggttaggatttgtacatttctttttgtggagtgatggagagggggtacaattccttccctgtagaaggaagtttaatttagattggaaataatttggtttatcttttaacttttatttatttttatttttatttttttgagacagggtctcactctgtctcccaggctgagtgcagtggtgctatctcggctccctgcaacctctgtctcctgggctcaagtgatccctcagcctcccaagtagccaggactacaggtgcgcgccaccacacccggccacgttttttgtttgtttttttgtggagacggagttttgccacgttgtccaggctgatctcaaactcctgggctcttgtgatccatctgccacagcctcccaaagtgctgggattacaggcatgagccactctgcctggccttatctttttattgtagttggaaaaatgataataaattttaattaatctgaagtacatctgttagaaattagttttgtttctatggaattattctatccttgctattctgtaatacaacttcagttttccttttgtccaattttaataacatacatttttagcaggtctagtaaacgaatttatttgattgtgtctttctagaaggtggacaagaacgttgtcaacaggctatatctgtcttttgttctttataccttgctcaaagagaccaacatttggactgtatctgaaaaatttaatatgcctcgaggatatatacaaaatcttctcactggaactgcctcattctcatcttgtgtgttacatttctgtgaggtaatttcattgaatatatgatatgtactttgtgcatcttctggttttaactgttactaaactaataagccagttagtcagtatgtcagcattttctccttgttgacatattctgttattacagagcactaaaaaactatttaaaatgtacgtttgtttttatctgtttatgaaactactattatgtacttatggtaacaatacaaaaattcctgagtcaactaaaacacataatgaaaagtgtctttttgacccaactcttaaagccaccattaatagtttcaggtattcagaattaactgttaaaaacaacctattgatgtagattccatgtgaatgtctttcacctgagtaataaaaatgtcaggtgtttggttagaaagttacctatatccaacagctaccatgtgactatttagtaccatattctctttttaaaaaaatttaattttgactggatgccatggctcccgcctgtaatcctagcactttgggaggctgaggcaggtggatcacttgagcccaggagttcgagatcagctgcttgagcaatgtgggaaaactccatctctacaaaaaataagaaaaattagccaggcgtggtggcacacgcctgtggtcccagctacttgggtctcactctgacgcccaggctggagtgtagtggtgtaatccaggctcactgcagctttgacctccagagctcaggcagtccttctgcctcagcctcctgagtagctgggatcacagacatgtgccaccacacctggctaattttttttgtttttttgagatggagtctcaggctggagtacagtggcgcaatcttagctaactgcaacccccgcctcccgagttcatgcaattctcctgcctcaacctctagagtagctgggattatagtcacacaacaccactcccagttaacttatgtatttttagtagagatagggtttcaccatattggccaggctgatctcgaactccggacctcaagtgatccacctgcctgggcttcgcaaagtgttgggattacaggcatgagccacagcgcccaaccaattttttaaattttttttgtgcaaagggtgggcgggggtggggggtctcactatgatgcccagcctggtcttgaacttcaggctgaagcgatcctccaggttgcccttccaaagtgctgggattacaggcatgagccgccacgcctggcccatattctcttgattgccactgtaatttagtatatttgcttccagtgtcaggcagctatttaaagcttttacatcaaatgtgtattttatagaacaatttaagaaggaaaccttatactggtcatatgcatttgtgatggatttaagactttattaaaataagctttcagaattcctttaaatagcacaataaagcttaccaggcttttacatccagatactttttttatgtgtttataatataagccatttttgctgcatttagatttcttcttattgggtggcataataatcctttccatatttgtttccaagtcaattttctaaaacttttttcccatgaattgttttctaaatttaaaatttacttcattttccctttcttaaaccttcatattctgtatatgtatatggcaattaattctatcatatgtgctaatgaaaggagtaaataattcaaaaatacttggctttcaattgaatgataattattttaacaaatttagctttctaaatatcttttacttgtgctgatttttaaatgttggtttataccccctgagcacatgctagttaaacagaagacaaaaattatgggtaataagaagaagctagcctttaaaatgtattttcttaagtcttctatatttgttgttttgtatatttaaagatgctttccctaatattttttccctttgttttcattgcgactatgaggacttgagccttatagaattgtttaagtaaaaaactctatgaagcatcaagaaaaacagcaataatttgatgactaatcctaagaaaaatctagctgacaatttgtactctaattaatttacttcatttatatatatcataattatataattacatataatataaatatataattatatgatatatattacatgtatataatttttcaaattattatcaatagaggcagggatcttgctgtgttgcccaggctggcctcaaactcctggactcaagcagtcctcccaccttggcctcccagagtgctgggattacaggcatgagccaccacacctggtctactttcaatatttcaaggcaggggtgttcaatcttttggcttccctgggccacattggaagaagaatcgtcttgagccacacataaaatacactaacaatagcttatgagctagaaaaaaaaaaaaaaaaaaatctcatggtgttgtaagaaagtttaccaatttgttttgggtgacattcaaagccatcctgggccgcatgtggcctgtgggccacaggttggacaagcttgttttaaggtattttttattttaaaaagttataaatggtatgaaatggtacattaattgtgttagttaagatgcttttaactacaagttacagaaaaacccatcaaggtttaaacaataagaaaaaataattattttatataacaggcatgccagaactaaggcagcttcaggattgattgattcaatagttctgttcaaggttttcttctttttactctgccatcttcattacgttgatttctttcttagtagtcacaagatggctagctaatgctgttccattcatcatgtacattcacagtgatatccaaaggctagaaagggaactttaaaataaaataaactactataatagaatattgcaaatatctatgacaaaatattatattgaattcccatttacccttctagctttaacagttattgactcatggcttccagtatttttattattgtattgttgcattgaacatcatgttacatttgaatatttccatatttaatattcatcttccagataaattccagatgtaggaattgtttttagtcacttgggaaagaaaaactatgcattttcttccaggtattttgattaaaatgaccagaactctttttattgacttatttttcaattttcaatcttttcctcatcctaaaaccagttcctcaaattcctcagggtcctccccatgtttcttcacatctgttttgcttagaatcatctttcatctctggcttaactcaagttccagaacttatgtaaggaacattctctctgagccccctatcacacaaaccaaactttgaaataacttacaaaatttaaattttatatatttctttgtgttctacaggagcttgaggagttttgggtttacagagcccttttggtagaacttaccaagaagctgacttactgtgtaaaggcagaattaatccctctcatggaagttactggagttttagaggtcagtagcttgttggtttcccaattgaaattatgttgaattaatacagaagccaggttttattattttctgaagtcttaatacagaggaagtgatagcaagagccttaattgctcatttgtcatgggaatcttttatttaaaacaaatagctgttatggccttccagaaatccgctgttactagatggcatacctgatgaaaaatctcagttgtgaaaaaaaaaacataacaggaagggtgggagtgactgtctccaagtatgttgtgctaccggttgtccttaacacttcttccttcctccactcctttgaagaattaccttctgtcagtttggactcagtgcttgtttaagataatggtgattcagtggcagaaagggtcatttgtattttttctaagagagtaagaagaaagggttcgcaactggttttccagctttctattttcagccaaccctcaacttcagtttattctctgttattcagttcttgagtcagaggagttctgcttaggacacacgcacacacacagagagagacaccagtggtcccctgagtagatggtgagaacactgaaagatattggacttggcctgatgatgtggctcatgctgcaatcacagcactttgggaggccaaggtgggtggatcaattgaggtcaggagttcaaaaccaacctggcccacatggtgaaaccccatctttactaaaaatacaaaaattagccaagtatggtgtcgtgcgcctgtaatcccagctacttgggaggctgaggcaagaaaattttgtgaacgtgagtggtgcaggttgccataagccaagatcgcaccattgcactccagcctgggcaacagagcaagactctttctcaaaaaaaaaaaaaagaaaagaaaagaaaaagaagaaagaaagaaagatactggactagaacattttacttgaggatatgagatgatgccaccaacctaagtgggtttcttttcttgattgcagcacacatcagttgactcaagctgcatagaactatagttaccttgtagtcagtttggaaccacccaaatgcatttttaaaaattcctcagtattctcatgtcttgtctcttcatatttactttattttatcccagtctcttacatgcagtttttgttcttttcagtaaagtgcttaattttcttttttctaatcccaaactattatcctactgatttttgtaacacttttcagggtcgagcaaaacagttatacagtgcaggttacaaaagtctaatgcacttagctaatgcaaatcctgaagtgctcgtaaggacaattgatcatttatcaagacgccaagccaagcaaattgtttcatcagcaaaggtaagcaaacaaaccattttttaaccttaataatcttgcgtagtgttatttccttgtattatagacatcagaacaaaaacatttcacattgcataactgtttatttctatagatacaaaagtacatactcttatttgtgagtaaaaataatgcatctgttgtgacacaagccttgcaaaacaaaaaaaggacctgctaaaaaataaagaaaatttcagtggtggctcatgcctgtaatcccagctctttggaaggtcaagatggggaggatggcttgaaatcaggagtttgagaccagcctgggcaacataatgagactctgtttctgcaaaaaaatttaaaaactaactgggtgtggtggtttgtgctgtagttctagctactccggagactgaggcaagaggatcgcttgagcccaggagttcaaggctgcactgagctaggatgacagattgagaccctgtccccccgccccaaaaaaaatgccaggcatggtgcctcatgcctgtaatcccagcactttgggaggccgaggcaggtggattacctgaggtcaggagttcgagaccagcctggccaacatggtgaaaccccatctccactaaaaatacaaaaatttagccagacttggtggcacacgcctataatcccagctactcgggaggctgaggcaggagaattgcttgagcccaggagacggagatggcagtgagccgagatcataccactgcactccagcctggctgacagagcgagattctgtctcaaaaaaaaaaaaaaaaatggctgggttcggtggctcacacctataatcccagcactttgggaggccaaggcaggtggatcacttgaagccaggaatttgagaccagcctggccaacatggtaaaaccctgtctctactaaaagtataaaaattagccaggcgtggtggcccacacctgtaggcccacacctgtaatcccagctactcaggaagctgaggcatgagaatcacttgaacccaggaggtggaggttgtagtgagccaagattatgccactgcactccaacctgggtgacagagtgagagtctgtcttaaaaaaaaaaaaaagacaatttcaagggttcattgaagtataaagaaccctggaagtcactgagctctgtctcccaaagttctcttcacaggaatcctttcctcagcatcccagcatctggtctctccacctttgagcaccagcactgacaaggagcctgcatcatcaaaaattaggttgtctatttttgtacactcttagtgttacaaaaattatcctgatatactgaggctaaattttgccttcttaaaatttctaccattgcatcagagtactacctctggaactggactctttttttgtttgtatgctgtttttcacatattcaaaaacagctcttattgcccccaagggtttctcttttctgttgcttttatctgtattaaataatcaagttttaggccattcactgtcctagttaccctttgctagatgcaacccagtttgccattgccttctgctccctgtgggtaaagccattccacagcaatttgagattgtttccttcttgatctcaactgtggttctaagtctgaaattgcttggcttctttgaagcttcattgttttactattttcatatataaatcagaattagctttccatcattttttaatggtgctcacattgcttacattaccttaattgttctttacaacaaacctatgaggtggacaaagtcagtgttacccccaatttatagatgaaaccactaagattgaccttgtcccgttaaattaggagttcttggggttggtagggatgaagttatagtcatttcctttgctatagcacctaaaaaaaaaaggttcattaaactttcacacacttgtttcagcatttactagtgatgtttgcctaactccattatttccatgatgcttatcaagaggtgattttctaacttcattatcccttctggatttatttactgatgttttactgtgaggaaaagcttttcctttatttattcatttatcagtatgtgctcataggttcaaacatattcaatgggttataacccattaataacattacttattttggtgctcaaatggcctcagatttggccagtggaagcccctgaaaactggtttgtgtggctttttgacctgtcatcatcattcttgaagtattttcttactttctggctgtgtctgtcagcatctaatcattaggaggcagaaaccacacagtaatttgaacaggcgtctaaggggtcaacagaactttaaagaattcaggaaggaatacatttgagagacggtccacccccaccccacagcacccctgtggatgggatccggacttcattgccactggatgctgggaagtttgttgtggtgctacagccaaggctaataagcagaaactgcccacggagtgctgacaaaactgcaaggaagctgcctacaatgtactgttgaacttgcccagaagtcagctctagggcccatggaactagggcactagctaggaccaccctagctgatgtatgtctatgtatttttctatacttatgtgtaaattactgaaggccatgagctcatactgataaccctaattctgatttttccacgtacatacgctacataacagagtctaactccaaaatttagtggcttaaaacagccatcttattttgctcatgtttttgtagattaggaattctggaggggtgcagctgggtgcttctcacttgggtctcaggcaactgtagtcagaagttgactggagctatagtcataaggcccagcagagctggatgacccaggtgactcactcacatgaccaacagctgataattggaggcaactggggcttttcagcttttgactggagcaactacatatggcctttccatgtggcttcagtctttatggcatagaaactaggttttgagagggaatgtccagaaaatgagcattttaagatatccaggcagaaaatgcaagaagtcttctgagccaacctcagaagttatacagtgtcatttccgctgcatactgttggttactagaaaaccgttaagacctagattgaaaggaaaggggatcagaccacctcttcatgagaagagtgtcaaataatttgtggtcatctttaaaatctgccctctggtcacaaattgtttctgttcctcccacatgcaaaatatattaacccccaaaaggcttttccattatagtttctattaggaaaaactcaaagtcttttttgttgttgttgttcccccactcaacactcaacaaacacaacacagacagaagatttctgtgaccaaatgtgagggatttctccccaaaaaaacaagcaatcatttctgtagcagacatcagctgggtgtcctgacactatctagctggagtctgggcttctaaaacttcttaccaattcaagttggggttccctcaacctcttctctgggttcagtcagctcacgaaactcaggaaaacatgcgtataataaaggatatcacaaagatacagatgaagagattcataggtcaaggtatgggggaagtggcacagagctttcatgccctccctgggcacagcaccctccatgtgttcagctgtctggaagctctgtgaatcctgtactcttagacctcttatggaaactttattgggttggcatgattgacaatcatgtagaaatgtgactggacagaaagggtatgatttattaataatactaacagattgagtggggaaacccagcaagacccgtctgttcagattcttctggcctctctgtgcagcattcctttcttcagagtatggggcaggacactctgggatgagggtctttttacttgtttttggagacagggtcttgctctgttgcccaggctggagtgcaatggcacaatcatagatcactgcagccttcccctcccaggctcaagcagttctcccatctcagcctcatgagtagctaggaatagagacaggtgccacgcctggctaatgtttttaatttttaatagagacaaggttttgctatgttgcccaggctggtcttgaactccgggcctcaagcaatccttccatcttggcttcccaaagtgttgggattacaacatgagccactgcacccagcctggaatgagggttttaagacccaatgatcagattagagttctgccttaggcaggcaaaaggagggcagaagaaggtcagagagagaaattctgttttctgaggtctaaagtgccccatcattgtaagaagggctgtgggagttatgagccaggaaccgtggatgaagaccaatatatgtctatcataatatcacagcatcagactcagatccagtattctaaatcaagtccgagtgtgagtgatacaccttcagtacagtttcacaagttacagttcttcttaatctgaagaccagtgaactaaagagacactacataaaacagtgaaactagaaataggataaccatagtatactctcattcataaagaaggaaaatgggtagtgcacagcagcagttctgaaatccagccagtcatatgtggccagttccttaattatgtcccagttcttctctctgggaatggtttttcttggctttgggttctctcatttgagtcattctcccttttccataagcaataaacccatgtttgctgctaggtagctttctcaatgtgcttcctatatgtagttcaagaatattgaagttcaagagttcaggctcaggtgtagtggctcacacctgtaatcccagcactttgagagaccagagtgggagaatcacttaaggccaggagtttgaggtcagcctgggcaacatagcaagaccctgttcctacaaaagaaatttttttttttaattagccaggcatggtgatgtgtgcctgtggtactcatgaggctgcaatgggaggatcatttgagcctgggagatgaaggctgcaatcagctatgatcatgccactgcactccaacctgggcaacaaagcgagaccttatctctattttatttttaatttaattaaattaattaattttatttatttatttatttattttgagacagggtctgactctgtcacccaggctggagtgcagtagcatgatcttggcttgctgcagccttaacctcccaggctcaagcaatcctcctacttcagcctcccaagtaactgcgaccacaggcgggcaccactatgcctaactaaattacctttttaaatttatttttcaccatgctgcccaggctggtctccaactcctgagctcaagtgatccaccctcctcagcctcccaaaatgctgggattacgagtgagccaccatgcctgggggagaccctatctctaaatttaaaaaaaaaaaagttcaaaggcacttgatgttttgtattgtctgtctctttttattcaatctagtataatatcttttaaaacactgcagtttcttatttgtctatttataatctctatgttgcttgactttcttttttttttttttttttttgagacaaggtctccctctcactccaactggaatgcagtggcacaatcatgcctcactgcaaccttagcctcccaagctcaggtgatcctcccacttcagcctcccaagtagctgggaccacaggcatgcaccaccacacccagctaatttatgtaattttttttttttttttagagatggggtttctccatgttgcccggtttggtctcgaactcctgggctcaagcaatctgcccaccttggcctcccaaagtgctggggttacaagtgtgagccaccttgcctatcctagcttggctttcttacagtgtggatgctaggatctgagggggaggattcacatgaccttggaatgatctcatttcaagaccccaaggcctttcttaaactgagacctgtcatgtggcatcatttcttctgcattctattagttataagtgaatcacaaaggctagcacagattcaagaggagaattagatcccgtctctcaatgaaggtgtcaaagaatttccaatcatctttaatttgccacactaatcccatacaggacttgctatatagtcttcctctttttcatatttgtacttcctttctccaataatgagaaacctcatccctgtgtttattaatatatttctgttttcctcaatcttagaatgcactgaaagtaactgcagaattgttaaattataccactccaaaaaaaacaaacattcagtatttatttacagcactttttgtcttcagtctgagagtatataattaaaataatgtgttaaaatgttacttggtttggggtttaaaaaaatctgcttcagtgtggctgttatacatttgaaacacaaattctactggtattccattttatttcctctccttccctcacagatatttttttagggggagtggggaggaactaggtctctgtcacccaggctagagtgcagtagcaccatcatagctcactgcagccttgaactcccaggctcaggtgatcccaccttagcctcctgagtggctgggactataggtatgggccaccattcctggctaattttttgttgttgttgtagaggcttggtctcactgcattgcccaggctggtctctaacttctggcctcaagcaatcctcctgcctcaacctcccaaagtgctgggattataggtctgagccaccatgcccggcctatctcgtttttattctctttattgttttcctgctttttaaattttttcagtggccctaattaggttttttatttaaatctgtttttctatggacacccagttatttagttatagttattagtttttatttctaatatgattttgcctttttcttttatttcattcctgagctcagtcaacttttgtatcatttcttccagtttttgtccatgtcggttcttagttttttaacttcttatttagagagcatttctactcctcctcatatctccagatttttatttgagaatatttaattttgtttggagtgttgtgttacagtttttctgcttcatggtttgctttcaggaagggaaatttttatgagatgaagagtttgggttcttattggttttcttttctctttttttttttgagacagagtatcgctctcttgcccaggctggagtgcagtggtgcaatcttggctcactgcaagctccgcctcccaggttcacgccattctcctgcctcagcctcctaagtagctcggactacaggcgccggccaccttgcctggctaaatttttttttgtatttttagtagagatggggtttcactgtgttagccaggatggtctcgatctcctgacctcatggtctgcccaccttggcctctcaaagtgctgggattacaggcatgagctaccatgcccagccttgttttctttttatatagtagttttgtatagatgagaactgcttgtgcctctgcatatcttggacaacacagtcatttggaatgatttatgagatcccagttcaagagtgttctcttctgtcagagtagcaaagtatttttctttaatggatgacttggggtgggagaggaatgcaagtttgtttgtttgtttgtttaatttccttttgccctacaagattgtaaattttgtccttttttcctcttcctctcatggctgagcttccaaaaggcacctcccttttcacccattctctcccctaaaagcattgcctttcgaagactgcctcctagagtcccacatgcattttaaatatcttcctataaacaatgctttaatcaaccaacattcttttttcagtatttttatatttgggtaggctttttctctctggaggtgatcttatttcattttagaccctctatttccctcttatcttgttcatgtgttttttttttctcaaccccatctggatctctgcaaacacttgggtgggagctcaagaaactggttttggctgagtgtagtggctcacactataatcccagcactttgggaggccaaggcaggaggatcgtttgagcccaagagtttgagaacagcctggacaacatagggagatccagtctctacaaaaaaagctttttaaattttttctaattaaaaaaaaaaaaagaggctgggcatggtggctcacacctgtaatcccagcactttgggaggctgaggcaggcagatgatgaggtcaagcagtggagaccatcctggccaacatggtgaaaccccatctctactaaaaatacaaaaattagctgggtgtggtggtgcatgcctgtagtcccagctactcagaaggctgaggccttctgaatcacttgaacctgggaggcggaggttgcagtgagctgagatcacgccaccgtgctccagccaggcgacagaacaagactccgtctaaaaaagaaaaaaaggcgggtgggggggagcggaatttattcttccacaaattggtgggcttttttaaacaagtaatttgaggttcttgatattctctgtattatagtaatactaacacaagggttttgtgtagtttacttattattcttattgatctatatagcttattatttggtaaaaattcattgacatctttcatatgccatgtttggaaatactttttttgctcattatgttgcttttgaaattaacagttttaagtttaggaacttgaataaaacttttatttgaaatactggtagctttttaaagcatactaaattttgaggaataataaaatgcatatatataaaggataacatttttcaggagctaattaaatttttgcaaaattgtcttagattttatagattaaaagttaatttttaagtggctgagtcttcaataaaacaaatctttgggagaattaaagctcctttatttttggtatactaaaaggcagtgatcagctaaaatggttttaactaaatgcctcatcttcattgactataatcgtttattcttaagtggccatttttcaatctcattatagttttaatgtctagatttctgatgtgtaaggattcaggtgttcaatggacagtggtaaaattgttggcaattctctagcaatgcatattttggcctcacgtcttaattttttaatgtagatgctgttgcatgaaaaagcagaagccctgcaagaagaggtagaagagttactaagattgccttctgatttccctggtgctgtggcttcttccactgacaaagcatgaagctatctgatgagaattttcatatatgaattatttattgtacatgtgtgttattaaagataacttatactttataaatgaaaaaa

SEQ ID NO: 12374 - DNA, 631 bp, Homo sapiens
ttttaggaactatagatttagcttattgtgacattctgtacagagacttgaagaaaggtcttgaaggacttgtgcttgaaagccttcttcatctaatctacctaacaaccccctatgatctggtttcacagtgtaaccctgattggatgatatacttcaggcagtttagccaactcagtccagcagaacaaaatgtagctgccattcttggagtctctgaaagctttattgggaagaaagcatcaggccaagccatcggaaagaaggtggacaagaacgttgtcaacaggctatatctgtcttttgttctttataccttgctcaaagagaccaacatttggactgtatctgaaaaatttaatatgcctcgaggatatatacaaaatcttctcactggaactgcctcattctcatcttgtgtgttacatttctgtgagatgctgttgcatgaaaaagcagaagccctgcaagaagaggtagaagagttactaagattgccttctgatttccctggtgctgtggcttcttccactgacaaagcatgaagctatctgatgagaattttcatatatgaattatttattgtacatgtgtgttattaaagataacttatactttataaatgaaaaaa

SEQ ID NO: 12375 - DNA, 2136 bp, Homo sapiens
aagtttatgcgtgcttccggtccgcgagccctgagagctaacttggggtcttttcccaaggtggatgtagaagcgggctccggcgtcccactctcccttccatatgggcttagcgtctgggtcactgagaacgacgtctgaatagggccctgggtccttgccatggatgaatgtggttcccgcatccgccggcgggtgtctctccccaaaaggaaccgtccaagcttggggtgtatttttggcgctcccaccgcggccgagctcgtgcccggagatgaggggaaagaggaggaggaaatggtggctgagaacaggaggcggaaaaccgcgggcgtactgccggttgaggtacagccccttctactctcagattccccggaatgtctcgtccttggaggtggtgatacaaacccggacctcctacgtcacatgcccactgacagaggggtgggagaccaggtacggaggacttggaacttgaaactgcaaacttttggcatccttcccagatgcaaagagttgaccagttttatcgccttcgtttacttctctcgtcttcgttaccactgttaatcggcacttaggaggtattgattgccttgttatttacatttctatataaatatgaaatgtaaaccccgagacataaaagttgtgcacgcagcagttaagtggcatgactgagacacaaatctaggcttccagataactgcagctcctactgtacaaataaaatctgctgtttattgaagacccgttatgttaagctagttatattatctagattttacgacagtaatcaggccctgaaaagttgagatagtacagttcttgctccaaatcctgttgtcttaatcactttactatattgctgcctccaggtttgtgtgtcttctgtgtagcagaccactccaagtcagtattcagtttctcagtctcaattccaaattcctaggaactccttggagtgtctagtggtacaaccatgtttctgttagaggccagtcactgtagattgtagtctgggagggaagcgctgcagttatcagaaacttcgaatgcgctgacatttcagtagacgtctaccagtcttcctgctgttttagtacagctttaagaattacaatctggccgtgtgcagtggctcatgcctataatcccagtgctttaggaggcagagatgggaggatcacttaagcccagaagttcgcgttcaaaaccagcctaggcaacagagacccagtctctacaaaaaaaaaaaaaaatttttttttcttaattagccgggtgtggtggcctgcacctgtagtcctagctacttgggaggctgaggcaggaggatcgcttgagcccaggatgtcaagactgcagtgagctgtgatcgtgcagtggctggagccactgtgctccagcctgggtgacagagccagaccctgtctcaaaaattagaatctcagtatcatcgtaacactcctgaacctgctgtttaggcaagtaatttaacctctttgggcctccatttcttcagctgtaagatatctatttacatataggtctgtgatccatatgtgaccatataattatatacttggtacagccctaggctgaagtgttttttgggggttttgtttgtttgtttgttttggtttttttgagacagagtcccactctgttgcccaggttggagtgcaatggcgcgatctgggcttaccgcaacctgcgcttcccaggttcaagcaattctcctgcctgagcctccgagtagctgggattacaggagcatgccactatgcccggctaatttttgtattttctgtagacacggggtttgaccatgttggccaggctggtgaagcttttattcttaatgaaactggaattgaccataagcgtttttgttctctttgcagcctaatgacagtgaagtggacatgtttggtgactatgatagctttactgaaaactcctttatagctcaagttgacgacctggaacaaaaatatatgcaactccctgaacataagaaacatgctacagactttgccactgaaaatctttgctcggaaagtatcaaaaacaaactcagcattactaccataggcaaccttactgaattacaaactgataagcacacag

SEQ ID NO: 12376 - DNA, 574 bp, Homo sapiens
aagtttatgcgtgcttccggtccgcgagccctgagagctaacttggggtcttttcccaaggtggatgtagaagcgggctccggcgtcccactctcccttccatatgggcttagcgtctgggtcactgagaacgacgtctgaatagggccctgggtccttgccatggatgaatgtggttcccgcatccgccggcgggtgtctctccccaaaaggaaccgtccaagcttggggtgtatttttggcgctcccaccgcggccgagctcgtgcccggagatgaggggaaagaggaggaggaaatggtggctgagaacaggaggcggaaaaccgcgggcgtactgccggttgagcctaatgacagtgaagtggacatgtttggtgactatgatagctttactgaaaactcctttatagctcaagttgacgacctggaacaaaaatatatgcaactccctgaacataagaaacatgctacagactttgccactgaaaatctttgctcggaaagtatcaaaaacaaactcagcattactaccataggcaaccttactgaattacaaactgataagcacacag

SEQ ID NO: 12377 - DNA, 3884 bp, Homo sapiens
agtggttgattcttcaccacactgaaaccattaggaaaaatccttgtggttaacagcagaggcttcagagtgtaacctgtactcgggcctagaaattatttaaaatggcgactgatacgtctcaaggtgaactcgtccatcctaaggcactcccacttatagtaggagctcagctgatccacgcggacaagttaggtgagaaggtagaagatagcaccatgccgattcgtcgaactgtgaattctacccgggaaactcctcccaaaagcaagcttgctgaaggggaggaagaaaagccagaaccagacataagttcagaggaatctgtctccactgtagaagaacaagagaatgaaactccacctgctacttcgagtgaggcagagcagccaaagggggaacctgagaatgaagagaaggaagaaaataagtcttctgaggaaaccaaaaaggatgagaaagatcagtctaaagaaaaggagaagaaagtgaaaaaaacaattccttcctgggctaccctttctgccagccagctagccagggcccagaaacaaacaccgatggcttcttccccacgtcccaagatggatgcaatcttaactgaggccattaaggcatgcttccagaagagtggtgcatcagtggttgctattcgaaaatacatcatccataagtatccttctctggagctggagagaaggggttatctccttaaacaagcactgaaaagagaattaaatagaggagtcatcaaacaggttaaaggaaaaggtgcttctggaagttttgttgtggttcagaaatcaagaaaaacacctcagaaatccagaaacagaaagaataggagctctgcagtggatccagaaccacaagtaaaattggaggatgtcctcccactggcctttactcgcctttgtgaacctaaagaagcttcctacagtctcatcaggaaatatgtgtctcagtattatcctaagcttagagtggacatcaggcctcagctgttgaagaacgctctgcagagagcagtagagaggggccagttagaacagataactggcaaaggtgcttcggggacattccagctgaagaaatcaggggagaaacccctgcttggtggaagcctgatggaatatgcaatcttgtctgccattgctgccatgaatgagccgaagacctgctctaccactgctctgaagaagtatgtcctagagaatcacccaggaaccaattctaactatcaaatgcatttgctgaaaaaaaccctgcagaaatgcgaaaagaatgggtggatggaacagatctctgggaaagggttcagtggcaccttccagctctgttttccctattatcccagcccaggagttctgtttccgaagaaagagccagatgattctagagatgaggatgaagatgaagatgagtcatcagaagaagactctgaggatgaagagccgccacctaagagaaggttgcagaagaaaaccccagccaagtccccagggaaggccgcatctgtgaagcagagagggtccaaacctgcacctaaagtctcagctgcccagcgggggaaagctaggcccttgcctaagaaagcacctcctaaggccaaaacgcctgccaagaagaccagaccctcatccacagtcatcaagaaacctagtggtggctcctcaaagaagcctgcaaccagtgcaagaaaggaagtaaaattgccgggcaagggcaaatccaccatgaagaagtctttcagagtgaaaaagtaaattttataggaaaaaagggtatcatgatgaaattcaaaatcttattttctaaggtcagtgtgcatttgtttagttttgatgcttttcaaattacattattttcctcccctatgaacattgtggggagggactctaaataaaccagtttaggcatttgctagctttaggtgcttttattggtgcctgcccttttccttgttcattttaatttctgcaataatcctggactttcctaaactatgtaatgtatacttgtcctttttctctgcctcccccaaccccctgttgtttttatggtcagctttgccttttttttttcttccaattttatctaaacagttgcagagatttttatatttgtagaaagcatcaagaacggtatgccagtcaggtcctggaagtaaaatggaggcacaatatagcactgactgagttgtaaagcctcctgcctggagacttcagttatagctgtaataattaatcttatttataaaagccactccactaaccttttctctccaactgtaaacacagagacagctttgggaataagccaaaaacagggtgatctcattagattttgaagatatatgactcctttgggctacatttcatattgatcaatttctaggtatttttcactggcccaaagtattgcattcccttaacagcaagcacaagttctctatatcacttgttttttgttgttgttgttgttgtcgtcgttgttttgagacggagtcttgctcaggtgccccggagtgcagtggtgcaatctcagctcactgcaacctccacctcctgggttcaagcaattctcctgcttcagcctcccgagtagctgggattacaggtgtgtaccaccacgcctggcaatttttttgtatttttagtagagatggggtttcgccgtgttggtcaggctggtctcgaactcctgacctcaggtgatccgcctgcctcggcctcccaaagtgctgggattacaggagtgagccactgtgcctggcctatcccacttggtttttgactgaaggggaagtgtagaaatatattgatttgtgatttctggtgtcacctgtgttaccaaaaatcaaaacaaatcttttttattttttattattattattatttttgagacagagtctcgctctgtcgcccagtgtggagtgcagtggtgtgatcttggctcactgcaaactccgcctcccaggttcaagcgattctcccacctcagcctcctgagttgggtcctacaggcgcacacgaccacgcccagctaattttttgtatttttagtagagttggggtttcaccatgttagccaggatggtctcgatctcctgacctcgtgatccactcacctcagcctcccaaaatcctggggttacagatgtgagctaccactcacggcccaaatcttcttgatcatatgtttaaatatattttttaatatttggagcatgagttgtcacttcttgtttgccttttttataaggaaatgttggagagttacatcattgctaatgtagaaatgttaagtggaaaaatatacagtttggtaaaataaactagattctacatttatttgtgggtttttttcccctcctttctttccacagcacttttgatatcaagcaagtggcttcctttttgagatattaaaaaaaaaaagaaaaggaaaaaagtaaatgaagcccaactacctaaccctttcttatttgtatttgttttagtattgtgaagttgtgttaaatagtactagctagaaatacaaatttctggttatcatttctcttccctgtggcacttgacattttaattgtcttaaagtttttgaagtacatcttctggccccttgagtactgccagaggcaaaagatgtttgtttcttattcattccacttttgtctcctgggatcccttctgtagcctaaagtatggctgggaaatggacttgagaagattggcttgaattagatcataatcatgtgtgatcccatcatgaattcattggaatttgtgttgcatgtaaggcaatctttcctgttgtaaatcttccttttttaatgtacatatattttgaaaaatatgaataaacatgaaattttaaaagct

SEQ ID NO: 12378 - DNA, 10986 bp, Homo sapiens
gcggagcgccgaggctcgcgttccgccgctgcttccgtcgccggggcgggcgccgcggtgtccctgccgagcgtgagccccgaactgtcaccgcgccgagccccagcctcatccgtcggtgtccgcggtccgagctttccccgcctcgctggcggcccgcgctctcccccgccgtgcgcgttcgccgctgtggcctgtagctacctcgcctcgctgctttgtctccgctgctcttgccgtccttcccgcggccttctgcgggcggggctgtcggctgtcgctttgctgctccgcgacggcggccttgagtctcgctcccccggtgggaaacgtagaactggttactcgccaccttaggcggtggggtttgaatgagagcggtgcctcggtaggtcgtcagaaagttacagtcgcccatctgagcgtttgtaagagatggaggcaggagtggtgaggtgagagccccagatctgagggttggtactgcattaacagctgtgaccggggacagccacttaacctttttgagaaagagttgtctcccgtacggagaccggaccgggtgaactgtgctgccgcatccgcgtgcacgttctctctgttgtttattgtgcttcctgactttgcattgcattaaaaagtgagaatccaattcgaaataacgtctaaaaatcgcctggggctttttgagcacgctgtcttgtcttagagtgaaattagaggtgactagtgtcatttttgaaaggtgctctaattttgtttaacctgacataggcaaaaaacttgttagctttttgatttttcattgctcttctcaaaagtttagtgtaatttgtttcaaaatagaagtaacattttaaagtttgctgggttggttggttttggctttgtttttaagcttgcttggaagattgtagggctggaagttagtggagaacgtatactgaactcttcatttccggatgaaagttttaactccttacccagttagattgtgattttattgagatgagacactgtagtgtccttagtatctatgcccaaaacagacactgagtatatgtttgcttatataacttacatttgaaaatgaaaaacaagtggtgtcagcagtcaaattacaggcatgctttttgtgacatgactcgttaaatctgagtgtagtgaatgacttaagattgggaacaatgtgaggtgttcagcgcatcactaatgacatgtattacatatattttatggtaaaatgtgaaattatagtgctttccctaaaatgcatattatcaaggatatcagtaaactgaaatacgttgttaaactcctcacttttctacagccttctcttaatgtagaggaaataaattaaaactgaaatttggggctttttatttctacaatacttttttttattgcttgcattcaaataatttaaagccgtgcatggtggctcacacctgtaatcctaacactttgggaggccaaagaggaggatcgcttgaatccaggagttagagaccagcttgggcaaccctgtctctacagaaaatacaaaaactatccggctgtggtggcgcatacctgaagtcccagctactcaggtggctgaggtgggaggagatcgcttgagcccaggaggtcgaggctacagtgatccctggtcatgccactgtactccagactgagactctgtctcaaaataaacaaccgatttaatttaagcatttcccttgacaaaaagcaaatatttgttattgttgtaacattaagtttaagcaagctgatgttcataagaggaccatgtaaaccacaagtaaactcagactgtttatttttggcacatataaaaaccaagatgaaaaacatgaataggccgggcacggtggctcacgcctgtaatcccagccctttgggaggctgaggtgggcggatcacgaggtcaggagatcgagaccatcctggctaacacggtgaaaccccgtctctactgaaaatacaaaaaattagctgggtgtcgtggcggacgcctgtagtcccagctactcaggaggctgaggcaggagaatggcgtgaaccgggaggggaggttgcagtgagccgagatcgcgccaccgcactccagcctgggcgacagagcaagactcggtctcaaaaaaaaaaaaaaaaaaaagggaaaacacaaataagttttatttgttcatcctttagtttaacaaatattaattgagcatctattctgtgcctggtatgttcttaggcatcaggtatgcagcaaatgaaccaggtagataagatccctgccaggaacaagtgtggcagcctcaaaatttgatcattcagagtgcaatagtaaaaagtttagttaataggtacactgggtcagatgcagtggcttacacctgtaatcccaacacgttgagaggccgaggcagatggatcgcttgagcccaggagtttgtgaccagcctgggcaacatggcaaaaccctgttgatacaaaaaagagaaaaattagccgggcatggcggtgcgtgcctgtagtcccagctactagggagactaaggtgggagagtcgcttgagcctgggaggttgaggctgcagtgagctgtgatactacaacctgagcatcagagtgagaccgtgtcttaaaacaaacaaacaaaaaacataggtacagtgatgttaaggcagtgtgaattaacgttgcatatacttagctctgtaatgaacagtgagtttattaaatagccaattaacccaactattctaaagcaggtactacagattgaagctttgaagttctatgactttgacttttattaaggaaatgcagagctgaggctaacatctctttttttttttttttttttttttttgagacagagtctcacactgttacccaggctggagtgcagtggcatgatctcggctcactgcaacttcggattcccgggttcaagtgattctcctgcctgagcctcccgagtagctgggactaacccaactattctaaagaaagtactacagattgaacctttgaagttctacagcttttactaaggaaatgcagagctctaacatctctattttttttgttttttttttaaattgttgttgtttgttttttgagatggagtctcactcttcacccaggcttggagtgcagtggcatgatctcaggtcactgcaacctccgcctcccaggttcaagtgattcttctccctcagcctcctgagtagctgagactacaggtgtacaccacagcgcctggctaacttttgtgtttttagtagagatggggtttcaccatgttggccaggctggtctcggactcctgacctcaggtgatccctgcctcagcctaccaaagtgctgggattacaggcatgagccactgtacccagccctaacgtctcttaatatttatcccaaataactgggttttaagtgttcttcacacataatgaatgtagtcataagtactaccagatgtctttgttcattcaacttttattattattattattattattgagccaaggtcttactctgtcacccagactggagtgccgtggtgcaattctagctcactgtagcctggaactcctggacactggcagtcctcccatctcagtcttccaagtagctgggactacgggcatgtgccacagtgaccagctaattttttatcttttgtgtgtgtgggttttttctttctttttttttttttttttttcttttttttgagaaggagtcttgctctgtcgcccaggctggagtgcagtggcacaatctcggctcactgcaatctccgcctcccaggttcaagtgattcttctgcctcagcctcccaagtatctgggattacaggcgcgcaccaccacacccggctaatttttgtatttttagtagagacggggtttcaccatactggccaggctggtctcgaactcctgaccttgtgatctatccgcctcggcctcccaaagtgctgagatacaggcgtgagccaccatgcctggcccttttgtgtttttttttaaattattatttttttttcttgaggcaggctctgctctgtcacctaggctggaatgcagtggctcgatttcaggttactgcatccaaaaccttctgggctcaagcagtcctcccagtctcagcttcccaagtagctgggactacaggcgcatgccaccattcccagctgatttttaattttttttttttagagacaacgtctgtattgcccaggctggtcttgaactcctgggctcgagtgaacctcctaccttagcctcccaaagtgctgggattacaggtgtgagccaccacacctggcctgtttttaaattttaatttatttacttttggtaaagaccaagtctaatgttgactaggctagttttgaatttctagcttcaagggatcctcccacctctgcctcccaaagtgctggggttgcaggcatgagctactacaccaaatgggaaagtatttttttaaagatgcctatgaacggagactcctgaaggttgttgacttcacggtagcattttcagcctagctagtgttatcgtgggttaagaaagataaattcattagcaatataactttactaaggataacctgattgtgatattgttttatttccatatcatatttgcatgtaaaaataccagcagatttgcataaggctttttatcattaagaaaaatgggccgggtgcggtgggtcacgcctgccatcccagcactttgggaggctgaggcgggcagatcatctgagatcaggagctcgagaccagcctgaccaacatggtgaaaccccatctctactaaaaatacaaaattagctgggcatggtggcgcatgcctgtaatcccagctactcaggaaggtgaggcaggagaatcgcttgaaccaaggaggcggaggttgcagcgagctgagatcgtgccaccgcactccagcctgggcaacagagcaagactccgtctcaaaaaaagaaaaaaaaaatttaatattaatggatattctggttccctaagtatgagtgtgttacactgcactgaattctttcagctgactgaaagatttccttgcagctgactgacaattgacaagtctggtattgttcttggtgttcccataaaaatattttcccgataagtgtgaatgcatcctctttgtttcaatcttccggatttatcctagttgttgtaggttgggactgttacttgccaagttgaaagctcttcaattcttagacaaggttagaccttaatgtagaagttgcatgactgtcattccctactcattgttaatagttcattagcacagagatctagatacttaagtggtcttttttttttatattgaggaatttttgtataaaatgtcattgagtctcagatgagatttttggggaagagggggtgttagtgatcaggtaaacttgggtgactgcatgggtttttatctttgaatatttaattatattcttctgtactagttttccttacattaaaaatatgacagtcttagaagcatacttttattctcctaggtgatggtctaaatttgcttctgtgggtctggaagctattagaatgtcatgttattcagcagtatttttccccttgtgttttcccttaatagaaggaaaaaaaaagtactttaatagagatagagtttaagattacagttaattttcctgactctttcgagaacagtaacaacaaaagccttctcttggtaaactgatctttgactaactgttccttagtctctttattctatccttctaagttcctgatggtggcaggaggggatggggttaggttccttaggagcttccttgcccttgttgtctttgttcatgtggaaggtgcaacagctgccgtggcttatgcattcgtcttagttgctgctttatgtagtctatattttggtagttttatctttctgagtaaccaaatcatctgtcacttacctataaattttatagttatattttttccctttggatgtgtattaaatttagacgttttagtttagttttgtttctgttaatcttcacaccaggtcttttctgtgctttaggttgattcttcaccacactgaaaccattaggaaaaatccttgtggttaacagcagaggcttcagagtgtaacctgtactcgggcctagaaattatttaaaatggcgactgatacgtctcaaggtgaactcgtccatcctaaggcactcccacttatagtaggagctcagctgatccacgcggacaagttaggtgaggtaggggctgacacattcttgaagctcactcttggatcaatccctgacttcaggccctgctgggtccttcttggtacatgttccttcccttactttggggagtctaggttgtgaatttgaaacaaaatcagattcttttcatcttccctttcccctcaaattcctgagaaaacctccaaccttctaaatttatagcaaatcaactataattatgtgtttccatttgaaattcaagctaaaataacatactttaaaaagtgtatcttaaaaatcatatttcacttcaaaaaaaacttgttaaaagtaatttgcatcagatcctggagtcgacttgaagaattctcctacatctgacacccagttaggccctttgagaaagagagaaaagagaattttttaatgcatgtttgattatggccatctcttttcttagaaggtagaagatagcaccatgccgattcgtcgaactgtgaattctacccgggaaactcctcccaaaagcaagcttgctgaaggggaggaagaaaagccaggtaaagtaaaatggtgacacagcttaaaacatcaaaagttatactgcaatttggagtgtcccataaattcctttgaacttaattgtttttttttttttttcatggctaagtgttttggggaaacatttagagagaatcagtagctattggtatgtcattgccagaccatgagggcaaagtaaggtttcatcttctctataaaggtttttggaaggtgaaaatgttatgttggaattaaaaacaaaaatgtttggggatgacaggaatggccagagagtagcattctggacataaagtgtcatggggatcagtgcagtgtgggagaatggaaaacgtgggcctttagaatagacagtggaaggttcatccagaaatcatctggaggccttcagagaagcaaatggtgatctgttgatctataacaggtattggtagagagaagattggccagtcagtggtgggagcataacaaatggaaagaaacatagacccatcaacatggagtactaatgctcctttatggcatgtataaccacctcttctccttttcccgtctttatttttcttctcatgatctttttggtttttttccttatcttttcccttttttcctttctctcttgccttttatctcaggtttttcagggataagcacactgtgctgcctctgttgtggctgttagaatcaattatttgctgaccagcatgtattaggaatagagggccgggcacagtggctcacacctgtaatcccagcactttgggaggccaaggagggcagatcacctgaggtcaggagttcgagaccagcctggccatcatggtgaaaccccatctctactaaaattataaacattatctgggcatggtggtgcatgcctgtaatccctgctactcaggaggctgaggcacaagaattgcttgagcccaggaggcagaggttgcagtgagctgagatcacgccattgtattccagcctgggcaacagagggaaactgtctccaaaaaaaagaaaaaaaaaaaaaagaggagtagaaaatacatgcatccttggtgcatcagggcagacatcaataaccagtcaatatactcttttctggctgagcctggattttttctctaaatccttagatgaatgctataagcaatttgggcaccctggcctaaggcagttaagaaacacgggaatccaaatatttaaaaaagtaaacgggtgctggtaagttgaagataggttatcttgtccagcactgggataagccacttggtggtccatcttaatccatgtttaacagccagctgaagccactaaatcactaataacatcagttttcagaatatatgccagagggttcagatgtaaagtattagaaaactcaaccagaagtttatgaagaaacagtgtcacttcacaagttgtatgtttgtttaatcttctctctatcccattttgtacacagtattttgtacatagaaattagacttcacttattttaaattttgtaaactctatgttttacacagaaacacagtagtttaatgagttggaaacagtcttatacataatacatattcaatatctgttgagtgactgaactttattaagccataactcttgagcagttattcttgagaagagaaaataatgtaaatttataagtcttactaccgtaaaacccctgaatgattcttagcttttcatcttttttagaataagacaaagtgtaaataaacatgactaactaatagtaaattcttgcccatgcagccatttaggtcaaattgttgggttgaggggcagtaaaagatatatcatgatgaaaaatacattttattgtggaaaacctaaatgtagttattatctttatccccagataccattgttatagtgaagttctatccataatactttgtcatcctaagcatatgggaaacaattctagaagcagagaattccaaaggaggatggaaatcactcgcttagtataagtgttagaattgtacttatgtgatttggttttaagaaagaagtggcattttaaaattctctttatagctgggcgcggtggctcacgcctgtaatcccagaattttgggaggctgaggcgggtggatcacgaggtcaggagatcgagaccatcctggctaacacaatgaaaccctgtcactactaaaaatacaaaaaatcagctgggcatggcggcacgcacctgtagtcccagctactagggaggctgaggcaggagaatcgcttgaacctggggaggtggaagttgcagtgagccaagattgcgccacagcactctagcctgggagacagagcgagactccgtctcaaaaaaaaaataaataaataaataaaattctctttatgggaaggccacaaagaagtcctcgtcattattgcaataattagttcacataatttaaatgatcaaattcttcaagcatatactttggcttgaagtatatgcttgccactggagtcctttttctttcatgttttttttattttttttatttttatttttttttggagttctctgaagtccctgcataaccagtgcctggggttctgtgttttatagtagctactcagagacatgctgtgaaggaaaggcacaaatagcagcagacctccatgttcccctcatatttctactcttgcttcagtcattcctcttggagaatacatgagtttttaaattacttattctctgagatttgcctgttgaattataaaatggctagtttcttaattatgagtctcatgaatattgcaaagtagaataattaaacaattggggatgaaatgagttttcctttctatgtaatttcctggtctatttttctaataatagataaataaccacctgaccaggaaacttgagtgacataaagaatgtaagaaaactgcattagtggtcattcattttcattttagaattcatttgttaattggagactttggctggtccgtttaataagataagcttttaccttttattgactcagattggaatacatctgcttatgcaattctgctcacctgattttttagaaccagacataagttcagaggaatctgtctccactgtagaagaacaagagaatgaaactccacctgctacttcgagtgaggcagagcagccaaagggggaacctgagaatgaagagaaggaagaaaataagtcttctgaggaaaccaaaaaggagtaaggagttatgtcttcttgctatttatatttgaagaatgtgtaaaaggactttagattagattgttttaaagtgttataacattggtttatgctaggtatttgctatttggatttaatttttagaattaccatttgaaataggtttattatatagttgtttgacctgttagaatatgctgtagttagcagaacacaatggtttgaataatccaaaagtctttgtcattggctttggaatgtgtttttgagcttgtaatttattgtgggagtatctgatattttaagcattggcaagacttcaataagaaatgaaacataactataaaaatctgacctagaagacatttcactattttattcctacttctgtgccaggagtgggttgtttttgtgtgcttatgttagaaggcattgatttgtatcaagccattggtagtgtgacctaaaagtctatatatgtttgatgaaatattcagttgaagaattggctttgagaatctgaaagtaaaatttgctattgatgtgtatctatataaagtgatggcagttactttttaatttttaatttttttttttttttttttgcaggagagctgatagtattcattccactcttttcataattggtcagaacagttagaaattgcttttaactatagtcatgcattgcttaacaatgggtatacattctgagagatacatctttaggcgatttcatcatcgtgccaacatcataaagtgtacttacacaaacctacgtggtacagcctactacatacctaggctttatgggatagtctgttgcttctaggctacaaacctgtacagcatgttactgtactaaatactgtaggcagttataacacaacggtaagtatttgtgtatttaaacatagaaaaggtacagtaaaaatataatataaaagataaaaaatggta

SEQ ID NO: 12379 - DNA, 928 bp, Homo sapiens
gcggagcgccgaggctcgcgttccgccgctgcttccgtcgccggggcgggcgccgcggtgtccctgccgagcgtgagccccgaactgtcaccgcgccgagccccagcctcatccgtcggtgtccgcggttgattcttcaccacactgaaaccattaggaaaaatccttgtggttaacagcagaggcttcagagtgtaacctgtactcgggcctagaaattatttaaaatggcgactgatacgtctcaaggtgaactcgtccatcctaaggcactcccacttatagtaggagctcagctgatccacgcggacaagttaggtgagaaggtagaagatagcaccatgccgattcgtcgaactgtgaattctacccgggaaactcctcccaaaagcaagcttgctgaaggggaggaagaaaagccagaaccagacataagttcagaggaatctgtctccactgtagaagaacaagagaatgaaactccacctgctacttcgagtgaggcagagcagccaaagggggaacctgagaatgaagagaaggaagaaaataagtcttctgaggaaaccaaaaaggagagagctgatagtattcattccactcttttcataattggtcagaacagttagaaattgcttttaactatagtcatgcattgcttaacaatgggtatacattctgagagatacatctttaggcgatttcatcatcgtgccaacatcataaagtgtacttacacaaacctacgtggtacagcctactacatacctaggctttatgggatagtctgttgcttctaggctacaaacctgtacagcatgttactgtactaaatactgtaggcagttataacacaacggtaagtatttgtgtatttaaacatagaaaaggtacagtaaaaatataatataaaagataaaaaatggta

SEQ ID NO: 12380 - DNA, 4822 bp, Homo sapiens
tttttttttttttttgagatggagtcttactctgtcacccaggttggagtgtggagtgcagtggcgcgatctgggctcactgcaacctccacctcccaggttcaagcgattctcctgcctcaacctgccaagtagctgggactacaggcgtgcacctccacacctagctaatttttgtattttcaggagagacgggggtttcaccatgttggccaggatggtctcaatcttttgaccttgtgatccgcccaccttggcctcccaaagtgctgggattacaggcatgagtcaccgcgcccagccaatatgctatatttttgtatgactggcagcactgtaggtttgtttacaccaatgtcaccacaaacaagtgagtaacgtgctgcgctgtgatattaccacagctatcatgttaaccaggtaataggaggttttcagttccattataatcttaagggaccaccattgtatatgtggtctgttgaccaaatattgttacacagcacatgaccataaaagaataacttagtaataactataccttctagctataatcttcagggtattctttatctgagtttcataagtatagctaaggtctgtggaatttatagcaactatcgtgtgtgggtgtgggtgtgtttgtgtgtgtgtgtgtgtgtttaatggagatggcgtctcactatgttggctaggttgggcttgaactcctggcctcaagctgtcctccctcctcagcctcctaaattgctgggattacaggcatgagccactgcacccagcctatcgtctgttgttaaatgttctaatgcacctattaggtgcacagagtactgttatatactcagaataaaatttacataatgctttaaatctcacaaaattgttttgataaacatactcttataattcttgcaacaccttgggaaatagttggttctatattactgttttatagctgaggagaaagactcacatcatttactaagatcatatagctagctagtaaatgtttgagtgaaaatacaaacaaaggttttctgactttaagagcttgagttttttccactataccatattgcatctgttgtaattgttaactaatgtgcattttaaaattctcatttgtcttatgtactgagcccttataccagtgctaatttatgtgactcctttctcctgcagctaagagaaaaatacctttttaattcatttatagtacccagtttttaaagaagatttattttgtaaaattttgcttatggtacatgtcatcttagcctgtaaataaattaaagcattaatttttatccctccctggtcttttcctccttctgactttatacgtctttctagagagcttatcttctataataacaattctttgttttaaagtgagaaagatcagtctaaagaaaaggagaagaaagtgaaaaaaacaattccttcctgggctaccctttctgccagccagctagccagggcccagaaacaaacaccgatggcttcttccccacgtcccaagatggatgcaatcttaactgaggccattaaggcatgcttccagaagagtggtgcatcagtggttgctattcgaaaatacatcatccataagtatccttctctggagctggagagaaggggttatctccttaaacaagcactgaaaagagaattaaatagaggagtcatcaaacaggttaaaggaaaaggtgcttctggaagttttgttgtggttcagaaatcaagaaaaacacctcagaaatccagaaacagaaagaataggagctctgcagtggatccagaaccacaagtaaaattggaggatgtcctcccactggcctttactcgcctttgtgaacctaaagaagcttcctacagtctcatcaggaaatatgtgtctcagtattatcctaagcttagagtggacatcaggcctcagctgttgaagaacgctctgcagagagcagtagagaggggccagttagaacagataactggcaaaggtgcttcggggacattccagctgaagaaatcaggggagaaacccctgcttggtggaagcctgatggaatatgcaatcttgtctgccattgctgccatgaatgagccgaagacctgctctaccactgctctgaagaagtatgtcctagagaatcacccaggaaccaattctaactatcaaatgcatttgctgaaaaaaaccctgcagaaatgcgaaaagaatgggtggatggaacagatctctgggaaagggttcagtggcaccttccagctctgttttccctattatcccagcccaggagttctgtttccgaagaaagagccagatgattctagagatgaggatgaagatgaagatgagtcatcagaagaagactctgaggatgaagagccgccacctaagagaaggttgcagaagaaaaccccagccaagtccccagggaaggccgcatctgtgaagcagagagggtccaaacctgcacctaaagtctcagctgcccagcgggggaaagctaggcccttgcctaagaaagcacctcctaaggccaaaacgcctgccaagaagaccagaccctcatccacagtcatcaagaaacctagtggtggctcctcaaagaagcctgcaaccagtgcaagaaaggaagtaaaattgccgggcaagggcaaatccaccatgaagaagtctttcagagtgaaaaagtaaattttataggaaaaaagggtatcatgatgaaattcaaaatcttattttctaaggtcagtgtgcatttgtttagttttgatgcttttcaaattacattattttcctcccctatgaacattgtggggagggactctaaataaaccagtttaggcatttgctagctttaggtgcttttattggtgcctgcccttttccttgttcattttaatttctgcaataatcctggactttcctaaactatgtaatgtatacttgtcctttttctctgcctcccccaaccccctgttgtttttatggtcagctttgccttttttttttcttccaattttatctaaacagttgcagagatttttatatttgtagaaagcatcaagaacggtatgccagtcaggtcctggaagtaaaatggaggcacaatatagcactgactgagttgtaaagcctcctgcctggagacttcagttatagctgtaataattaatcttatttataaaagccactccactaaccttttctctccaactgtaaacacagagacagctttgggaataagccaaaaacagggtgatctcattagattttgaagatatatgactcctttgggctacatttcatattgatcaatttctaggtatttttcactggcccaaagtattgcattcccttaacagcaagcacaagttctctatatcacttgttttttgttgttgttgttgttgtcgtcgttgttttgagacggagtcttgctcaggtgccccggagtgcagtggtgcaatctcagctcactgcaacctccacctcctgggttcaagcaattctcctgcttcagcctcccgagtagctgggattacaggtgtgtaccaccacgcctggcaatttttttgtatttttagtagagatggggtttcgccgtgttggtcaggctggtctcgaactcctgacctcaggtgatccgcctgcctcggcctcccaaagtgctgggattacaggagtgagccactgtgcctggcctatcccacttggtttttgactgaaggggaagtgtagaaatatattgatttgtgatttctggtgtcacctgtgttaccaaaaatcaaaacaaatcttttttattttttattattattattatttttgagacagagtctcgctctgtcgcccagtgtggagtgcagtggtgtgatcttggctcactgcaaactccgcctcccaggttcaagcgattctcccacctcagcctcctgagttgggtcctacaggcgcacacgaccacgcccagctaattttttgtatttttagtagagttggggtttcaccatgttagccaggatggtctcgatctcctgacctcgtgatccactcacctcagcctcccaaaatcctggggttacagatgtgagctaccactcacggcccaaatcttcttgatcatatgtttaaatatattttttaatatttggagcatgagttgtcacttcttgtttgccttttttataaggaaatgttggagagttacatcattgctaatgtagaaatgttaagtggaaaaatatacagtttggtaaaataaactagattctacatttatttgtgggtttttttcccctcctttctttccacagcacttttgatatcaagcaagtggcttcctttttgagatattaaaaaaaaaaagaaaaggaaaaaagtaaatgaagcccaactacctaaccctttcttatttgtatttgttttagtattgtgaagttgtgttaaatagtactagctagaaatacaaatttctggttatcatttctcttccctgtggcacttgacattttaattgtcttaaagtttttgaagtacatcttctggccccttgagtactgccagaggcaaaagatgtttgtttcttattcattccacttttgtctcctgggatcccttctgtagcctaaagtatggctgggaaatggacttgagaagattggcttgaattagatcataatcatgtgtgatcccatcatgaattcattggaatttgtgttgcatgtaaggcaatctttcctgttgtaaatcttccttttttaatgtacatatattttgaaaaatatgaataaacatgaaattttaaaa

SEQ ID NO: 12381 - DNA, 9933 bp, Homo sapiens
agtggtgagtgtgcggagcgccgaggctcgcgttccgccgctgcttccgtcgccggggcgggcgccgcggtgtccctgccgagcgtgagccccgaactgtcaccgcgccgagccccagcctcatccgtcggtgtccgcggtccgagctttccccgcctcgctggcggcccgcgctctcccccgccgtgcgcgttcgccgctgtggcctgtagctacctcgcctcgctgctttgtctccgctgctcttgccgtccttcccgcggccttctgcgggcggggctgtcggctgtcgctttgctgctccgcgacggcggccttgagtctcgctcccccggtgggaaacgtagaactggttactcgccaccttaggcggtggggtttgaatgagagcggtgcctcggtaggtcgtcagaaagttacagtcgcccatctgagcgtttgtaagagatggaggcaggagtggtgaggtgagagccccagatctgagggttggtactgcattaacagctgtgaccggggacagccacttaacctttttgagaaagagttgtctcccgtacggagaccggaccgggtgaactgtgctgccgcatccgcgtgcacgttctctctgttgtttattgtgcttcctgactttgcattgcattaaaaagtgagaatccaattcgaaataacgtctaaaaatcgcctggggctttttgagcacgctgtcttgtcttagagtgaaattagaggtgactagtgtcatttttgaaaggtgctctaattttgtttaacctgacataggcaaaaaacttgttagctttttgatttttcattgctcttctcaaaagtttagtgtaatttgtttcaaaatagaagtaacattttaaagtttgctgggttggttggttttggctttgtttttaagcttgcttggaagattgtagggctggaagttagtggagaacgtatactgaactcttcatttccggatgaaagttttaactccttacccagttagattgtgattttattgagatgagacactgtagtgtccttagtatctatgcccaaaacagacactgagtatatgtttgcttatataacttacatttgaaaatgaaaaacaagtggtgtcagcagtcaaattacaggcatgctttttgtgacatgactcgttaaatctgagtgtagtgaatgacttaagattgggaacaatgtgaggtgttcagcgcatcactaatgacatgtattacatatattttatggtaaaatgtgaaattatagtgctttccctaaaatgcatattatcaaggatatcagtaaactgaaatacgttgttaaactcctcacttttctacagccttctcttaatgtagaggaaataaattaaaactgaaatttggggctttttatttctacaatacttttttttattgcttgcattcaaataatttaaagccgtgcatggtggctcacacctgtaatcctaacactttgggaggccaaagaggaggatcgcttgaatccaggagttagagaccagcttgggcaaccctgtctctacagaaaatacaaaaactatccggctgtggtggcgcatacctgaagtcccagctactcaggtggctgaggtgggaggagatcgcttgagcccaggaggtcgaggctacagtgatccctggtcatgccactgtactccagactgagactctgtctcaaaataaacaaccgatttaatttaagcatttcccttgacaaaaagcaaatatttgttattgttgtaacattaagtttaagcaagctgatgttcataagaggaccatgtaaaccacaagtaaactcagactgtttatttttggcacatataaaaaccaagatgaaaaacatgaataggccgggcacggtggctcacgcctgtaatcccagccctttgggaggctgaggtgggcggatcacgaggtcaggagatcgagaccatcctggctaacacggtgaaaccccgtctctactgaaaatacaaaaaattagctgggtgtcgtggcggacgcctgtagtcccagctactcaggaggctgaggcaggagaatggcgtgaaccgggaggggaggttgcagtgagccgagatcgcgccaccgcactccagcctgggcgacagagcaagactcggtctcaaaaaaaaaaaaaaaaaaaagggaaaacacaaataagttttatttgttcatcctttagtttaacaaatattaattgagcatctattctgtgcctggtatgttcttaggcatcaggtatgcagcaaatgaaccaggtagataagatccctgccaggaacaagtgtggcagcctcaaaatttgatcattcagagtgcaatagtaaaaagtttagttaataggtacactgggtcagatgcagtggcttacacctgtaatcccaacacgttgagaggccgaggcagatggatcgcttgagcccaggagtttgtgaccagcctgggcaacatggcaaaaccctgttgatacaaaaaagagaaaaattagccgggcatggcggtgcgtgcctgtagtcccagctactagggagactaaggtgggagagtcgcttgagcctgggaggttgaggctgcagtgagctgtgatactacaacctgagcatcagagtgagaccgtgtcttaaaacaaacaaacaaaaaacataggtacagtgatgttaaggcagtgtgaattaacgttgcatatacttagctctgtaatgaacagtgagtttattaaatagccaattaacccaactattctaaagcaggtactacagattgaagctttgaagttctatgactttgacttttattaaggaaatgcagagctgaggctaacatctctttttttttttttttttttttttttgagacagagtctcacactgttacccaggctggagtgcagtggcatgatctcggctcactgcaacttcggattcccgggttcaagtgattctcctgcctgagcctcccgagtagctgggactaacccaactattctaaagaaagtactacagattgaacctttgaagttctacagcttttactaaggaaatgcagagctctaacatctctattttttttgttttttttttaaattgttgttgtttgttttttgagatggagtctcactcttcacccaggcttggagtgcagtggcatgatctcaggtcactgcaacctccgcctcccaggttcaagtgattcttctccctcagcctcctgagtagctgagactacaggtgtacaccacagcgcctggctaacttttgtgtttttagtagagatggggtttcaccatgttggccaggctggtctcggactcctgacctcaggtgatccctgcctcagcctaccaaagtgctgggattacaggcatgagccactgtacccagccctaacgtctcttaatatttatcccaaataactgggttttaagtgttcttcacacataatgaatgtagtcataagtactaccagatgtctttgttcattcaacttttattattattattattattattgagccaaggtcttactctgtcacccagactggagtgccgtggtgcaattctagctcactgtagcctggaactcctggacactggcagtcctcccatctcagtcttccaagtagctgggactacgggcatgtgccacagtgaccagctaattttttatcttttgtgtgtgtgggttttttctttctttttttttttttttttttcttttttttgagaaggagtcttgctctgtcgcccaggctggagtgcagtggcacaatctcggctcactgcaatctccgcctcccaggttcaagtgattcttctgcctcagcctcccaagtatctgggattacaggcgcgcaccaccacacccggctaatttttgtatttttagtagagacggggtttcaccatactggccaggctggtctcgaactcctgaccttgtgatctatccgcctcggcctcccaaagtgctgagatacaggcgtgagccaccatgcctggcccttttgtgtttttttttaaattattatttttttttcttgaggcaggctctgctctgtcacctaggctggaatgcagtggctcgatttcaggttactgcatccaaaaccttctgggctcaagcagtcctcccagtctcagcttcccaagtagctgggactacaggcgcatgccaccattcccagctgatttttaattttttttttttagagacaacgtctgtattgcccaggctggtcttgaactcctgggctcgagtgaacctcctaccttagcctcccaaagtgctgggattacaggtgtgagccaccacacctggcctgtttttaaattttaatttatttacttttggtaaagaccaagtctaatgttgactaggctagttttgaatttctagcttcaagggatcctcccacctctgcctcccaaagtgctggggttgcaggcatgagctactacaccaaatgggaaagtatttttttaaagatgcctatgaacggagactcctgaaggttgttgacttcacggtagcattttcagcctagctagtgttatcgtgggttaagaaagataaattcattagcaatataactttactaaggataacctgattgtgatattgttttatttccatatcatatttgcatgtaaaaataccagcagatttgcataaggctttttatcattaagaaaaatgggccgggtgcggtgggtcacgcctgccatcccagcactttgggaggctgaggcgggcagatcatctgagatcaggagctcgagaccagcctgaccaacatggtgaaaccccatctctactaaaaatacaaaattagctgggcatggtggcgcatgcctgtaatcccagctactcaggaaggtgaggcaggagaatcgcttgaaccaaggaggcggaggttgcagcgagctgagatcgtgccaccgcactccagcctgggcaacagagcaagactccgtctcaaaaaaagaaaaaaaaaatttaatattaatggatattctggttccctaagtatgagtgtgttacactgcactgaattctttcagctgactgaaagatttccttgcagctgactgacaattgacaagtctggtattgttcttggtgttcccataaaaatattttcccgataagtgtgaatgcatcctctttgtttcaatcttccggatttatcctagttgttgtaggttgggactgttacttgccaagttgaaagctcttcaattcttagacaaggttagaccttaatgtagaagttgcatgactgtcattccctactcattgttaatagttcattagcacagagatctagatacttaagtggtcttttttttttatattgaggaatttttgtataaaatgtcattgagtctcagatgagatttttggggaagagggggtgttagtgatcaggtaaacttgggtgactgcatgggtttttatctttgaatatttaattatattcttctgtactagttttccttacattaaaaatatgacagtcttagaagcatacttttattctcctaggtgatggtctaaatttgcttctgtgggtctggaagctattagaatgtcatgttattcagcagtatttttccccttgtgttttcccttaatagaaggaaaaaaaaagtactttaatagagatagagtttaagattacagttaattttcctgactctttcgagaacagtaacaacaaaagccttctcttggtaaactgatctttgactaactgttccttagtctctttattctatccttctaagttcctgatggtggcaggaggggatggggttaggttccttaggagcttccttgcccttgttgtctttgttcatgtggaaggtgcaacagctgccgtggcttatgcattcgtcttagttgctgctttatgtagtctatattttggtagttttatctttctgagtaaccaaatcatctgtcacttacctataaattttatagttatattttttccctttggatgtgtattaaatttagacgttttagtttagttttgtttctgttaatcttcacaccaggtcttttctgtgctttaggttgattcttcaccacactgaaaccattaggaaaaatccttgtggttaacagcagaggcttcagagtgtaacctgtactcgggcctagaaattatttaaaatggcgactgatacgtctcaaggtgaactcgtccatcctaaggcactcccacttatagtaggagctcagctgatccacgcggacaagttaggtgaggtaggggctgacacattcttgaagctcactcttggatcaatccctgacttcaggccctgctgggtccttcttggtacatgttccttcccttactttggggagtctaggttgtgaatttgaaacaaaatcagattcttttcatcttccctttcccctcaaattcctgagaaaacctccaaccttctaaatttatagcaaatcaactataattatgtgtttccatttgaaattcaagctaaaataacatactttaaaaagtgtatcttaaaaatcatatttcacttcaaaaaaaacttgttaaaagtaatttgcatcagatcctggagtcgacttgaagaattctcctacatctgacacccagttaggccctttgagaaagagagaaaagagaattttttaatgcatgtttgattatggccatctcttttcttagaaggtagaagatagcaccatgccgattcgtcgaactgtgaattctacccgggaaactcctcccaaaagcaagcttgctgaaggggaggaagaaaagccaggtaaagtaaaatggtgacacagcttaaaacatcaaaagttatactgcaatttggagtgtcccataaattcctttgaacttaattgtttttttttttttttcatggctaagtgttttggggaaacatttagagagaatcagtagctattggtatgtcattgccagaccatgagggcaaagtaaggtttcatcttctctataaaggtttttggaaggtgaaaatgttatgttggaattaaaaacaaaaatgtttggggatgacaggaatggccagagagtagcattctggacataaagtgtcatggggatcagtgcagtgtgggagaatggaaaacgtgggcctttagaatagacagtggaaggttcatccagaaatcatctggaggccttcagagaagcaaatggtgatctgttgatctataacaggtattggtagagagaagattggccagtcagtggtgggagcataacaaatggaaagaaacatagacccatcaacatggagtactaatgctcctttatggcatgtataaccacctcttctccttttcccgtctttatttttcttctcatgatctttttggtttttttccttatcttttcccttttttcctttctctcttgccttttatctcaggtttttcagggataagcacactgtgctgcctctgttgtggctgttagaatcaattatttgctgaccagcatgtattaggaatagagggccgggcacagtggctcacacctgtaatcccagcactttgggaggccaaggagggcagatcacctgaggtcaggagttcgagaccagcctggccatcatggtgaaaccccatctctactaaaattataaacattatctgggcatggtggtgcatgcctgtaatccctgctactcaggaggctgaggcacaagaattgcttgagcccaggaggcagaggttgcagtgagctgagatcacgccattgtattccagcctgggcaacagagggaaactgtctccaaaaaaaagaaaaaaaaaaaaaagaggagtagaaaatacatgcatccttggtgcatcagggcagacatcaataaccagtcaatatactcttttctggctgagcctggattttttctctaaatccttagatgaatgctataagcaatttgggcaccctggcctaaggcagttaagaaacacgggaatccaaatatttaaaaaagtaaacgggtgctggtaagttgaagataggttatcttgtccagcactgggataagccacttggtggtccatcttaatccatgtttaacagccagctgaagccactaaatcactaataacatcagttttcagaatatatgccagagggttcagatgtaaagtattagaaaactcaaccagaagtttatgaagaaacagtgtcacttcacaagttgtatgtttgtttaatcttctctctatcccattttgtacacagtattttgtacatagaaattagacttcacttattttaaattttgtaaactctatgttttacacagaaacacagtagtttaatgagttggaaacagtcttatacataatacatattcaatatctgttgagtgactgaactttattaagccataactcttgagcagttattcttgagaagagaaaataatgtaaatttataagtcttactaccgtaaaacccctgaatgattcttagcttttcatcttttttagaataagacaaagtgtaaataaacatgactaactaatagtaaattcttgcccatgcagccatttaggtcaaattgttgggttgaggggcagtaaaagatatatcatgatgaaaaatacattttattgtggaaaacctaaatgtagttattatctttatccccagataccattgttatagtgaagttctatccataatactttgtcatcctaagcatatgggaaacaattctagaagcagagaattccaaaggaggatggaaatcactcgcttagtataagtgttagaattgtacttatgtgatttggttttaagaaagaagtggcattttaaaattctctttatagctgggcgcggtggctcacgcctgtaatcccagaattttgggaggctgaggcgggtggatcacgaggtcaggagatcgagaccatcctggctaacacaatgaaaccctgtcactactaaaaatacaaaaaatcagctgggcatggcggcacgcacctgtagtcccagctactagggaggctgaggcaggagaatcgcttgaacctggggaggtggaagttgcagtgagccaagattgcgccacagcactctagcctgggagacagagcgagactccgtctcaaaaaaaaaataaataaataaataaaattctctttatgggaaggccacaaagaagtcctcgtcattattgcaataattagttcacataatttaaatgatcaaattcttcaagcatatactttggcttgaagtatatgcttgccactggagtcctttttctttcatgttttttttattttttttatttttatttttttttggagttctctgaagtccctgcataaccagtgcctggggttctgtgttttatagtagctactcagagacatgctgtgaaggaaaggcacaaatagcagcagacctccatgttcccctcatatttctactcttgcttcagtcattcctcttggagaatacatgagtttttaaattacttattctctgagatttgcctgttgaattataaaatggctagtttcttaattatgagtctcatgaatattgcaaagtagaataattaaacaattggggatgaaatgagttttcctttctatgtaatttcctggtctatttttctaataatagataaataaccacctgaccaggaaacttgagtgacataaagaatgtaagaaaactgcattagtggtcattcattttcattttagaattcatttgttaattggagactttggctggtccgtttaataagataagcttttaccttttattgactcagattggaatacatctgcttatgcaattctgctcacctgattttttagaaccagacataagttcagaggaatctgtctc

SEQ ID NO: 12382 - DNA, 727 bp, Homo sapiens
agtggtgagtgtgcggagcgccgaggctcgcgttccgccgctgcttccgtcgccggggcgggcgccgcggtgtccctgccgagcgtgagccccgaactgtcaccgcgccgagccccagcctcatccgtcggtgtccgcggtccgagctttccccgcctcgctggcggcccgcgctctcccccgccgtgcgcgttcgccgctgtggcctgtagctacctcgcctcgctgctttgtctccgctgctcttgccgtccttcccgcggccttctgcgggcggggctgtcggctgtcgctttgctgctccgcgacggcggccttgagtctcgctcccccggtgggaaacgtagaactggttactcgccaccttaggcggtggggtttgaatgagagcggtgcctcggttgattcttcaccacactgaaaccattaggaaaaatccttgtggttaacagcagaggcttcagagtgtaacctgtactcgggcctagaaattatttaaaatggcgactgatacgtctcaaggtgaactcgtccatcctaaggcactcccacttatagtaggagctcagctgatccacgcggacaagttaggtgagaaggtagaagatagcaccatgccgattcgtcgaactgtgaattctacccgggaaactcctcccaaaagcaagcttgctgaaggggaggaagaaaagccagaaccagacataagttcagaggaatctgtctc

SEQ ID NO: 12383 - DNA, 12697 bp, Homo sapiens
gcggtggggtttgaatgagagcggtgcctcggtaggtcgtcagaaagttacagtcgcccatctgagcgtttgtaagagatggaggcaggagtggtgaggtgagagccccagatctgagggttggtactgcattaacagctgtgaccggggacagccacttaacctttttgagaaagagttgtctcccgtacggagaccggaccgggtgaactgtgctgccgcatccgcgtgcacgttctctctgttgtttattgtgcttcctgactttgcattgcattaaaaagtgagaatccaattcgaaataacgtctaaaaatcgcctggggctttttgagcacgctgtcttgtcttagagtgaaattagaggtgactagtgtcatttttgaaaggtgctctaattttgtttaacctgacataggcaaaaaacttgttagctttttgatttttcattgctcttctcaaaagtttagtgtaatttgtttcaaaatagaagtaacattttaaagtttgctgggttggttggttttggctttgtttttaagcttgcttggaagattgtagggctggaagttagtggagaacgtatactgaactcttcatttccggatgaaagttttaactccttacccagttagattgtgattttattgagatgagacactgtagtgtccttagtatctatgcccaaaacagacactgagtatatgtttgcttatataacttacatttgaaaatgaaaaacaagtggtgtcagcagtcaaattacaggcatgctttttgtgacatgactcgttaaatctgagtgtagtgaatgacttaagattgggaacaatgtgaggtgttcagcgcatcactaatgacatgtattacatatattttatggtaaaatgtgaaattatagtgctttccctaaaatgcatattatcaaggatatcagtaaactgaaatacgttgttaaactcctcacttttctacagccttctcttaatgtagaggaaataaattaaaactgaaatttggggctttttatttctacaatacttttttttattgcttgcattcaaataatttaaagccgtgcatggtggctcacacctgtaatcctaacactttgggaggccaaagaggaggatcgcttgaatccaggagttagagaccagcttgggcaaccctgtctctacagaaaatacaaaaactatccggctgtggtggcgcatacctgaagtcccagctactcaggtggctgaggtgggaggagatcgcttgagcccaggaggtcgaggctacagtgatccctggtcatgccactgtactccagactgagactctgtctcaaaataaacaaccgatttaatttaagcatttcccttgacaaaaagcaaatatttgttattgttgtaacattaagtttaagcaagctgatgttcataagaggaccatgtaaaccacaagtaaactcagactgtttatttttggcacatataaaaaccaagatgaaaaacatgaataggccgggcacggtggctcacgcctgtaatcccagccctttgggaggctgaggtgggcggatcacgaggtcaggagatcgagaccatcctggctaacacggtgaaaccccgtctctactgaaaatacaaaaaattagctgggtgtcgtggcggacgcctgtagtcccagctactcaggaggctgaggcaggagaatggcgtgaaccgggaggggaggttgcagtgagccgagatcgcgccaccgcactccagcctgggcgacagagcaagactcggtctcaaaaaaaaaaaaaaaaaaaagggaaaacacaaataagttttatttgttcatcctttagtttaacaaatattaattgagcatctattctgtgcctggtatgttcttaggcatcaggtatgcagcaaatgaaccaggtagataagatccctgccaggaacaagtgtggcagcctcaaaatttgatcattcagagtgcaatagtaaaaagtttagttaataggtacactgggtcagatgcagtggcttacacctgtaatcccaacacgttgagaggccgaggcagatggatcgcttgagcccaggagtttgtgaccagcctgggcaacatggcaaaaccctgttgatacaaaaaagagaaaaattagccgggcatggcggtgcgtgcctgtagtcccagctactagggagactaaggtgggagagtcgcttgagcctgggaggttgaggctgcagtgagctgtgatactacaacctgagcatcagagtgagaccgtgtcttaaaacaaacaaacaaaaaacataggtacagtgatgttaaggcagtgtgaattaacgttgcatatacttagctctgtaatgaacagtgagtttattaaatagccaattaacccaactattctaaagcaggtactacagattgaagctttgaagttctatgactttgacttttattaaggaaatgcagagctgaggctaacatctctttttttttttttttttttttttttgagacagagtctcacactgttacccaggctggagtgcagtggcatgatctcggctcactgcaacttcggattcccgggttcaagtgattctcctgcctgagcctcccgagtagctgggactaacccaactattctaaagaaagtactacagattgaacctttgaagttctacagcttttactaaggaaatgcagagctctaacatctctattttttttgttttttttttaaattgttgttgtttgttttttgagatggagtctcactcttcacccaggcttggagtgcagtggcatgatctcaggtcactgcaacctccgcctcccaggttcaagtgattcttctccctcagcctcctgagtagctgagactacaggtgtacaccacagcgcctggctaacttttgtgtttttagtagagatggggtttcaccatgttggccaggctggtctcggactcctgacctcaggtgatccctgcctcagcctaccaaagtgctgggattacaggcatgagccactgtacccagccctaacgtctcttaatatttatcccaaataactgggttttaagtgttcttcacacataatgaatgtagtcataagtactaccagatgtctttgttcattcaacttttattattattattattattattgagccaaggtcttactctgtcacccagactggagtgccgtggtgcaattctagctcactgtagcctggaactcctggacactggcagtcctcccatctcagtcttccaagtagctgggactacgggcatgtgccacagtgaccagctaattttttatcttttgtgtgtgtgggttttttctttctttttttttttttttttttcttttttttgagaaggagtcttgctctgtcgcccaggctggagtgcagtggcacaatctcggctcactgcaatctccgcctcccaggttcaagtgattcttctgcctcagcctcccaagtatctgggattacaggcgcgcaccaccacacccggctaatttttgtatttttagtagagacggggtttcaccatactggccaggctggtctcgaactcctgaccttgtgatctatccgcctcggcctcccaaagtgctgagatacaggcgtgagccaccatgcctggcccttttgtgtttttttttaaattattatttttttttcttgaggcaggctctgctctgtcacctaggctggaatgcagtggctcgatttcaggttactgcatccaaaaccttctgggctcaagcagtcctcccagtctcagcttcccaagtagctgggactacaggcgcatgccaccattcccagctgatttttaattttttttttttagagacaacgtctgtattgcccaggctggtcttgaactcctgggctcgagtgaacctcctaccttagcctcccaaagtgctgggattacaggtgtgagccaccacacctggcctgtttttaaattttaatttatttacttttggtaaagaccaagtctaatgttgactaggctagttttgaatttctagcttcaagggatcctcccacctctgcctcccaaagtgctggggttgcaggcatgagctactacaccaaatgggaaagtatttttttaaagatgcctatgaacggagactcctgaaggttgttgacttcacggtagcattttcagcctagctagtgttatcgtgggttaagaaagataaattcattagcaatataactttactaaggataacctgattgtgatattgttttatttccatatcatatttgcatgtaaaaataccagcagatttgcataaggctttttatcattaagaaaaatgggccgggtgcggtgggtcacgcctgccatcccagcactttgggaggctgaggcgggcagatcatctgagatcaggagctcgagaccagcctgaccaacatggtgaaaccccatctctactaaaaatacaaaattagctgggcatggtggcgcatgcctgtaatcccagctactcaggaaggtgaggcaggagaatcgcttgaaccaaggaggcggaggttgcagcgagctgagatcgtgccaccgcactccagcctgggcaacagagcaagactccgtctcaaaaaaagaaaaaaaaaatttaatattaatggatattctggttccctaagtatgagtgtgttacactgcactgaattctttcagctgactgaaagatttccttgcagctgactgacaattgacaagtctggtattgttcttggtgttcccataaaaatattttcccgataagtgtgaatgcatcctctttgtttcaatcttccggatttatcctagttgttgtaggttgggactgttacttgccaagttgaaagctcttcaattcttagacaaggttagaccttaatgtagaagttgcatgactgtcattccctactcattgttaatagttcattagcacagagatctagatacttaagtggtcttttttttttatattgaggaatttttgtataaaatgtcattgagtctcagatgagatttttggggaagagggggtgttagtgatcaggtaaacttgggtgactgcatgggtttttatctttgaatatttaattatattcttctgtactagttttccttacattaaaaatatgacagtcttagaagcatacttttattctcctaggtgatggtctaaatttgcttctgtgggtctggaagctattagaatgtcatgttattcagcagtatttttccccttgtgttttcccttaatagaaggaaaaaaaaagtactttaatagagatagagtttaagattacagttaattttcctgactctttcgagaacagtaacaacaaaagccttctcttggtaaactgatctttgactaactgttccttagtctctttattctatccttctaagttcctgatggtggcaggaggggatggggttaggttccttaggagcttccttgcccttgttgtctttgttcatgtggaaggtgcaacagctgccgtggcttatgcattcgtcttagttgctgctttatgtagtctatattttggtagttttatctttctgagtaaccaaatcatctgtcacttacctataaattttatagttatattttttccctttggatgtgtattaaatttagacgttttagtttagttttgtttctgttaatcttcacaccaggtcttttctgtgctttaggttgattcttcaccacactgaaaccattaggaaaaatccttgtggttaacagcagaggcttcagagtgtaacctgtactcgggcctagaaattatttaaaatggcgactgatacgtctcaaggtgaactcgtccatcctaaggcactcccacttatagtaggagctcagctgatccacgcggacaagttaggtgaggtaggggctgacacattcttgaagctcactcttggatcaatccctgacttcaggccctgctgggtccttcttggtacatgttccttcccttactttggggagtctaggttgtgaatttgaaacaaaatcagattcttttcatcttccctttcccctcaaattcctgagaaaacctccaaccttctaaatttatagcaaatcaactataattatgtgtttccatttgaaattcaagctaaaataacatactttaaaaagtgtatcttaaaaatcatatttcacttcaaaaaaaacttgttaaaagtaatttgcatcagatcctggagtcgacttgaagaattctcctacatctgacacccagttaggccctttgagaaagagagaaaagagaattttttaatgcatgtttgattatggccatctcttttcttagaaggtagaagatagcaccatgccgattcgtcgaactgtgaattctacccgggaaactcctcccaaaagcaagcttgctgaaggggaggaagaaaagccaggtaaagtaaaatggtgacacagcttaaaacatcaaaagttatactgcaatttggagtgtcccataaattcctttgaacttaattgtttttttttttttttcatggctaagtgttttggggaaacatttagagagaatcagtagctattggtatgtcattgccagaccatgagggcaaagtaaggtttcatcttctctataaaggtttttggaaggtgaaaatgttatgttggaattaaaaacaaaaatgtttggggatgacaggaatggccagagagtagcattctggacataaagtgtcatggggatcagtgcagtgtgggagaatggaaaacgtgggcctttagaatagacagtggaaggttcatccagaaatcatctggaggccttcagagaagcaaatggtgatctgttgatctataacaggtattggtagagagaagattggccagtcagtggtgggagcataacaaatggaaagaaacatagacccatcaacatggagtactaatgctcctttatggcatgtataaccacctcttctccttttcccgtctttatttttcttctcatgatctttttggtttttttccttatcttttcccttttttcctttctctcttgccttttatctcaggtttttcagggataagcacactgtgctgcctctgttgtggctgttagaatcaattatttgctgaccagcatgtattaggaatagagggccgggcacagtggctcacacctgtaatcccagcactttgggaggccaaggagggcagatcacctgaggtcaggagttcgagaccagcctggccatcatggtgaaaccccatctctactaaaattataaacattatctgggcatggtggtgcatgcctgtaatccctgctactcaggaggctgaggcacaagaattgcttgagcccaggaggcagaggttgcagtgagctgagatcacgccattgtattccagcctgggcaacagagggaaactgtctccaaaaaaaagaaaaaaaaaaaaaagaggagtagaaaatacatgcatccttggtgcatcagggcagacatcaataaccagtcaatatactcttttctggctgagcctggattttttctctaaatccttagatgaatgctataagcaatttgggcaccctggcctaaggcagttaagaaacacgggaatccaaatatttaaaaaagtaaacgggtgctggtaagttgaagataggttatcttgtccagcactgggataagccacttggtggtccatcttaatccatgtttaacagccagctgaagccactaaatcactaataacatcagttttcagaatatatgccagagggttcagatgtaaagtattagaaaactcaaccagaagtttatgaagaaacagtgtcacttcacaagttgtatgtttgtttaatcttctctctatcccattttgtacacagtattttgtacatagaaattagacttcacttattttaaattttgtaaactctatgttttacacagaaacacagtagtttaatgagttggaaacagtcttatacataatacatattcaatatctgttgagtgactgaactttattaagccataactcttgagcagttattcttgagaagagaaaataatgtaaatttataagtcttactaccgtaaaacccctgaatgattcttagcttttcatcttttttagaataagacaaagtgtaaataaacatgactaactaatagtaaattcttgcccatgcagccatttaggtcaaattgttgggttgaggggcagtaaaagatatatcatgatgaaaaatacattttattgtggaaaacctaaatgtagttattatctttatccccagataccattgttatagtgaagttctatccataatactttgtcatcctaagcatatgggaaacaattctagaagcagagaattccaaaggaggatggaaatcactcgcttagtataagtgttagaattgtacttatgtgatttggttttaagaaagaagtggcattttaaaattctctttatagctgggcgcggtggctcacgcctgtaatcccagaattttgggaggctgaggcgggtggatcacgaggtcaggagatcgagaccatcctggctaacacaatgaaaccctgtcactactaaaaatacaaaaaatcagctgggcatggcggcacgcacctgtagtcccagctactagggaggctgaggcaggagaatcgcttgaacctggggaggtggaagttgcagtgagccaagattgcgccacagcactctagcctgggagacagagcgagactccgtctcaaaaaaaaaataaataaataaataaaattctctttatgggaaggccacaaagaagtcctcgtcattattgcaataattagttcacataatttaaatgatcaaattcttcaagcatatactttggcttgaagtatatgcttgccactggagtcctttttctttcatgttttttttattttttttatttttatttttttttggagttctctgaagtccctgcataaccagtgcctggggttctgtgttttatagtagctactcagagacatgctgtgaaggaaaggcacaaatagcagcagacctccatgttcccctcatatttctactcttgcttcagtcattcctcttggagaatacatgagtttttaaattacttattctctgagatttgcctgttgaattataaaatggctagtttcttaattatgagtctcatgaatattgcaaagtagaataattaaacaattggggatgaaatgagttttcctttctatgtaatttcctggtctatttttctaataatagataaataaccacctgaccaggaaacttgagtgacataaagaatgtaagaaaactgcattagtggtcattcattttcattttagaattcatttgttaattggagactttggctggtccgtttaataagataagcttttaccttttattgactcagattggaatacatctgcttatgcaattctgctcacctgattttttagaaccagacataagttcagaggaatctgtctccactgtagaagaacaagagaatgaaactccacctgctacttcgagtgaggcagagcagccaaagggggaacctgagaatgaagagaaggaagaaaataagtcttctgaggaaaccaaaaaggagtaaggagttatgtcttcttgctatttatatttgaagaatgtgtaaaaggactttagattagattgttttaaagtgttataacattggtttatgctaggtatttgctatttggatttaatttttagaattaccatttgaaataggtttattatatagttgtttgacctgttagaatatgctgtagttagcagaacacaatggtttgaataatccaaaagtctttgtcattggctttggaatgtgtttttgagcttgtaatttattgtgggagtatctgatattttaagcattggcaagacttcaataagaaatgaaacataactataaaaatctgacctagaagacatttcactattttattcctacttctgtgccaggagtgggttgtttttgtgtgcttatgttagaaggcattgatttgtatcaagccattggtagtgtgacctaaaagtctatatatgtttgatgaaatattcagttgaagaattggctttgagaatctgaaagtaaaatttgctattgatgtgtatctatataaagtgatggcagttactttttaatttttaatttttttttttttttttttgcaggagagctgatagtattcattccactcttttcataattggtcagaacagttagaaattgcttttaactatagtcatgcattgcttaacaatgggtatacattctgagagatacatctttaggcgatttcatcatcgtgccaacatcataaagtgtacttacacaaacctacgtggtacagcctactacatacctaggctttatgggatagtctgttgcttctaggctacaaacctgtacagcatgttactgtactaaatactgtaggcagttataacacaacggtaagtatttgtgtatttaaacatagaaaaggtacagtaaaaatataatataaaagataaaaaatggtatacctgtgtaggacacctaccatgaatggaccttaaaggattggaagttgtttgggtgagtgagtgagtggtaagtgaatgcaaaggcctaggactactgtgtgcaacttttaaaactaaaaagtttttatttttagcaacttttaaaactaaaaagtttttatttttaaaaacttttaaaactttaccaaaaacaaagacacaagccggacgcaatggtgcacagctgtagccctagctacttaggaagctgaggtggggggattgcttgagtcctgaaatttgaatctagattgggcaacgttgtgagacctcatatttataaaaaaacaaaactaagacacatacacacaccttaacctaggcctgcacaaggtcagggtcatcaatatcactgtcttccacctccagatcttgtcccactcaaggccttcaggggcagcaacacacatggacctgtcatttcctatgataacagtgctgtcttttggaataccttctgaaggacctgcttgaggctgttttacagttaactttttttttgtaggtagaaaacatatactctaatgataaaaagtatagtatagtaaacacataaactagtagcatagctgtttattatcaggtattatgtataattgtaatgtgctttttttttttttttgagatggagtcttactctgtcacccaggttggagtgtggagtgcagtggcgcgatctgggctcactgcaacctccacctcccaggttcaagcgattctcctgcctcaacctgccaagtagctgggactacaggcgtgcacctccacacctagctaatttttgtattttcaggagagacgggggtttcaccatgttggccaggatggtctcaatcttttgaccttgtgatccgcccaccttggcctcccaaagtgctgggattacaggcatgagtcaccgcgcccagccaatatgctatatttttgtatgactggcagcactgtaggtttgtttacaccaatgtcaccacaaacaagtgagtaacgtgctgcgctgtgatattaccacagctatcatgttaaccaggtaataggaggttttcagttccattataatcttaagggaccaccattgtatatgtggtctgttgaccaaatattgttacacagcacatgaccataaaagaataacttagtaataactataccttctagctataatcttcagggtattctttatctgagtttcataagtatagctaaggtctgtggaatttatagcaactatcgtgtgtgggtgtgggtgtgtttgtgtgtgtgtgtgtgtgtttaatggagatggcgtctcactatgttggctaggttgggcttgaactcctggcctcaagctgtcctccctcctcagcctcctaaattgctgggattacaggcatgagccactgcacccagcctatcgtctgttgttaaatgttctaatgcacctattaggtgcacagagtactgttatatactcagaataaaatttacataatgctttaaatctcacaaaattgttttgataaacatactcttataattcttgcaacaccttgggaaatagttggttctatattactgttttatagctgaggagaaagactcacatcatttactaagatcatatagctagctagtaaatgtttgagtgaaaatacaaacaaaggttttctgactttaagagcttgagttttttccactataccatattgcatctgttgtaattgttaactaatgtgcattttaaaattctcatttgtcttatgtactgagcccttataccagtgctaatttatgtgactcctttctcctgcagctaagagaaaaatacctttttaattcatttatagtacccagtttttaaagaagatttattttgtaaaattttgcttatggtacatgtcatcttagcctgtaaataaattaaagcattaatttttatccctccctggtcttttcctccttctgactttatacgtctttctagagagcttatcttctataataacaattctttgttttaaagtgagaaagatcagtctaaagaaaa

SEQ ID NO: 12384 - DNA, 572 bp, Homo sapiens
gcggtggggtttgaatgagagcggtgcctcggtaggtcgtcagaaagttacagtcgcccatctgagcgtttgtaagagatggaggcaggagtggtgaggttgattcttcaccacactgaaaccattaggaaaaatccttgtggttaacagcagaggcttcagagtgtaacctgtactcgggcctagaaattatttaaaatggcgactgatacgtctcaaggtgaactcgtccatcctaaggcactcccacttatagtaggagctcagctgatccacgcggacaagttaggtgagaaggtagaagatagcaccatgccgattcgtcgaactgtgaattctacccgggaaactcctcccaaaagcaagcttgctgaaggggaggaagaaaagccagaaccagacataagttcagaggaatctgtctccactgtagaagaacaagagaatgaaactccacctgctacttcgagtgaggcagagcagccaaagggggaacctgagaatgaagagaaggaagaaaataagtcttctgaggaaaccaaaaaggatgagaaagatcagtctaaagaaaa

SEQ ID NO: 12385 - DNA, 9940 bp, Homo sapiens
agtggtgagtgtgcggagcgccgaggctcgcgttccgccgctgcttccgtcgccggggcgggcgccgcggtgtccctgccgagcgtgagccccgaactgtcaccgcgccgagccccagcctcatccgtcggtgtccgcggtccgagctttccccgcctcgctggcggcccgcgctctcccccgccgtgcgcgttcgccgctgtggcctgtagctacctcgcctcgctgctttgtctccgctgctcttgccgtccttcccgcggccttctgcgggcggggctgtcggctgtcgctttgctgctccgcgacggcggccttgagtctcgctcccccggtgggaaacgtagaactggttactcgccaccttaggcggtggggtttgaatgagagcggtgcctcggtaggtcgtcagaaagttacagtcgcccatctgagcgtttgtaagagatggaggcaggagtggtgaggtgagagccccagatctgagggttggtactgcattaacagctgtgaccggggacagccacttaacctttttgagaaagagttgtctcccgtacggagaccggaccgggtgaactgtgctgccgcatccgcgtgcacgttctctctgttgtttattgtgcttcctgactttgcattgcattaaaaagtgagaatccaattcgaaataacgtctaaaaatcgcctggggctttttgagcacgctgtcttgtcttagagtgaaattagaggtgactagtgtcatttttgaaaggtgctctaattttgtttaacctgacataggcaaaaaacttgttagctttttgatttttcattgctcttctcaaaagtttagtgtaatttgtttcaaaatagaagtaacattttaaagtttgctgggttggttggttttggctttgtttttaagcttgcttggaagattgtagggctggaagttagtggagaacgtatactgaactcttcatttccggatgaaagttttaactccttacccagttagattgtgattttattgagatgagacactgtagtgtccttagtatctatgcccaaaacagacactgagtatatgtttgcttatataacttacatttgaaaatgaaaaacaagtggtgtcagcagtcaaattacaggcatgctttttgtgacatgactcgttaaatctgagtgtagtgaatgacttaagattgggaacaatgtgaggtgttcagcgcatcactaatgacatgtattacatatattttatggtaaaatgtgaaattatagtgctttccctaaaatgcatattatcaaggatatcagtaaactgaaatacgttgttaaactcctcacttttctacagccttctcttaatgtagaggaaataaattaaaactgaaatttggggctttttatttctacaatacttttttttattgcttgcattcaaataatttaaagccgtgcatggtggctcacacctgtaatcctaacactttgggaggccaaagaggaggatcgcttgaatccaggagttagagaccagcttgggcaaccctgtctctacagaaaatacaaaaactatccggctgtggtggcgcatacctgaagtcccagctactcaggtggctgaggtgggaggagatcgcttgagcccaggaggtcgaggctacagtgatccctggtcatgccactgtactccagactgagactctgtctcaaaataaacaaccgatttaatttaagcatttcccttgacaaaaagcaaatatttgttattgttgtaacattaagtttaagcaagctgatgttcataagaggaccatgtaaaccacaagtaaactcagactgtttatttttggcacatataaaaaccaagatgaaaaacatgaataggccgggcacggtggctcacgcctgtaatcccagccctttgggaggctgaggtgggcggatcacgaggtcaggagatcgagaccatcctggctaacacggtgaaaccccgtctctactgaaaatacaaaaaattagctgggtgtcgtggcggacgcctgtagtcccagctactcaggaggctgaggcaggagaatggcgtgaaccgggaggggaggttgcagtgagccgagatcgcgccaccgcactccagcctgggcgacagagcaagactcggtctcaaaaaaaaaaaaaaaaaaaagggaaaacacaaataagttttatttgttcatcctttagtttaacaaatattaattgagcatctattctgtgcctggtatgttcttaggcatcaggtatgcagcaaatgaaccaggtagataagatccctgccaggaacaagtgtggcagcctcaaaatttgatcattcagagtgcaatagtaaaaagtttagttaataggtacactgggtcagatgcagtggcttacacctgtaatcccaacacgttgagaggccgaggcagatggatcgcttgagcccaggagtttgtgaccagcctgggcaacatggcaaaaccctgttgatacaaaaaagagaaaaattagccgggcatggcggtgcgtgcctgtagtcccagctactagggagactaaggtgggagagtcgcttgagcctgggaggttgaggctgcagtgagctgtgatactacaacctgagcatcagagtgagaccgtgtcttaaaacaaacaaacaaaaaacataggtacagtgatgttaaggcagtgtgaattaacgttgcatatacttagctctgtaatgaacagtgagtttattaaatagccaattaacccaactattctaaagcaggtactacagattgaagctttgaagttctatgactttgacttttattaaggaaatgcagagctgaggctaacatctctttttttttttttttttttttttttgagacagagtctcacactgttacccaggctggagtgcagtggcatgatctcggctcactgcaacttcggattcccgggttcaagtgattctcctgcctgagcctcccgagtagctgggactaacccaactattctaaagaaagtactacagattgaacctttgaagttctacagcttttactaaggaaatgcagagctctaacatctctattttttttgttttttttttaaattgttgttgtttgttttttgagatggagtctcactcttcacccaggcttggagtgcagtggcatgatctcaggtcactgcaacctccgcctcccaggttcaagtgattcttctccctcagcctcctgagtagctgagactacaggtgtacaccacagcgcctggctaacttttgtgtttttagtagagatggggtttcaccatgttggccaggctggtctcggactcctgacctcaggtgatccctgcctcagcctaccaaagtgctgggattacaggcatgagccactgtacccagccctaacgtctcttaatatttatcccaaataactgggttttaagtgttcttcacacataatgaatgtagtcataagtactaccagatgtctttgttcattcaacttttattattattattattattattgagccaaggtcttactctgtcacccagactggagtgccgtggtgcaattctagctcactgtagcctggaactcctggacactggcagtcctcccatctcagtcttccaagtagctgggactacgggcatgtgccacagtgaccagctaattttttatcttttgtgtgtgtgggttttttctttctttttttttttttttttttcttttttttgagaaggagtcttgctctgtcgcccaggctggagtgcagtggcacaatctcggctcactgcaatctccgcctcccaggttcaagtgattcttctgcctcagcctcccaagtatctgggattacaggcgcgcaccaccacacccggctaatttttgtatttttagtagagacggggtttcaccatactggccaggctggtctcgaactcctgaccttgtgatctatccgcctcggcctcccaaagtgctgagatacaggcgtgagccaccatgcctggcccttttgtgtttttttttaaattattatttttttttcttgaggcaggctctgctctgtcacctaggctggaatgcagtggctcgatttcaggttactgcatccaaaaccttctgggctcaagcagtcctcccagtctcagcttcccaagtagctgggactacaggcgcatgccaccattcccagctgatttttaattttttttttttagagacaacgtctgtattgcccaggctggtcttgaactcctgggctcgagtgaacctcctaccttagcctcccaaagtgctgggattacaggtgtgagccaccacacctggcctgtttttaaattttaatttatttacttttggtaaagaccaagtctaatgttgactaggctagttttgaatttctagcttcaagggatcctcccacctctgcctcccaaagtgctggggttgcaggcatgagctactacaccaaatgggaaagtatttttttaaagatgcctatgaacggagactcctgaaggttgttgacttcacggtagcattttcagcctagctagtgttatcgtgggttaagaaagataaattcattagcaatataactttactaaggataacctgattgtgatattgttttatttccatatcatatttgcatgtaaaaataccagcagatttgcataaggctttttatcattaagaaaaatgggccgggtgcggtgggtcacgcctgccatcccagcactttgggaggctgaggcgggcagatcatctgagatcaggagctcgagaccagcctgaccaacatggtgaaaccccatctctactaaaaatacaaaattagctgggcatggtggcgcatgcctgtaatcccagctactcaggaaggtgaggcaggagaatcgcttgaaccaaggaggcggaggttgcagcgagctgagatcgtgccaccgcactccagcctgggcaacagagcaagactccgtctcaaaaaaagaaaaaaaaaatttaatattaatggatattctggttccctaagtatgagtgtgttacactgcactgaattctttcagctgactgaaagatttccttgcagctgactgacaattgacaagtctggtattgttcttggtgttcccataaaaatattttcccgataagtgtgaatgcatcctctttgtttcaatcttccggatttatcctagttgttgtaggttgggactgttacttgccaagttgaaagctcttcaattcttagacaaggttagaccttaatgtagaagttgcatgactgtcattccctactcattgttaatagttcattagcacagagatctagatacttaagtggtcttttttttttatattgaggaatttttgtataaaatgtcattgagtctcagatgagatttttggggaagagggggtgttagtgatcaggtaaacttgggtgactgcatgggtttttatctttgaatatttaattatattcttctgtactagttttccttacattaaaaatatgacagtcttagaagcatacttttattctcctaggtgatggtctaaatttgcttctgtgggtctggaagctattagaatgtcatgttattcagcagtatttttccccttgtgttttcccttaatagaaggaaaaaaaaagtactttaatagagatagagtttaagattacagttaattttcctgactctttcgagaacagtaacaacaaaagccttctcttggtaaactgatctttgactaactgttccttagtctctttattctatccttctaagttcctgatggtggcaggaggggatggggttaggttccttaggagcttccttgcccttgttgtctttgttcatgtggaaggtgcaacagctgccgtggcttatgcattcgtcttagttgctgctttatgtagtctatattttggtagttttatctttctgagtaaccaaatcatctgtcacttacctataaattttatagttatattttttccctttggatgtgtattaaatttagacgttttagtttagttttgtttctgttaatcttcacaccaggtcttttctgtgctttaggttgattcttcaccacactgaaaccattaggaaaaatccttgtggttaacagcagaggcttcagagtgtaacctgtactcgggcctagaaattatttaaaatggcgactgatacgtctcaaggtgaactcgtccatcctaaggcactcccacttatagtaggagctcagctgatccacgcggacaagttaggtgaggtaggggctgacacattcttgaagctcactcttggatcaatccctgacttcaggccctgctgggtccttcttggtacatgttccttcccttactttggggagtctaggttgtgaatttgaaacaaaatcagattcttttcatcttccctttcccctcaaattcctgagaaaacctccaaccttctaaatttatagcaaatcaactataattatgtgtttccatttgaaattcaagctaaaataacatactttaaaaagtgtatcttaaaaatcatatttcacttcaaaaaaaacttgttaaaagtaatttgcatcagatcctggagtcgacttgaagaattctcctacatctgacacccagttaggccctttgagaaagagagaaaagagaattttttaatgcatgtttgattatggccatctcttttcttagaaggtagaagatagcaccatgccgattcgtcgaactgtgaattctacccgggaaactcctcccaaaagcaagcttgctgaaggggaggaagaaaagccaggtaaagtaaaatggtgacacagcttaaaacatcaaaagttatactgcaatttggagtgtcccataaattcctttgaacttaattgtttttttttttttttcatggctaagtgttttggggaaacatttagagagaatcagtagctattggtatgtcattgccagaccatgagggcaaagtaaggtttcatcttctctataaaggtttttggaaggtgaaaatgttatgttggaattaaaaacaaaaatgtttggggatgacaggaatggccagagagtagcattctggacataaagtgtcatggggatcagtgcagtgtgggagaatggaaaacgtgggcctttagaatagacagtggaaggttcatccagaaatcatctggaggccttcagagaagcaaatggtgatctgttgatctataacaggtattggtagagagaagattggccagtcagtggtgggagcataacaaatggaaagaaacatagacccatcaacatggagtactaatgctcctttatggcatgtataaccacctcttctccttttcccgtctttatttttcttctcatgatctttttggtttttttccttatcttttcccttttttcctttctctcttgccttttatctcaggtttttcagggataagcacactgtgctgcctctgttgtggctgttagaatcaattatttgctgaccagcatgtattaggaatagagggccgggcacagtggctcacacctgtaatcccagcactttgggaggccaaggagggcagatcacctgaggtcaggagttcgagaccagcctggccatcatggtgaaaccccatctctactaaaattataaacattatctgggcatggtggtgcatgcctgtaatccctgctactcaggaggctgaggcacaagaattgcttgagcccaggaggcagaggttgcagtgagctgagatcacgccattgtattccagcctgggcaacagagggaaactgtctccaaaaaaaagaaaaaaaaaaaaaagaggagtagaaaatacatgcatccttggtgcatcagggcagacatcaataaccagtcaatatactcttttctggctgagcctggattttttctctaaatccttagatgaatgctataagcaatttgggcaccctggcctaaggcagttaagaaacacgggaatccaaatatttaaaaaagtaaacgggtgctggtaagttgaagataggttatcttgtccagcactgggataagccacttggtggtccatcttaatccatgtttaacagccagctgaagccactaaatcactaataacatcagttttcagaatatatgccagagggttcagatgtaaagtattagaaaactcaaccagaagtttatgaagaaacagtgtcacttcacaagttgtatgtttgtttaatcttctctctatcccattttgtacacagtattttgtacatagaaattagacttcacttattttaaattttgtaaactctatgttttacacagaaacacagtagtttaatgagttggaaacagtcttatacataatacatattcaatatctgttgagtgactgaactttattaagccataactcttgagcagttattcttgagaagagaaaataatgtaaatttataagtcttactaccgtaaaacccctgaatgattcttagcttttcatcttttttagaataagacaaagtgtaaataaacatgactaactaatagtaaattcttgcccatgcagccatttaggtcaaattgttgggttgaggggcagtaaaagatatatcatgatgaaaaatacattttattgtggaaaacctaaatgtagttattatctttatccccagataccattgttatagtgaagttctatccataatactttgtcatcctaagcatatgggaaacaattctagaagcagagaattccaaaggaggatggaaatcactcgcttagtataagtgttagaattgtacttatgtgatttggttttaagaaagaagtggcattttaaaattctctttatagctgggcgcggtggctcacgcctgtaatcccagaattttgggaggctgaggcgggtggatcacgaggtcaggagatcgagaccatcctggctaacacaatgaaaccctgtcactactaaaaatacaaaaaatcagctgggcatggcggcacgcacctgtagtcccagctactagggaggctgaggcaggagaatcgcttgaacctggggaggtggaagttgcagtgagccaagattgcgccacagcactctagcctgggagacagagcgagactccgtctcaaaaaaaaaataaataaataaataaaattctctttatgggaaggccacaaagaagtcctcgtcattattgcaataattagttcacataatttaaatgatcaaattcttcaagcatatactttggcttgaagtatatgcttgccactggagtcctttttctttcatgttttttttattttttttatttttatttttttttggagttctctgaagtccctgcataaccagtgcctggggttctgtgttttatagtagctactcagagacatgctgtgaaggaaaggcacaaatagcagcagacctccatgttcccctcatatttctactcttgcttcagtcattcctcttggagaatacatgagtttttaaattacttattctctgagatttgcctgttgaattataaaatggctagtttcttaattatgagtctcatgaatattgcaaagtagaataattaaacaattggggatgaaatgagttttcctttctatgtaatttcctggtctatttttctaataatagataaataaccacctgaccaggaaacttgagtgacataaagaatgtaagaaaactgcattagtggtcattcattttcattttagaattcatttgttaattggagactttggctggtccgtttaataagataagcttttaccttttattgactcagattggaatacatctgcttatgcaattctgctcacctgattttttagaaccagacataagttcagaggaatctgtctccactgta

SEQ ID NO: 12386 - DNA, 538 bp, Homo sapiens
agtggtgagtgtgcggagcgccgaggctcgcgttccgccgctgcttccgtcgccggggcgggcgccgcggtgtccctgccgagcgtgagccccgaactgtcaccgcgccgagccccagcctcatccgtcggtgtccgcggtccgagctttccccgcctcgctggcggcccgcgctctcccccgccgtgcgcgttcgccgctgtggcctgtagctacctcgcctcgctgctttgtctccgctgctcttgccgtccttcccgcggccttctgcgggcggggctgtcggctgtcgctttgctgctccgcgacggcggccttgagtctcgctcccccggtgggaaacgtagaactggttactcgccaccttaggcggtggggtttgaatgagagcggtgcctcgaaggtagaagatagcaccatgccgattcgtcgaactgtgaattctacccgggaaactcctcccaaaagcaagcttgctgaaggggaggaagaaaagccagaaccagacataagttcagaggaatctgtctccactgta

SEQ ID NO: 12387 - DNA, 28990 bp, Homo sapiens
aaaaaggagtaaggagttatgtcttcttgctatttatatttgaagaatgtgtaaaaggactttagattagattgttttaaagtgttataacattggtttatgctaggtatttgctatttggatttaatttttagaattaccatttgaaataggtttattatatagttgtttgacctgttagaatatgctgtagttagcagaacacaatggtttgaataatccaaaagtctttgtcattggctttggaatgtgtttttgagcttgtaatttattgtgggagtatctgatattttaagcattggcaagacttcaataagaaatgaaacataactataaaaatctgacctagaagacatttcactattttattcctacttctgtgccaggagtgggttgtttttgtgtgcttatgttagaaggcattgatttgtatcaagccattggtagtgtgacctaaaagtctatatatgtttgatgaaatattcagttgaagaattggctttgagaatctgaaagtaaaatttgctattgatgtgtatctatataaagtgatggcagttactttttaatttttaatttttttttttttttttttgcaggagagctgatagtattcattccactcttttcataattggtcagaacagttagaaattgcttttaactatagtcatgcattgcttaacaatgggtatacattctgagagatacatctttaggcgatttcatcatcgtgccaacatcataaagtgtacttacacaaacctacgtggtacagcctactacatacctaggctttatgggatagtctgttgcttctaggctacaaacctgtacagcatgttactgtactaaatactgtaggcagttataacacaacggtaagtatttgtgtatttaaacatagaaaaggtacagtaaaaatataatataaaagataaaaaatggtatacctgtgtaggacacctaccatgaatggaccttaaaggattggaagttgtttgggtgagtgagtgagtggtaagtgaatgcaaaggcctaggactactgtgtgcaacttttaaaactaaaaagtttttatttttagcaacttttaaaactaaaaagtttttatttttaaaaacttttaaaactttaccaaaaacaaagacacaagccggacgcaatggtgcacagctgtagccctagctacttaggaagctgaggtggggggattgcttgagtcctgaaatttgaatctagattgggcaacgttgtgagacctcatatttataaaaaaacaaaactaagacacatacacacaccttaacctaggcctgcacaaggtcagggtcatcaatatcactgtcttccacctccagatcttgtcccactcaaggccttcaggggcagcaacacacatggacctgtcatttcctatgataacagtgctgtcttttggaataccttctgaaggacctgcttgaggctgttttacagttaactttttttttgtaggtagaaaacatatactctaatgataaaaagtatagtatagtaaacacataaactagtagcatagctgtttattatcaggtattatgtataattgtaatgtgctttttttttttttttgagatggagtcttactctgtcacccaggttggagtgtggagtgcagtggcgcgatctgggctcactgcaacctccacctcccaggttcaagcgattctcctgcctcaacctgccaagtagctgggactacaggcgtgcacctccacacctagctaatttttgtattttcaggagagacgggggtttcaccatgttggccaggatggtctcaatcttttgaccttgtgatccgcccaccttggcctcccaaagtgctgggattacaggcatgagtcaccgcgcccagccaatatgctatatttttgtatgactggcagcactgtaggtttgtttacaccaatgtcaccacaaacaagtgagtaacgtgctgcgctgtgatattaccacagctatcatgttaaccaggtaataggaggttttcagttccattataatcttaagggaccaccattgtatatgtggtctgttgaccaaatattgttacacagcacatgaccataaaagaataacttagtaataactataccttctagctataatcttcagggtattctttatctgagtttcataagtatagctaaggtctgtggaatttatagcaactatcgtgtgtgggtgtgggtgtgtttgtgtgtgtgtgtgtgtgtttaatggagatggcgtctcactatgttggctaggttgggcttgaactcctggcctcaagctgtcctccctcctcagcctcctaaattgctgggattacaggcatgagccactgcacccagcctatcgtctgttgttaaatgttctaatgcacctattaggtgcacagagtactgttatatactcagaataaaatttacataatgctttaaatctcacaaaattgttttgataaacatactcttataattcttgcaacaccttgggaaatagttggttctatattactgttttatagctgaggagaaagactcacatcatttactaagatcatatagctagctagtaaatgtttgagtgaaaatacaaacaaaggttttctgactttaagagcttgagttttttccactataccatattgcatctgttgtaattgttaactaatgtgcattttaaaattctcatttgtcttatgtactgagcccttataccagtgctaatttatgtgactcctttctcctgcagctaagagaaaaatacctttttaattcatttatagtacccagtttttaaagaagatttattttgtaaaattttgcttatggtacatgtcatcttagcctgtaaataaattaaagcattaatttttatccctccctggtcttttcctccttctgactttatacgtctttctagagagcttatcttctataataacaattctttgttttaaagtgagaaagatcagtctaaagaaaaggagaagaaagtgaaaaaaacaattccttcctgggctaccctttctgccagccagctagccagggcccagaaacaaacaccgatggcttcttccccacgtcccaagatggatgcaatcttaactgaggccattaaggcaagtttttatttcaagcaattcatcttagatttattatgttcatttttttcttatttgaaaatggcatatatctgtctagacatcataaatcttgttctgcttcctaaaggagttttaaagagaggaaagtcattataagttcatgtttttctaatataatcacatttggtgaacactgttaatttttttaaaaaaattatatttaatatagcaaatattttaactttagaatttttaaatgcagtttatcgattaagtacagtttttatttgaaggctgaaaatgttaattcattgaacaaacatttaaggactaccttcctctgttgggcgcccctgctagtggtgaattaactaaggctagcaaagtccttgcccttataaatctaattgtgactcagtaactgaaaaatattgagaatttttgtttaaaaaatatctctaggttcatttctaaagctaagtgatcttggtagtggttatctttcacacctgaaccctgttaataaacactgctttattacctagacattccaaaatgcttacaaaaattatcctccttacatagatttatgatttcattgactttcattagatgtagttttcctattttaatttttaaaggttatcttctaatttgacattgcctttattgtataagtcttttcatttaattttgccttgtttagttcatatgatcagatgataagaggagttagaacagacccatctttcagggaccctgttgttaggatctgaggcaggactggggagacagggatacagatgattttaaccagaaaaggggggatgtgtacgaaaaggagcagcctggttgtcattctcagaatatgagaagatagcactaacacataaactggaaaaagggtttgccttcagacttctccctttactccttcaagacttcttatgctctcacctcattaagaaaactttattggtctagattacctcactgtagtgaaatctctgttctttgtatagcctttcttcaaggatttcacttgatgaccactcagcctgggtttgaaggagcagcatcatagtgaggatggaaaaagggctgaaactttaaaatagtgaaataaaaaattaaaacaatatcaatttggcttaaagaatggtttgaatataattgtgcatatttatggagatgattgattttatatagataatgtgtattccatgcaatatgacaaattattgtttcagaccatggataccattttctgtattgaacaggaatcatgatgtctactaccatctcactgtcggattggtggagcaaaagattatttgtttcagcattagtgttcttttctgcttgattttctttgctctgtgttttcttttaagatcaggagtaaacctcagtaggtcattaatagttcagagacatagacttgaattacatgacccatattaatacaacttgtttcgtgttgtgcaatcttttctggaccatctacctgtgagttatttttctttgttgtcaaaatgtataaaaacattcaacgaagttcttatccaatgagaatgaataagtgctacattgatttaatagacactgtggcagtacaaaattgatggactagctcattagataaatgacagatgctacttttgtgtgtttcaaaatttaaagtatttgatttcaagtcagtgaccagttggaaaacaaaattttaagcatttgaaaaaaattaagtatttgctgcctttgtgacataatgagctacttaattcttccaggtgcattagtcaaatggagtataagtaaaataggatggaaatggaagagggcacattaaattcaaatagaacaccttcactattacccaaaactctccttcagcactttgccatctgtaaacccatttttatgccacttattcagattatctttgattcttctttctgctgacattcatacagagccttcagggaaatgtcctggcatgctcattccttaagctcgtgccttaaaatgggacagatctgtgatcctgtaagtgataggtttgttctgcttttctcattttgatgccaaagattcatcttctaaatacagaatggaattaaaatggaaagaggttcttcattatacatagaatgttgttcgtgttcagtatggtctcttaggctgttttgaacaatttaaaattgtagtagaaatatttagtaattctgttacttctctgtagtcattatgaactgaagtcttctgaagttcattcttccctaccgtttttgtcatctatcatcaaattcacttccaaaataatttattttgaaaatatatgtcaggctctatctaataaaaaaaaacaactagtttaataaatcttttctaggcatgcttccagaagagtggtgcatcagtggttgctattcgaaaatacatcatccataagtatccttctctggagctggagagaaggggttatctccttaaacaagcactgaaaagagaattaaatagaggagtcatcaaacaggtattacacaattgttagtagtaagatcatttcattgtgtattagctttaagtctacagttagtaacatttaggctttttgtgccttttttgttaaaaataagtttcatgatgatgaaattccttaagtttaacctagttgaattatctgaggctaggtttcgaaaatgctggtgccattaagatagtgtaacttttttctagcttactttgctcttaattggatattttttggggggctgcttgtgcttgaaatcatgtagcactgaacatgaaaaagaggtaaggaatcctactactgaaacagcaaaaatgaggctagggatggtggcctacacctgtagtcccagcaccttgggaggcttagttgggaggatcacttgagcccaggagttcgagaccagcctgggcaacatagcaagaccccttctctacaaaaaatacaaaatcagcagggtttggtgacacatgcctctagtcccaggtacttggaaggcagaggcaggaggaccgcttgagcctgggaggttgaggctattgtgagttacgatctcaccactccagcctcggtgagagtgagaccctgtctgaaaacaaaaaggaataacagaaataataattgcccttgtcttaggtttgtttcctttaaagcctaacttacatgatagacttgttactattaatttttagcttcataaatgtgctcaccttaactgattagtatctaaactattaaagcctgttaagagtatcagagaaacccgagtgaaatgtgactagtactagaacaaatgttgatttcaggcataaatctactttatcttgcatagtgcatggaaacttagaaccatagaaatctaaagctagaataaactttatattatgttaccctcttcagaggtccagagtgatgaaataactgctaaggtcttacggtagtggcaaaaattttaaaaacctagttcaccccattcctagagtcttgttaagttttttctataccccctgcctgtttgatcagaacagaattctgtgccactcaggcatttcagctctgcttagggacttccaactagtacttaattgcacagatacgtcttgtctcctatgtgccagttgcctggaggtctgttagtgaataaaacagattgctgctctgtggagctaggagtccagctttctcaaaatgtaaaactgatatttaaatggcctttaaaattatcactgacggccaggcacagtggctcatacctgtacgctgaggtgggagggttgcttcaggccaggagtttgagaccagcctgggcaacatagcaaggtgaggccctgtctctacaaaaaaattatttctttattctattttattttactttttgagacaggatctcactctggcccaggctggggtgcagaggtgcaatgtcagctcaccgcactctctacctgctgggctccagccgtcttcccacctcagcctcccgagtacctgggactataggtgtgcaccagcacacccagctaatttttgtattctttgtagagacaaggttttgccatgttgcccaggctggtctcaagctcctgggcccaagtgattcacccacctcagcctcccaaagtgctgggattacagacgtgagccaccatgcccagcctttacaaaaaacttaaaaattagccaaatgtaggggtgcatgcctctagtcccaactcatgaggctgaggcaggaggatcgcttgagttgagctatgagctaacatagcaatgagctatgattgtgccactgcactccagcatgggtgacagagtgagaccctgtctctaaaataaaacaaaattatcgttgactaaaaagtcttacctagttaatataattattagagccaaggacctgttgtgtaacatgtcagcaaagcttatgagatggcttcatgttttagtttatgacctgctctagcctacatagcctgaccacccttggtttgatgcctaaacaactcttagtaggctaaaagcattccagcttgattgctgcattgatagcagtgtaggtaaaactaagctgtggaggactttagttattgtgaatcaactttttttttgagatggagtctcgctctgttacacaatggcatggtctcagctcactacaccctctgcctcccgtgttcaagcaattctcctgccttagtctcctgagtagctgggattacaggcgcccgctaccacacccagctaatttttgtatttttagtggagatggggttttaccacattggccaggctggtttcaaactcttgacctcaagtgatctgcccacctcggccttccaaaatgctgggattataggaatgaaccaccgtgcctggcctattgtgaatcaactttaaaattttatgaaagtgctttgtgaactggaaatatgtggtaaaacttaacataccattgtgtgcagtggctaaaaaattgtttgtttgttttttgagacggagtatcgctctgtcacccaggttggagtggagtggagcgatctcagctcactgcaagctctgcctcctgggttcacgccattctcctgcctcagcctcccgaatagctgggactacaggcacccgccaccacgcccggctaattttttgtatttttagtagagacggggtttcactgtgttagccaggatggtgtcgatctcctgacctcgtgattcgcccgcctcggcctcccaaagtgctgggattacaggcatgagccaccgcgcccagccaaaaaattgttggataacccttcccataaggaataatgtatcattggtaaactgtgggaagttacgtggtctgagactaattaggctctaaactttttccaaggtgcttttaagacagtgagggcttttcttatttccctaagagattgtgtcccttccttttttgggacatttttgttttgattttttatttcattttgaaagtttttaataaactgtttaacgtggtatcacagtagcattcttcccaaaattttgtagatgagaaaacaaaagctcagagggttaactgggttgtccagtattactcagcatcagctagatggtatataaaggagctttcatctgaagtcttttgactctgcattgactgtttttttttttttctctgaagaagtaaacaccactttacattagctcttgcattaccatggcctgtaatttccttagcctactgtaaagttatgaatactagaataacaaaaattaatttactttaggttaaaggaaaaggtgcttctggaagttttgttgtggttcagaaatcaagaaaaacacctcagaaatccagaaacagaaaggtaagacatctataccacagtttgagtgctgtggagctgttactgctactaaaaatagcaacattcattgagtgtttgctgtgtgcctggcactatgcaaggttcagcctttctgctaaggcctagggaagttataaataatttgttcctctagtgagtagaatagccaaggtgcagatccaagcagtccaacctggttaagcctgtgctcttaagtgccttatattaaattatgggcagctatataaattacactgttttttgttttgagatggagtcttgctctgttgcccatgctgtagtgcagtgacatgatctcagctagctgcaacctccgcctcctggattcaagcaattctcctgcctcagcctcctgagtagctgggattacaggcactcgccacagtgcctgactaattttttttgttagtagagacagggttttaccgtgttggccaggctggtcttgaactcttgacctcagtgatctgcccgcctctgcctcccaaagtgctgggatttacagggtgagccattgctcccagctgaattatactgctttttgtgaaatatcttttaaactagaggaggtataagagtcctctgtttttttgtttgtttgtttgtttgttttcttttctaagatagaatcttgctctattgcccgggctggagtgcagtggcacgatcttggctcactgcaacctctgcttcccggattcaagtgcttgtcctgcctcagcctccccagtagctgggactgctacaggcatgtgccaccgttcccagctaatgtttgtatttttagtagagatggagtttcactatgttggccaggctggcctccacctcctgacctcaggtgatctgcctgcctccgcctcccaacgtgctgggatgatagatgtgaaccacaccatgcccagcctaaaagtacatttttaccaaatactagacccaaaaacaatacccagatccaatttttcttcctgtttttgtaaatactaacattcttcttcccaacacatataatttcatttgtgtaaagtatttctacaataataaagtgaaatgtcttgtactcatttatatcagaaattgaaataatatttttctacaccttttttttttgttttacaactctgaagctttttatccttttttcatagacttttcaaacactttcaaaatgaactttatgcatttttttctggtgctgtacttcataaattaggacctttaaaatctacactcctttttacttttatgtgtgttttttgtgtgtgtgttttgagacggagtttcgctcttgttgctcaggctggagtgcaataatgcaatctcggatctctgcaacctccgccttccgggttcaagtgattctcctgcctcagcctcctgagtaaatgagattgcaggtgcatgccaccatgcctggctaattatgtatttttattagagacagagttttaccatgttggtcaggctggtctcaaacttgagacctcaggttatcagcccacctcagccccccaaagtgctgggattacagacgtgagccaccacacctggctcctttttcttgttttgttgtgttttttttgtttttttttttttttgagacggagtctcgttctgtcacccaggctggagtgcggtggctccatcttgcatcactgcaatctccacctcccgggttcaagcagttcttgtgcctcagccttccaagtatctgggattacaggctacgacgtctggctaatttttgtatttttagtagagaggaggttttgcaatgttggccaggctggtctttaactcctgacctcaggtgatctgcccacctcggcctcccaaagtgctgggattacaggtgtgagccaccacacccagcttttatatgtatttttaatgctgtccattgaaaattttatatcaaagaaattgccataaaattgacaaatttggtaatcaactgaggaaagcccttgagttgtatgtagaaacatttacgttctataatgatcataatttttgataattacttttcagaataggagctctgcagtggatccagaaccacaagtaaaattggaggatgtcctcccactggcctttactcgcctttgtgaacctaaagaagcttcctacagtctcatcaggaaatatgtgtctcagtattatcctaagcttagagtggacatcaggtatgagccattggcctggcctttaaaacatgatgtgttacttcctttagctcccttttcatgggaaaagagatagattaaatactgaggaaggattactttcagctaaaaataaatcttttttattggttttatttttttgccccattatgtttttattttcatatctccatgtataattttttttttttttttttttttagttttttgagacagatttgttcttgtcacccaggctggagtgcagtggcaccatctcaactcactgcagcctctgcctcccgggttcaaaggattctcctgcctccgcctcccgggtagctgcgcctacaggcacccgccacgacacccagctaatttttgtatttttagtagagccaaggtttcatcatgttggccaggctggtctcgaactcttgaactcaagtgatccacctgcctcggcctcccaaagtgctaggattacaggcgtgagccgctgtggccagcctttttttttttgagatgaagtcttgctcttgttacccaggctggagtgcaatagcgcagtctcagctcactgcagcctctaactcccgggttcaagcgattttcctgccacagcctccgaatagctgggattacaggccccggttaccgtgcctggcctagttttgttttttgtgtggtttttttttttttttttccaaacccaaatcttatctttctttgtaagatcctggtagagtaactcttttaaatgttgtcagctgttaagatatgtagtattgaactgtgtatcttctcagatatgaaatatcttaacagttgacaacattaaaagagttactctaccaggtttaaaagaaaaaaaacaaaaaaaaaactaggctggctgtggtggtgggcatgtgcagtctcagctactcaggaggctgaggcaggagaatcgcttgaacccaggaggtggagttcgcagtgagccgagattgcgccattgcactccagcctgggcaccaagagcaaaactccgtctcaaaaaaaaaaccataagagtaaaaaggagtgtagactttaagggtcctaatttattcttagcctttaataactaaataatgaagtacagcaccagaaagtaatacataaagttcattttgaaaatgtttgaaaagtctgtgaaaaaaaggatagaaagcttcagggttgtaagaaaaaaaagtgtagaaaatactatttcaatttctgatataaatgagtacaagacatttcattttattatagaaatactttacacaaatgaaattatatgtgttgggaagaagaatgttagtatttacaaaaacaggaagaaaaattgcatctgggtatagtttttgagtctagtattgggttaaaatgtacttttaggctgggcacggtggctcacgcctgtaatcctagcactccagcctgggtgacagagtgagactcagtctcaaaaaacatatatatgatagatatatgcatacatatgtacatacatatacatcatatatatatttcatgagaattcaggcttcaataacacctgtacatagaaatagcataatgtttccatcatttaaacatgcagcataaaattctgagataattttgttagtaattgatacgtaaaatttgccatttaacgtcttgacagatcatttagattgtcacatttgctcagttgtagattcatgcagatatatcaatttgtttaaatttgtaattcacagactctgagagtgtttgtgtgagatgacttctagaaaattatgtttaatccagatttctgtctacagaagactaccatattgaatgcacattgtcccgatacagtgtagtaccagtatttacttgcattactgaggcatgcaattagaagtgctgaggtttcagtccagaagccacattttcagaaaatcagtagtggtcatcagaatgccaaattaaagagctagtgaaatagtgcaaaagaaaagggaattatagaagcagaaagttctaaattaatgtgctgatattttcatgcttcttatatgctgagtatagtggtagtaggcagacacaattgtggatcaaaaatgcgttatatgatgcatttaaagatggaaacatatttcactattctttaacaaagaataaagtttatttggctcatggtactgcaggctgtacaagaagcatagtgcaggcgtctgcttctagtgagggcttcaggaaacttacaatcatggtggaaggaggagctatcgtatcacatggcaaaaaagggagcaagagaggagggaaaggtgccacactcttaaccagatctcacactcttaaaacaaccagttgttttaaacaacccgctcattacggccaggaaggcacgaagccattcacgaagccatccctataactcagacacctcccactaggccccacctgcaacactggggatcatatttcacttttatctcctttgtgtgaccccaaaatatctgagacaggtctcagtcaatttagaaagtttattttgccaaggttaagattgtgcccgtgacacagcctcaggaggttctgaaaacttgtgcccagggtggtctgggcacagcttggttttacacattttagggaaacatgagacattaatatatgtaaggtgtatgttggtttggtctggaaaggtgggacaactcaaatcagggagggggcttctaggtcataggtaaataaaagacaaagaatttcattatttttgagtttctgattagctttttcaaaggaggcaatcagatatgcatttatctcagcagatgaatgacttgaagttctgtctgtcgtttgtctgcaaggattttccttgtgattaggggattcgtgattagggtttgtgattaggggatcccaagatttattttcttttcacagcctttattctctgctttttggtgagtggagaccatatcttcccccatttttttttcttgtagttctactctacttacataaggtagtgtgttgctaccagtgtgcctttgctgcacttcttttgaaacatattgtcatgaccttaggctgaaacaaaatttacctgataatggatgggttgtcaacccaaaggtgctaatgaacctgaagaccttttctcatggcctttttaatggtaattttttccattgaaacttttttctcttatgtgaaaccatattgattttctctaattcttgattataatggagtcctttcatatacacatttaacttgaaaattcagccattcttgcttggccaaacaaaagaggaagaaaaatacagtttcaccaaagtgtaagttgtctatactggtatctacaatgtctccccttccactttctccactttagtcagactttatccccaccactttacctgaatattttctgtcagtctccacgttggaaatttcagtggtcaattcatagtccttaccagctgccctctcaatggcatttgacacagttgatgactcctacctgcttgaaacattttcttcacttgccttccaggacaccacactttcctgatttttctgtaacctttttacccttcgtttctcaatctcctaaggatttctgctttacctcttaatagaaaggagccctcagggttataccttaggcctctcatcttttatgtccacattcacttggtgattcctttcacttgcaaaactgtaaataccagctataaactattaattcacaaatgtatgaatctagcccatacctcccttctaacttcagattcgtgtatacggatgcctgttcagcatcagcacttggatgtctgatttaaatgttgaaaacatttaatgatccccactctgctccctctccccccaaaaatccctgcatttcccacattatcttcatttcagttcatgacaatattatccttccatgtgctgaaaccaaaaaccctgactttgtgctggtctcttctctttatcagacacctttatctaatctataagcaattatttttgctctgtctttaaaatatatcagtaaacaggctgggtactgtggctcatgcctgtaatcccagcactttgggaggcaggtggatcacatgaggtcaggagttcgagaccagcctggccaacatggtgaaaccccatctctactaaaaatacaaaaaaattagccatgcatggtggcacgtgcctgtagttccagctactcaagaggccaaggcaagagaatcacttaaacctgggaggcatagtctgcagtgagccaagatcacaccactgcactccagcctgggcgacagagtgaggctccgtctccaaataaataaataaaataaaatatatcagtaaacagactacttgtcatcacctgcactaccattctcttccaggccaccatcatctctcacctgtattagagcaataacttcttaactgcttttttcatgctccctttcagtatgttcttaccatcatagtgagagtgagacttttttaaaaatgtaagttctatcactttttaaaatttatttatttatttatttgagaaggaatcttgttctgttgcccaggctggagtgcagtggcatgatctcggctcactgcaacctccgcctcctcggttcaagcgattttcctgtctcagcctcccgagtagctgggattacaggctgtgccaccacacccgggtaatttttgtatttttagtagagacagagtttcaccatgttggccaggctggtctcaaattcctggcctccagtgatctgaccgccttggcctaccaaaggattacagacgtgagccactgtgcccagcctgtcacttttttttttttccaagctggggtcttgctctgttgcccagactggagtatagtggcaagatcgtggctcatggcaacctcgaactcctaggctcaaacgatcctcccactgtggcctcaaaagtagctgggactgcaggaatgtgtcaccacacacagctagtagtttttaaattgttaatagagacagaatctccctacattgcccagactggtctttaactcctggcctcaagtgatcctcctgcttcggccacccaggtgttgggattacaggtgtgagccactgtgtccagtgtcatgtcgcctttctactcaaacattcagtgtcttcccaatcccgtcacagttaaaaaatcagtctgtagggctgggtgtggtggctcacgtctgtaatcccagcactttgggagtctgaggcgggtggatcacaaggtcaagagttggagaccttcctggccaacatggtgaaaccccatctctactaagcatacaaaaattagccgggcatggtggcacatgcctgtaatcccagctactcaggaggctgaggcaggagaattgcttgaacccaggaggcagaggttgcagtgagccgagattgtgccactgcactccagcctgggcgacagagcaagactctgtctcggggcaaaaaaaaaaaaaaaaaaaaatcggtctttaaaatggcccacaaggcactacactcacttgtatctctgacctaagctactcctcttcactctctcactggtctcagagcctttgtgttgcattccctttacctgaatgtatttttccccataagccactttgccagttcctttacttccttaagtttttagtctgatgtcatcaccaaaggcctgccttgactatttttattattcttgttacttgggcatataaacaagagaaatgtatttctcacagttgtgcagactcgaagtctgagatcagggtgccagcatggttgggttctgtgagggcctcttctgggtgtcagagtgccttcttctcattgtatcctcacatgacagaaggagcccttaatactttcttaaatgttttattttggaaattttcaaacatatacaaagaaggatagagaacattaaccatcatacttaaatcattcttttttttgtttggagacagagttttgctcttgttgcccaggctggagtgcaatggcacgatcttggctcaccgcaacctccgtctcctgggttcaagcaattcttctgcctcatcagcctcccaagtagctgggattacaggcatgcgccaccacacctgactaattttgtatttttagtacaaatggggtttctccatgttggtcaagctggtgtcaaactcccaacctcaggtgatctgccggcctcggccccccagagttctgggattacaggtgtgagccacctcgcccggccacttaaatcattcttaacaaaattaataatttcttagtattatctagtacccagtccatgttcaaatgtccttaattgtctccagaatgatattttacagttgtttttcctaacatggcccacacgttgtatttggttgataatgaccaaccaaaacctctctcccagccaggtgctgcggttcacatgtgtaatcccagcactttgggaggccgaagcgggaggatcgcttgaacctacaagttcgagaccaggctgggcaacatagtggaaccccctctgtacaaaaaaaaaataacaaaaattagctggtgtagtggcatgtgcctatagtcccaactactcgggaggctgaagcagcggaagggttgcttgagcctgggagatcaaggctacagtgagccatggtcataccactgcactccatccagagtgacacagtgagatcctctctcagaaaaaaaaaaaaaaaaggccaggtgtggtggctcacacctgtaatcccagcactttgggaggctgaggcgggcagatcatgaggtcggaagatcaagaccatccttgctaacacagtgaaaccccgtctttactaaaagtacaaaaaattagccgggcgtggtggcacgcgcctgtagtcccagctacttaggaggctgaggcaggagaatcacttgaacctgagggggcggaggttgcagtgacctgagatcgcgccactgcactccagcctgggtgacagagggagaatgcgtctcaaaaaaaaaaaggagtgtttaacccatagggtttaagtctcttagtatgtgcgaagcacttcttagaatagtccttggtacctagtaaatgttcaactaatgttattcttactagtctcagttccagcttctcatagtatgaccattacagcatgctaaataggattctaatatttaaagacataatttttttgttttgttttttattttttatttttgagacagagtcttgctccgttgcctaggttggattgcaatggcatggtctcagctcactgcaacctccgcctcccgggttcaaatgattctcctgcttcagcctcctgagtagctgggactacagttgcctgacaccacgccccgttaatttttttgtatttttagtagagctgaggtttcactatgttggccaggctggtctcgaactcctgatctcgtgatccacccgcctcggcctcccaaagtattgggattacaagcgtgagccaccgcgcctggccaagacattggtttttaatataacatgcaagtcaccttcttaatttgataacagtgatttttttgcaaccctagaagaagaactgggcatattgggtatatagagactcagagttggccttgaagaaggtgtctttggaaattttctaggtctgtcatacagcgttagaagtcaaatgttaaaatctaatcttcagccaggcgtggtgcctcatacctgtaatcccagcactttgggaggccgagtcaggcagatcacctgaggtcgggagttcgagaccagcctgaccaatatggagaaaccccgtctctactaaaaatgcaaaattagccgggtgtggtggcgcatgcctgttatcccagctactcgggaggctgaggcaggagaattgcttgaacctgggaagtgaaggttgcagtgagccaatatcgtgccattgcactccagcctgggcaacaagggcaaaactccacctcaaaaaaaaaaaaaaaataataataataatagtaatcagaactctagatctgggaataaccctgtatctatttctttacatttttctttcattaatgtatttatcactattttttttttgtttttctttgcaggcctcagctgttgaagaacgctctgcagagagcagtagagaggggccagttagaacagataactggcaaaggtgcttcggggacattccaggttagagatcagaggcctggttgtggagaagtgcttcttaaagtttttggtttcaggacctccttatactgtaaaaatttattgaggacctcaaagaacttttgtttatgtgggttatatctgtcaacatttactatgttagaaattaacattgaggtctgggtgcggtggctcacacctgtaatcccagcactttgggaggctaaggcaggtggatcacctgcggttgggagttcgagaccagcctggtgaaaccctgtcgtctccactaaaaatacaaaaatgagctgggcgtgggggcacatgcctgtggtcccaactacttgggaggctgaggcaggagaatcacttgaacgcgggaggtggaggttgcattgagccaagattgcaccactgtgctctaggctaggtgacagagcgagatgccatctcaaacaaacaaaaaaacacaaagaaattaacactgaggaaaaatttaaatatttattgatttactttaaaatactagtagaaaacccattacatattaacataaatgacatattttttagtgaaaaatagctgtcctccccctgccacctcccggccttttttttgagacagtgtttctctctgtttcccaggctggagtgcagtggcacaatcacagctcactgtagcctctatctcccaggttcaaggggtcctccagcgtcagcctcccaaagtgctgggattgtaggtgtgagcctataatccgtcttccccaattttttttttttaatgagaagtcgtcaggcactgtttacatttttgcaaacatctttaacatctagcataacagaagacagctagtatctgttccagtttattttgggttacttatttgaagaaaatctaaccttacacagaaatacaattagaaaaggatggaatattttaagataactttgagatagttgtagaaattattctttgatactacaccaaaactcaacaaatcgttatttttttaacagctttattgaggttgatttgcataccttatacaatttaatttatataattacagtttataactcagtgattttcagtaactttatagaattgtacaactatcacagtccaattttcggacatttctgtcacccaaaaaagatcccttgtagccatttgcagtcactccctattccaccagcagcctcaggcaacctctagtctgttctgtctctctgcagatttgcattttgttcacatttcatatggatagaatctagaatcatgtactatatgatcttttgtgtctggcttcttttggcatgatgtttttgaattttatccacgttgcagcatgtaccagtgctttcattcttttttattgtccaatagtatttcattctatggatgtcacattttgtttatccattcatgagatgatgatggacatttggattatttctacttttcagctaattatgaataatactgcctatgaacatttatgttcaagtctgcgtggatatgtttttaggacttgctgggccatatggtaaatttatgttctaagaaactggcagtgtttataagggctcaagtcgttttgttttgttttgagatagggtctcactctgtcacccaggctagagtgcagtggtgtgatcttggctcactgcaacctccacctccctggctcaagcaatcctcccatcttagcctccctaatagctgggattataggcgtgcaccaccaccatgcctgattaatttttgtattttttgtagaaatggggtttcgccgtgttgcccaggctactcttgaactcctgggttcagtgaagtagtctgcctgcctcagcttcccaaagtgttggaattacaggtgtgatccaccacacctgaccagggctcgagtttctccatatcctcctcaacgtttgttactcttttttattatagccatactagtggatatagggtatctcgttgtagttttgattggcatttccctaataattactgatgttgagcatctcttgtgcttaaggccatttgtttattgtctgtagtgaaatgtttattcaaatcttttgcccatttttaaaagggggttggttattcgttaacaagaattcattactctagacataaagtctcatcagattttttctcctattctgtgactttctcagtagtatcttttgaagcgtttactttttgatgaagtcctatttatcatttttaaaaattgcttttgcagttttatggttatctaagaaacattgcctaattaaaggtaatgaaaatttactcgtacgttttaagagttttataattttggctcctacatttaggtctgtgatctatattgttttgtttatagtgagaggtaagggtataatttatctttttgcatgtgggtgtgtgattattccagcaccttttattgaaaagactgtcccttccctattgaattgccgtagcatcttatgaaaatcaattgaccataaatataagggtttatttccggattctgagttctcttttgttctgtaggtgtatccttcatgctaatactgcactgtcttactgactgtagctttatagtgaattttgaaatttggaattataagccctctaactttttcaggaatgttttgactatgccgggtcctgtacagttccatacaaattgtccatttctgccaaaaaaaaaaaaccaaaaaaacagctggagttttggtaggaattgccttgaacctatagatcaatttggggagactcactgtcaacaacgttgagttttccaatccatgacacagaggtctctttatttaatttctctcagcagtgttttgtagttgttcggtgtacgagtcttgaattttttttgttaaatttattgccaagtattttattctttttccatgctgtcttgaatggtggaagtgttttctaattttcgttttcaggttgttaacgctaacctgtagaaatacaatcgatttgtccattgctcttgtatccttcgcccttgctgaactcaccagttgtagtagtttctttgtgaattccttacagttttctacatacaggatctgttatctgcaaataaagagcattttacttctttgtttctagtctggatgtcttttacttcttctgattgcctgattgctctagattaacctccattacagtgttgagtagaagtggtaacagcagacatcttcgccttgttccacatcctggagagaaagcattcagtccttcacaagttagctataggtttttcatagatgcctattgtcaggttgagcaagttcccttctatatatactactagtttcctgggagtttttatcatgaatggctattggatttgtcaagtggtttttcagtgtctgttgagatgattgtgtggtttgtgtcctttgttcgtgtggtctgttaacattatttgttttgtggtaaattctttaaagtttagttgccatgtgaaacctgaaaccctaatcagtgaatttcttggactgtgttaccttaaaattcattgaactttgaataggtattttaatccttcataattttgtagcacgatacattggtcatttgaaaaatagtggcacagagttacatagattttccaaatgttggcatttcattatatacgacaacaaaaattacaatcattggtgttggccactgatcttataagaacagtatttaagtattgggaagataacagactcacagtgatggacacaagtttttcaggatttaaattttctcttgaaaggttgaattttatcattggcaacaaatactattatttttttacatgacaggctcttttagttcatttgcaagatactgtctacctcataaccaagtctgaataatgataggttagctgtcagttatttctttaagtaaaaaagtattacaggtcaggcgcggtggctcatgcctgtaatcccagcactttggggaggccgaggtgggcgaatcacgaggtcaggagatccagaccatcctggctaacatggtgaaacccaatctctagtaaaaatacaagaaattagccgggcatggtggcacatgcctgcaatcccagctactcgggaggctgaggcaggagaatcccttgaacccaggaggcagaggttgcagtaagccaagatcacgccactgcactccagcctgggtgacagaatgagactccgtctcaaaaaaaaaaaacgtgttccaagaaaaatgcagctaattcagctcataactttaacaattacacaagtgcttttcctggataccatcatgtctacatatgtagcagatacggattatgtggttcttcctgtttcatcccataaaatattctaaagacattcaaaagttgagatttaataaaataatttttagtactttatcaagggcattctaagtgaattcgtgctcttttttttaaaccataagtacatagcagtaaagaagacaataaccacatttttgtgtctctgcctttatctgtggtaagctgacagcagttttacccaccattgcttctgcaccatcagtgcaaatgtcaaaatagtgaaaaggccaggtgcagtggctcacacctgtaatcctagcaatttgggatgctgaggcgggtggtttacctggtcaggagtttgaggccagcctggccaacatggtgaaaccccatctctactgaaaatacaaaaattagccaggtgtggtgggcgcctgtagtcccagctactcgggaggtagacgcaggagaatcgctggaatccgggaggcggaggttgcagtgagccgagaccgcgccattacactccagcctgggcaacacagcgaaactctgtctccaaaaaaaaaaagacagtgaaaaagcaaatcgcatcttaggtttttgtttgtttgttttttgagatggagtcttgttgcagtgagtacagtggcttgatctcggcttactgcaacctccacctcccgggttcaagcgattctcctgccccagccttgcccaagtagctgggattacaggcatgcaccaccatgcccggctaatttttgtatttttagtagagatggggtttcaccatgttggccaggctggtcttgagctcctgacctcagctgatccacccgcctcagcctcccaaagtgctgggattacaggcatgagccactgcgtctggcatatcttagttttattatgcaaatagttttgaccttgcagatcctctgaaagggtctcaggaacccagacaattgtaaccagaccattctttaagaaccactaaacagttttgtagagcatttctggttttctccttttccctttttgcatattatttgctaacctttgttaccacacctttcattttcaaagtatgctatgtaattttcttttgtatgatacttttttttttttttagtttattatttatttttagagacagagtcttggtctgtcactcaggctggagtatagtgatgtaatcatagctcactaatagcctcaacttcctgggcttaagccatcctcccccctcaccctttcatgtaggtaggctacaggcatgccgccattcatagctagtttttttatttttagtagagagagagtctcactatgttgccgaggttggtcttgaactcttggcctcaagcagtcctcccccattagcctcccaaagtactgggattacagatatgaactaccgtgctccctgataccctaaatatttatcaaaatttttcactgctattttcctcataggattaaaagggctatttattattttttataactacagctgacccttgaacaacataggggttaaaggtgcagatcccccgtgcagtaaaaaaaaaaaatcataaaaaactttagattcccagaaaacttgactattaatagcctactgttgaccggaagccttacaaacagttaatacacattttgtatgttgtatgtattatataatgtactcttataataaagcaagctagagaaaagaaaatgttattgagaaaatcttaagaaagaggaaataatggccggccacagtgggtcacacctataatcccagcacgtcaggaggccgaggcaggcagatctcctgaggtctggagttcgagactagcctggccaacatggtgaaaccgtgtctctactaaaaataaaaaattagcgagacctggtggtgggcgcctgtaatcccagctactcgggaagttgaggcaggagaattgcttaaacccaggagaccgaggttgcagtgagctgaaaccacgtcattgcaatccagcctgggcaacagagcgagactctgtctcaaaaaaaaaaaaaaaaaaagagagaaaatatatttattgttcattaagtggaagtggatgatcgtacatgtctttatccttgtcatctttgagttgagtaggctgaggaggacaaggaggtgttggtcttgctgtcttggggtggcgggcagaggcagaagaaaatccacatataagtggaccagcacagataaaattgtgttgtgttcaagggtcagctatacttcatttttcagattcagaaaagtgaagtattctcaaataaaataatctttttttttttaaatttattttatttatttatttttttagacagaatcttactctgtcgccgaggctggagttcagtggcatgatttcggcacactgcaaccccgcgtcttgggttcaagtgactctcctgcctcagcctcccaagtagctgagaccacaggcacctgccacacctggctattttgtgtgtgtgtgtgtgtgtgtgtgtgtgtgtgtgtgtgtgtgtgtgtgtgtgtgtgtttttagtagagacaggtttcgccatgttggccaggctggtctcgaactcctggccttaagtgatctgcctgcctctgcctcccaaagtgctggggctataggtgtgagcacccagccaaaagaatcttaatttttagggacataactggttaacctgcttattgggtacagttgtcagtatctttgggttaggttggctattattttagggtggatggagggtagatggaaggagaaaatatccataggagggttgggacttctcagttagattgaatacctgttgaatgggaagagaaagtccctaagctgacaatttattgtaaaacatatctgtgctaatgcaggaactccgacccacctggtgcagaggagtcttgtcttgacctgctttgggagagtgttgtcttgatgcttttctcttcctccttggaaaacagctgaagaaatcaggggagaaacccctgcttggtggaagcctgatggaatatgcaatcttgtctgccattgctgccatgaatgagccgaagacctgctctaccactgctctgaagaagtatgtcctagagaatcacccaggaaccaattctaactatcaaagtaagactcggttgtgtatatttaactgggattaggagaattttcttttgaaaaaaccgtggagggccaggcactgtggctcacgcctgtaatcccagcactttgggaggctgaggcgggtggatcacgaggtcgggagtttgagaccagtctggccaacatagtgaaaccccatctctactacaaatacaaaaaaattagcagggtgtagtggtgtgcatctgtagtcccagctactcgggaggctgaggcaggagaaacgcatgaacccaggaggtggaggttgcagtgagccgagattgcaccattgtactccaatccggacaatagttgcgagactatgtatcaaaaaaaaagaaaagaaaagaaaagaaaaaaaaatcatagagatcatgctattaatgtcaaagtattaactactgactgaaaaccaagagggaacagctttacaaatttcatatttacaaaaagaaaaacaaataatcaaaactgaattcttaatttaaagcatctgcttataagaagttgcttttactgtaaagatttttctgatatttattgtaatttagataaatctctaggttcaaagcaactctaaattatagtgtattttttcctacttttgaatgttcaccaaaaacatctaattttactttgaaacaaagccaggattttagagtacttactacttatattatttcttattaacctaagccccacaacagacaatactttatttcagtaaagtatatttactctaggaggtggtgatttgagatgagacaccctgccttatcagcattatcgtgtggattggtgagactgggtgacttctcaatgaactattagaagaggcacaatgttgtagggtgagggatatggaaattaagtaacagaagaagacaatccagaatatattattgtaattaaaaggtaattttgaagtctttttttttttttagacggagtctcgctgtgttgcccaggctggggggcgcagtggtgcgatcttggctcactgcaagctccgcctcccctgggttcacgccattctcctacctccaccccctgagtagctgggactacaggcacctgccaccacccctggctaatttttttgtttttgtattatttgtttttagtagagacagggtttcaccgtattagccaagatgatctcaatctccttacctcgtgatctgccggcctcggcctcccaaagtgctgggattacaggcgtgagccgccacgcccggcctatttctatatgccagatgttttaagagaagatgaatttggttaacaagcctttcagtttcactgatatttgcagctgttttttggatactgaatcaccataaaatatattttggatatgtctctgtaagaaagatgagaatgaaggacttcaggaaccatgatattgttttgttactgtttactgatttatgaataattagttctgttcatctttataagagattctcctagatgattatcaatacctataggtacacaatagatgtttaagtgaatggaaataattaaatacttagttttaggtctgctgtttatgtgctaccttagagcaagtcacttaactactttgagctcaagtcacttaaccactctgggctttttttttttccctgtgaaataaggtatttgactcaatggtctctaatgtgtcttttcattataactcttgccaggtatggtggctcatgcctggagtcccagcagtctgggaagccaaggtgggagtattgcttgagcccaggagtttgagaccagcctgggcaacatagtgagactttgtctctatattttgcaaaattttaaaatatagatatatgtatgtatgtatgtatataatttaactcttgccaaacttatgggcaataagtaaatgtttaattaaatacctttgaacacataggattcacttagtgtatgtcaattaccgtatgtgacaggatattaaattgatgggcatctgtttgtggttgagggaattatctaatctgaataactagataactttcatttctgaattttttttttcagtgcatttgctgaaaaaaaccctgcagaaatgcgaaaagaat

SEQ ID NO: 12388 - DNA, 759 bp, Homo sapiens
aaaaaggatgagaaagatcagtctaaagaaaaggagaagaaagtgaaaaaaacaattccttcctgggctaccctttctgccagccagctagccagggcccagaaacaaacaccgatggcttcttccccacgtcccaagatggatgcaatcttaactgaggccattaaggcatgcttccagaagagtggtgcatcagtggttgctattcgaaaatacatcatccataagtatccttctctggagctggagagaaggggttatctccttaaacaagcactgaaaagagaattaaatagaggagtcatcaaacagaataggagctctgcagtggatccagaaccacaagtaaaattggaggatgtcctcccactggcctttactcgcctttgtgaacctaaagaagcttcctacagtctcatcaggaaatatgtgtctcagtattatcctaagcttagagtggacatcaggcctcagctgttgaagaacgctctgcagagagcagtagagaggggccagttagaacagataactggcaaaggtgcttcggggacattccagctgaagaaatcaggggagaaacccctgcttggtggaagcctgatggaatatgcaatcttgtctgccattgctgccatgaatgagccgaagacctgctctaccactgctctgaagaagtatgtcctagagaatcacccaggaaccaattctaactatcaaatgcatttgctgaaaaaaaccctgcagaaatgcgaaaagaat

SEQ ID NO: 12389 - DNA, 970 bp, Homo sapiens
gcggcagagctcggcggctgggactggaggacagcggtggcggaggcgactagcggcggcgggagcggcgccgagaggccgtgcgggacgcgggcgccaggaccggccgaacgcagagaaggtagaagatagcaccatgccgattcgtcgaactgtgaattctacccgggaaactcctcccaaaagcaagcttgctgaaggggaggaagaaaagccagaaccagacataagttcagaggaatctgtctccactgtagaagaacaagagaatgaaactccacctgctacttcgagtgaggcagagcagccaaagggggaacctgagaatgaagagaaggaagaaaataagtcttctgaggaaaccaaaaaggatgagaaagatcagtctaaagaaaaggagaagaaagtgaaaaaaacaattccttcctgggctaccctttctgccagccagctagccagggcccagaaacaaacaccgatggcttcttccccacgtcccaagatggatgcaatcttaactgaggccattaaggcatgcttccagaagagtggtgcatcagtggttgctattcgaaaatacatcatccataagtatccttctctggagctggagagaaggggttatctccttaaacaagcactgaaaagagaattaaatagaggagtcatcaaacaggttaaaggaaaaggtgcttctggaagttttgttgtggttcagaaatcaagaaaaacacctcagaaatccagaaacagaaagaataggagctctgcagtggatccagaaccacaagtaaaattggaggatgtcctcccactggcctttactcgcctttgtgaacctaaagaagcttcctacagtctcatcaggaaatatgtgtctcagtattatcctaagcttagagtggacatcaggcctcagctgttgaagaacgctctgcagagagcagtagagaggggccagttagaacag

SEQ ID NO: 12390 - DNA, 10626 bp, Homo sapiens
aggggggcggggcggcagagctcggcggctgggactggaggacagcggtggcggaggcgactagcggcggcgggagcggcgccgagaggccgtgcgggacgcgggcgccaggaccggccgaacgcagaggtaacgcaggaccgaacaggcggccggggagtgggcgcgggctcgctgggccccgaaggcgagtggcggaggccgctcgcccggggcgccgacgccgctcccagagaggagggggcggggcgcccgggtccccggaggtggcgccttttgtctgccttacccggccgctccgccccgctcccttcctctctcctgcgacctagccccctgcccttttggtggactcctcctcaggggccctccggcgcgcgcgctcccgcccttgttttgtttggatttgggggaggagggggagctcttctctggccgtgcgaccctgcgtcccagcgcgcctgcgtcggcgtcctctgcccgccccgattggctgagggctgcgcatgctccgaggcccgccgcggtccggcgtccgcccgcgccctcccctcaccccactccctcagcggttttcggagccggttcgaaagatgccggcggcggtgactggctgcggcgggcccgccccccgggttctccgcccccgccgccgccattacggagctcccagtggtgagtgtgcggagcgccgaggctcgcgttccgccgctgcttccgtcgccggggcgggcgccgcggtgtccctgccgagcgtgagccccgaactgtcaccgcgccgagccccagcctcatccgtcggtgtccgcggtccgagctttccccgcctcgctggcggcccgcgctctcccccgccgtgcgcgttcgccgctgtggcctgtagctacctcgcctcgctgctttgtctccgctgctcttgccgtccttcccgcggccttctgcgggcggggctgtcggctgtcgctttgctgctccgcgacggcggccttgagtctcgctcccccggtgggaaacgtagaactggttactcgccaccttaggcggtggggtttgaatgagagcggtgcctcggtaggtcgtcagaaagttacagtcgcccatctgagcgtttgtaagagatggaggcaggagtggtgaggtgagagccccagatctgagggttggtactgcattaacagctgtgaccggggacagccacttaacctttttgagaaagagttgtctcccgtacggagaccggaccgggtgaactgtgctgccgcatccgcgtgcacgttctctctgttgtttattgtgcttcctgactttgcattgcattaaaaagtgagaatccaattcgaaataacgtctaaaaatcgcctggggctttttgagcacgctgtcttgtcttagagtgaaattagaggtgactagtgtcatttttgaaaggtgctctaattttgtttaacctgacataggcaaaaaacttgttagctttttgatttttcattgctcttctcaaaagtttagtgtaatttgtttcaaaatagaagtaacattttaaagtttgctgggttggttggttttggctttgtttttaagcttgcttggaagattgtagggctggaagttagtggagaacgtatactgaactcttcatttccggatgaaagttttaactccttacccagttagattgtgattttattgagatgagacactgtagtgtccttagtatctatgcccaaaacagacactgagtatatgtttgcttatataacttacatttgaaaatgaaaaacaagtggtgtcagcagtcaaattacaggcatgctttttgtgacatgactcgttaaatctgagtgtagtgaatgacttaagattgggaacaatgtgaggtgttcagcgcatcactaatgacatgtattacatatattttatggtaaaatgtgaaattatagtgctttccctaaaatgcatattatcaaggatatcagtaaactgaaatacgttgttaaactcctcacttttctacagccttctcttaatgtagaggaaataaattaaaactgaaatttggggctttttatttctacaatacttttttttattgcttgcattcaaataatttaaagccgtgcatggtggctcacacctgtaatcctaacactttgggaggccaaagaggaggatcgcttgaatccaggagttagagaccagcttgggcaaccctgtctctacagaaaatacaaaaactatccggctgtggtggcgcatacctgaagtcccagctactcaggtggctgaggtgggaggagatcgcttgagcccaggaggtcgaggctacagtgatccctggtcatgccactgtactccagactgagactctgtctcaaaataaacaaccgatttaatttaagcatttcccttgacaaaaagcaaatatttgttattgttgtaacattaagtttaagcaagctgatgttcataagaggaccatgtaaaccacaagtaaactcagactgtttatttttggcacatataaaaaccaagatgaaaaacatgaataggccgggcacggtggctcacgcctgtaatcccagccctttgggaggctgaggtgggcggatcacgaggtcaggagatcgagaccatcctggctaacacggtgaaaccccgtctctactgaaaatacaaaaaattagctgggtgtcgtggcggacgcctgtagtcccagctactcaggaggctgaggcaggagaatggcgtgaaccgggaggggaggttgcagtgagccgagatcgcgccaccgcactccagcctgggcgacagagcaagactcggtctcaaaaaaaaaaaaaaaaaaaagggaaaacacaaataagttttatttgttcatcctttagtttaacaaatattaattgagcatctattctgtgcctggtatgttcttaggcatcaggtatgcagcaaatgaaccaggtagataagatccctgccaggaacaagtgtggcagcctcaaaatttgatcattcagagtgcaatagtaaaaagtttagttaataggtacactgggtcagatgcagtggcttacacctgtaatcccaacacgttgagaggccgaggcagatggatcgcttgagcccaggagtttgtgaccagcctgggcaacatggcaaaaccctgttgatacaaaaaagagaaaaattagccgggcatggcggtgcgtgcctgtagtcccagctactagggagactaaggtgggagagtcgcttgagcctgggaggttgaggctgcagtgagctgtgatactacaacctgagcatcagagtgagaccgtgtcttaaaacaaacaaacaaaaaacataggtacagtgatgttaaggcagtgtgaattaacgttgcatatacttagctctgtaatgaacagtgagtttattaaatagccaattaacccaactattctaaagcaggtactacagattgaagctttgaagttctatgactttgacttttattaaggaaatgcagagctgaggctaacatctctttttttttttttttttttttttttgagacagagtctcacactgttacccaggctggagtgcagtggcatgatctcggctcactgcaacttcggattcccgggttcaagtgattctcctgcctgagcctcccgagtagctgggactaacccaactattctaaagaaagtactacagattgaacctttgaagttctacagcttttactaaggaaatgcagagctctaacatctctattttttttgttttttttttaaattgttgttgtttgttttttgagatggagtctcactcttcacccaggcttggagtgcagtggcatgatctcaggtcactgcaacctccgcctcccaggttcaagtgattcttctccctcagcctcctgagtagctgagactacaggtgtacaccacagcgcctggctaacttttgtgtttttagtagagatggggtttcaccatgttggccaggctggtctcggactcctgacctcaggtgatccctgcctcagcctaccaaagtgctgggattacaggcatgagccactgtacccagccctaacgtctcttaatatttatcccaaataactgggttttaagtgttcttcacacataatgaatgtagtcataagtactaccagatgtctttgttcattcaacttttattattattattattattattgagccaaggtcttactctgtcacccagactggagtgccgtggtgcaattctagctcactgtagcctggaactcctggacactggcagtcctcccatctcagtcttccaagtagctgggactacgggcatgtgccacagtgaccagctaattttttatcttttgtgtgtgtgggttttttctttctttttttttttttttttttcttttttttgagaaggagtcttgctctgtcgcccaggctggagtgcagtggcacaatctcggctcactgcaatctccgcctcccaggttcaagtgattcttctgcctcagcctcccaagtatctgggattacaggcgcgcaccaccacacccggctaatttttgtatttttagtagagacggggtttcaccatactggccaggctggtctcgaactcctgaccttgtgatctatccgcctcggcctcccaaagtgctgagatacaggcgtgagccaccatgcctggcccttttgtgtttttttttaaattattatttttttttcttgaggcaggctctgctctgtcacctaggctggaatgcagtggctcgatttcaggttactgcatccaaaaccttctgggctcaagcagtcctcccagtctcagcttcccaagtagctgggactacaggcgcatgccaccattcccagctgatttttaattttttttttttagagacaacgtctgtattgcccaggctggtcttgaactcctgggctcgagtgaacctcctaccttagcctcccaaagtgctgggattacaggtgtgagccaccacacctggcctgtttttaaattttaatttatttacttttggtaaagaccaagtctaatgttgactaggctagttttgaatttctagcttcaagggatcctcccacctctgcctcccaaagtgctggggttgcaggcatgagctactacaccaaatgggaaagtatttttttaaagatgcctatgaacggagactcctgaaggttgttgacttcacggtagcattttcagcctagctagtgttatcgtgggttaagaaagataaattcattagcaatataactttactaaggataacctgattgtgatattgttttatttccatatcatatttgcatgtaaaaataccagcagatttgcataaggctttttatcattaagaaaaatgggccgggtgcggtgggtcacgcctgccatcccagcactttgggaggctgaggcgggcagatcatctgagatcaggagctcgagaccagcctgaccaacatggtgaaaccccatctctactaaaaatacaaaattagctgggcatggtggcgcatgcctgtaatcccagctactcaggaaggtgaggcaggagaatcgcttgaaccaaggaggcggaggttgcagcgagctgagatcgtgccaccgcactccagcctgggcaacagagcaagactccgtctcaaaaaaagaaaaaaaaaatttaatattaatggatattctggttccctaagtatgagtgtgttacactgcactgaattctttcagctgactgaaagatttccttgcagctgactgacaattgacaagtctggtattgttcttggtgttcccataaaaatattttcccgataagtgtgaatgcatcctctttgtttcaatcttccggatttatcctagttgttgtaggttgggactgttacttgccaagttgaaagctcttcaattcttagacaaggttagaccttaatgtagaagttgcatgactgtcattccctactcattgttaatagttcattagcacagagatctagatacttaagtggtcttttttttttatattgaggaatttttgtataaaatgtcattgagtctcagatgagatttttggggaagagggggtgttagtgatcaggtaaacttgggtgactgcatgggtttttatctttgaatatttaattatattcttctgtactagttttccttacattaaaaatatgacagtcttagaagcatacttttattctcctaggtgatggtctaaatttgcttctgtgggtctggaagctattagaatgtcatgttattcagcagtatttttccccttgtgttttcccttaatagaaggaaaaaaaaagtactttaatagagatagagtttaagattacagttaattttcctgactctttcgagaacagtaacaacaaaagccttctcttggtaaactgatctttgactaactgttccttagtctctttattctatccttctaagttcctgatggtggcaggaggggatggggttaggttccttaggagcttccttgcccttgttgtctttgttcatgtggaaggtgcaacagctgccgtggcttatgcattcgtcttagttgctgctttatgtagtctatattttggtagttttatctttctgagtaaccaaatcatctgtcacttacctataaattttatagttatattttttccctttggatgtgtattaaatttagacgttttagtttagttttgtttctgttaatcttcacaccaggtcttttctgtgctttaggttgattcttcaccacactgaaaccattaggaaaaatccttgtggttaacagcagaggcttcagagtgtaacctgtactcgggcctagaaattatttaaaatggcgactgatacgtctcaaggtgaactcgtccatcctaaggcactcccacttatagtaggagctcagctgatccacgcggacaagttaggtgaggtaggggctgacacattcttgaagctcactcttggatcaatccctgacttcaggccctgctgggtccttcttggtacatgttccttcccttactttggggagtctaggttgtgaatttgaaacaaaatcagattcttttcatcttccctttcccctcaaattcctgagaaaacctccaaccttctaaatttatagcaaatcaactataattatgtgtttccatttgaaattcaagctaaaataacatactttaaaaagtgtatcttaaaaatcatatttcacttcaaaaaaaacttgttaaaagtaatttgcatcagatcctggagtcgacttgaagaattctcctacatctgacacccagttaggccctttgagaaagagagaaaagagaattttttaatgcatgtttgattatggccatctcttttcttagaaggtagaagatagcaccatgccgattcgtcgaactgtgaattctacccgggaaactcctcccaaaagcaagcttgctgaaggggaggaagaaaagccaggtaaagtaaaatggtgacacagcttaaaacatcaaaagttatactgcaatttggagtgtcccataaattcctttgaacttaattgtttttttttttttttcatggctaagtgttttggggaaacatttagagagaatcagtagctattggtatgtcattgccagaccatgagggcaaagtaaggtttcatcttctctataaaggtttttggaaggtgaaaatgttatgttggaattaaaaacaaaaatgtttggggatgacaggaatggccagagagtagcattctggacataaagtgtcatggggatcagtgcagtgtgggagaatggaaaacgtgggcctttagaatagacagtggaaggttcatccagaaatcatctggaggccttcagagaagcaaatggtgatctgttgatctataacaggtattggtagagagaagattggccagtcagtggtgggagcataacaaatggaaagaaacatagacccatcaacatggagtactaatgctcctttatggcatgtataaccacctcttctccttttcccgtctttatttttcttctcatgatctttttggtttttttccttatcttttcccttttttcctttctctcttgccttttatctcaggtttttcagggataagcacactgtgctgcctctgttgtggctgttagaatcaattatttgctgaccagcatgtattaggaatagagggccgggcacagtggctcacacctgtaatcccagcactttgggaggccaaggagggcagatcacctgaggtcaggagttcgagaccagcctggccatcatggtgaaaccccatctctactaaaattataaacattatctgggcatggtggtgcatgcctgtaatccctgctactcaggaggctgaggcacaagaattgcttgagcccaggaggcagaggttgcagtgagctgagatcacgccattgtattccagcctgggcaacagagggaaactgtctccaaaaaaaagaaaaaaaaaaaaaagaggagtagaaaatacatgcatccttggtgcatcagggcagacatcaataaccagtcaatatactcttttctggctgagcctggattttttctctaaatccttagatgaatgctataagcaatttgggcaccctggcctaaggcagttaagaaacacgggaatccaaatatttaaaaaagtaaacgggtgctggtaagttgaagataggttatcttgtccagcactgggataagccacttggtggtccatcttaatccatgtttaacagccagctgaagccactaaatcactaataacatcagttttcagaatatatgccagagggttcagatgtaaagtattagaaaactcaaccagaagtttatgaagaaacagtgtcacttcacaagttgtatgtttgtttaatcttctctctatcccattttgtacacagtattttgtacatagaaattagacttcacttattttaaattttgtaaactctatgttttacacagaaacacagtagtttaatgagttggaaacagtcttatacataatacatattcaatatctgttgagtgactgaactttattaagccataactcttgagcagttattcttgagaagagaaaataatgtaaatttataagtcttactaccgtaaaacccctgaatgattcttagcttttcatcttttttagaataagacaaagtgtaaataaacatgactaactaatagtaaattcttgcccatgcagccatttaggtcaaattgttgggttgaggggcagtaaaagatatatcatgatgaaaaatacattttattgtggaaaacctaaatgtagttattatctttatccccagataccattgttatagtgaagttctatccataatactttgtcatcctaagcatatgggaaacaattctagaagcagagaattccaaaggaggatggaaatcactcgcttagtataagtgttagaattgtacttatgtgatttggttttaagaaagaagtggcattttaaaattctctttatagctgggcgcggtggctcacgcctgtaatcccagaattttgggaggctgaggcgggtggatcacgaggtcaggagatcgagaccatcctggctaacacaatgaaaccctgtcactactaaaaatacaaaaaatcagctgggcatggcggcacgcacctgtagtcccagctactagggaggctgaggcaggagaatcgcttgaacctggggaggtggaagttgcagtgagccaagattgcgccacagcactctagcctgggagacagagcgagactccgtctcaaaaaaaaaataaataaataaataaaattctctttatgggaaggccacaaagaagtcctcgtcattattgcaataattagttcacataatttaaatgatcaaattcttcaagcatatactttggcttgaagtatatgcttgccactggagtcctttttctttcatgttttttttattttttttatttttatttttttttggagttctctgaagtccctgcataaccagtgcctggggttctgtgttttatagtagctactcagagacatgctgtgaaggaaaggcacaaatagcagcagacctccatgttcccctcatatttctactcttgcttcagtcattcctcttggagaatacatgagtttttaaattacttattctctgagatttgcctgttgaattataaaatggctagtttcttaattatgagtctcatgaatattgcaaagtagaataattaaacaattggggatgaaatgagttttcctttctatgtaatttcctggtctatttttctaataatagataaataaccacctgaccaggaaacttgagtgacataaagaatgtaagaaaactgcattagtggtcattcattttcattttagaattcatttgttaattggagactttggctggtccgtttaataagataagcttttaccttttattgactcagattggaatacatctgcttatgcaattctgctcacctgattttttagaaccagacataagttcagaggaatctgtctccactgtagaagaacaagagaat

SEQ ID NO: 12391 - DNA, 473 bp, Homo sapiens
aggggggcggggcggcagagctcggcggctgggactggaggacagcggtggcggaggcgactagcggcggcgggagcggcgccgagaggccgtgcgggacgcgggcgccaggaccggccgaacgcagaggttgattcttcaccacactgaaaccattaggaaaaatccttgtggttaacagcagaggcttcagagtgtaacctgtactcgggcctagaaattatttaaaatggcgactgatacgtctcaaggtgaactcgtccatcctaaggcactcccacttatagtaggagctcagctgatccacgcggacaagttagaaggtagaagatagcaccatgccgattcgtcgaactgtgaattctacccgggaaactcctcccaaaagcaagcttgctgaaggggaggaagaaaagccagaaccagacataagttcagaggaatctgtctccactgtagaagaacaagagaat

SEQ ID NO: 12392 - DNA, 6406 bp, Homo sapiens
agagctcggcggctgggactggaggacagcggtggcggaggcgactagcggcggcgggagcggcgccgagaggccgtgcgggacgcgggcgccaggaccggccgaacgcagaggttgattcttcaccacactgaaaccattaggaaaaatccttgtggttaacagcagaggcttcagagtgtaacctgtactcgggcctagaaattatttaaaatggcgactgatacgtctcaaggtgaactcgtccatcctaaggcactcccacttatagtaggagctcagctgatccacgcggacaagttaggtgagaaggtagaagatagcaccatgccgattcgtcgaactgtgaattctacccgggaaactcctcccaaaagcaagcttgctgaaggggaggaagaaaagccagaaccagacataagttcagaggaatctgtctccactgtagaagaacaagagaatgaaactccacctgctacttcgagtgaggcagagcagccaaagggggaacctgagaatgaagagaaggaagaaaataagtcttctgaggaaaccaaaaaggatgagaaagatcagtctaaagaaaaggagaagaaagtgaaaaaaacaattccttcctgggctaccctttctgccagccagctagccagggcccagaaacaaacaccgatggcttcttccccacgtcccaagatggatgcaatcttaactgaggccattaaggcatgcttccagaagagtggtgcatcagtggttgctattcgaaaatacatcatccataagtatccttctctggagctggagagaaggggttatctccttaaacaagcactgaaaagagaattaaatagaggagtcatcaaacaggttaaaggaaaaggtgcttctggaagttttgttgtggttcagaaatcaagaaaaacacctcagaaatccagaaacagaaagaataggagctctgcagtggatccagaaccacaagtaaaattggaggatgtcctcccactggcctttactcgcctttgtgaacctaaagaagcttcctacagtctcatcaggaaatatgtgtctcagtattatcctaagcttagagtggacatcaggcctcagctgttgaagaacgctctgcagagagcagtagagaggggccagttagaacagataactggcaaaggtgcttcggggacattccagctgaagaaatcaggggagaaacccctgcttggtggaagcctgatggaatatgcaatcttgtctgccattgctgccatgaatgagccgaagacctgctctaccactgctctgaagaagtatgtcctagagaatcacccaggaaccaattctaactatcaaatgcatttgctgaaaaaaaccctgcagaaatgcgaaaagaatgggtggatggaacagatctctgggaaagggttcagtggcaccttccagctctgttttccctattatcccagcccaggagttctgtttccgaagaaagagccagatgattctagagatgaggatgaagatgaagatgagtcatcagaagaagactctgaggatgaagagccgccacctaagagaaggttgcagaagaaaaccccagccaagtccccagggaaggccgcatctgtgaagcagagagggtccaaacctgcacctaaagtctcagctgcccagcgggggaaagctaggcccttgcctaagaaagcacctcctaaggccaaaacgcctgccaagaagaccagaccctcatccacagtcatcaagaaacctagtggtggctcctcaaagaagcctgcaaccagtgcaagaaaggaagtaaaattgccgggcaagggcaaatccaccatgaagaagtctttcagagtgaaaaagtaaattttataggaaaaaagggtatcatgatgaaattcaaaatcttattttctaaggtcagtgtgcatttgtttagttttgatgcttttcaaattacattattttcctcccctatgaacattgtggggagggactctaaataaaccagtttaggcatttgctagctttaggtgcttttattggtgcctgcccttttccttgttcattttaatttctgcaataatcctggactttcctaaactatgtaatgtatacttgtcctttttctctgcctcccccaaccccctgttgtttttatggtcagctttgccttttttttttcttccaattttatctaaacagttgcagagatttttatatttgtagaaagcatcaagaacggtatgccagtcaggtcctggaagtaaaatggaggcacaatatagcactgactgagttgtaaagcctcctgcctggagacttcagttatagctgtaataattaatcttatttataaaagccactccactaaccttttctctccaactgtaaacacagagacagctttgggaataagccaaaaacagggtgatctcattagattttgaagatatatgactcctttgggctacatttcatattgatcaatttctaggtatttttcactggcccaaagtattgcattcccttaacagcaagcacaagttctctatatcacttgttttttgttgttgttgttgttgtcgtcgttgttttgagacggagtcttgctcaggtgccccggagtgcagtggtgcaatctcagctcactgcaacctccacctcctgggttcaagcaattctcctgcttcagcctcccgagtagctgggattacaggtgtgtaccaccacgcctggcaatttttttgtatttttagtagagatggggtttcgccgtgttggtcaggctggtctcgaactcctgacctcaggtgatccgcctgcctcggcctcccaaagtgctgggattacaggagtgagccactgtgcctggcctatcccacttggtttttgactgaaggggaagtgtagaaatatattgatttgtgatttctggtgtcacctgtgttaccaaaaatcaaaacaaatcttttttattttttattattattattatttttgagacagagtctcgctctgtcgcccagtgtggagtgcagtggtgtgatcttggctcactgcaaactccgcctcccaggttcaagcgattctcccacctcagcctcctgagttgggtcctacaggcgcacacgaccacgcccagctaattttttgtatttttagtagagttggggtttcaccatgttagccaggatggtctcgatctcctgacctcgtgatccactcacctcagcctcccaaaatcctggggttacagatgtgagctaccactcacggcccaaatcttcttgatcatatgtttaaatatattttttaatatttggagcatgagttgtcacttcttgtttgccttttttataaggaaatgttggagagttacatcattgctaatgtagaaatgttaagtggaaaaatatacagtttggtaaaataaactagattctacatttatttgtgggtttttttcccctcctttctttccacagcacttttgatatcaagcaagtggcttcctttttgagatattaaaaaaaaaaagaaaaggaaaaaagtaaatgaagcccaactacctaaccctttcttatttgtatttgttttagtattgtgaagttgtgttaaatagtactagctagaaatacaaatttctggttatcatttctcttccctgtggcacttgacattttaattgtcttaaagtttttgaagtacatcttctggccccttgagtactgccagaggcaaaagatgtttgtttcttattcattccacttttgtctcctgggatcccttctgtagcctaaagtatggctgggaaatggacttgagaagattggcttgaattagatcataatcatgtgtgatcccatcatgaattcattggaatttgtgttgcatgtaaggcaatctttcctgttgtaaatcttccttttttaatgtacatatattttgaaaaatatgaataaacatgaaattttaaaagctgctgaaccgtagcttatatttaaaggttttgagtatagtatatcctcagaagtagctaagtgtcgccctcactttaagtcttttctactccttgaaatgaacaccatcattttcctttttaaatacaagctccagttcatgtgttttggaattcttatagagggtaaacgatgtttccagatacattgaatgctaattacttaatgaatcaaaggtttaaaaaatcattttgtattttattaaagactgcttccaagatcatagagtacaatcatgttcaataaatgttcaatattcagataagtccttggactagaaaaaattacagtactgcaaaagataacagataaatcctagacatcaaattctagaagtaattgtagtaattactcctgtgctctctagcaagtaatgattcttaatagtatggatgttaggtacctgtgctcagaattctgtactcttctggaatcaaaagttgggagattttggttggtttctttgctttatgatactgcttttaaagagacttactgaataatcacctggtggctgtattgcacaccaggcacttaagcacaggctgagaagtttagatcatttaaagtttcttccaactctaacgttctgttaactataaggacagtttgtttcagtgtgatgtaaagggaaaagacaggaaggtcatcgcactcttccacgaacatccacaactgtcaaagacatacgccttacttacattgagataaaagaatgtttgatttttcccttccaggcattccaaaggagcagaacacatttataatttttacttccatgttcagaaaggggaacaacaaaccccagaggtaatcccagaaatctctagcatggatcaatagcttcagtactctgttggtggcttagtgacctcatttacagtgtttcatacactctgaaactacctacaagctacctttgataaatgagtctcagaaagtgctgggagagagattgttggcttcttaacctacaaaatgaggaaggaaagatactattgttgagaaatgtggagacctttccttagcactatgacagaagcattcattgcacatggattctgactatgcatccacatggacttaattaaaggaaacctggtcctgtataaatcttaggaaacaggtgtatgttttaatcatgtcttttgggtataattaacaggaaaatgacatgaaaacaaaactaaacaatctgctaacaccttttgacatttgttttttcatcattgctgtttttccaaattttgttagcccttgtcaaggtttgctaaccaattcttaattaatacttactttaaagagcctgtgaaattattctctctcaggctgtgaccctcttgccatcttgatacgtcatgagaacgaaactcaccagccatgttcattaaatactgcatttaactaagagaaactttaaaaatttgggattatagttaaggtctcctatctttggaacctgattaatttatctttctttggattaagcaaaaattctaattttagctatgaaagaaaagaaattctattcttaattggaaaagaccattaaactgtttccccagaggttctggttgacattactttctagcatgtagattttgcttttgcattttcatggtggaacagatggtcactcacttctgcagagccaaagccaaggaagcagaactgttgaagttttggcttaggaaccacttgacaaagatttgtttagaagccattacagatggttaaacagtacccctaatcagctgcattattttcttaagaaattaatctctaccgtctttataactatattcttttacttattatttttttgagatggagtttgctgtgtcactaaggctgcagcgcagtggtgtgatcttggctcactgcagctttgaactcgtgtgctcaagcagttctccccacctcagcctcccaagtagccaggactacaggcaagctaataaatgcctggctaatttatcttttctagagatggggcctcactgtgttgcccaggctggtcttgaactcgtggcctcacgtgatcttcccacctgggctttccaaagtgccaggattacaggcgtgagtcgccatacctggccctattctttcttctgttcttttccacaagactgttaacttcagtggcttttttcctgttggaaaactttctacctttgatgatttaattttatcagctttttaactgttttaactgttcttaattctgtcttgtcaaccactggtatgtcaaaggaggcctcaaaaggctgaagcgattttcctcaaaaattacaactcttttttttcctgatattgtatataatgtataattaacactgttcactattaaatctttgcttagcaaaagagaa

SEQ ID NO: 12393 - DNA, 6831 bp, Homo sapiens
attacggagctcccagtggtgagtgtgcggagcgccgaggctcgcgttccgccgctgcttccgtcgccggggcgggcgccgcggtgtccctgccgagcgtgagccccgaactgtcaccgcgccgagccccagcctcatccgtcggtgtccgcggtccgagctttccccgcctcgctggcggcccgcgctctcccccgccgtgcgcgttcgccgctgtggcctgtagctacctcgcctcgctgctttgtctccgctgctcttgccgtccttcccgcggccttctgcgggcggggctgtcggctgtcgctttgctgctccgcgacggcggccttgagtctcgctcccccggtgggaaacgtagaactggttactcgccaccttaggcggtggggtttgaatgagagcggtgcctcggtaggtcgtcagaaagttacagtcgcccatctgagcgtttgtaagagatggaggcaggagtggtgaggtgagagccccagatctgagggttggtactgcattaacagctgtgaccggggacagccacttaacctttttgagaaagagttgtctcccgtacggagaccggaccgggtgaactgtgctgccgcatccgcgtgcacgttctctctgttgtttattgtgcttcctgactttgcattgcattaaaaagtgagaatccaattcgaaataacgtctaaaaatcgcctggggctttttgagcacgctgtcttgtcttagagtgaaattagaggtgactagtgtcatttttgaaaggtgctctaattttgtttaacctgacataggcaaaaaacttgttagctttttgatttttcattgctcttctcaaaagtttagtgtaatttgtttcaaaatagaagtaacattttaaagtttgctgggttggttggttttggctttgtttttaagcttgcttggaagattgtagggctggaagttagtggagaacgtatactgaactcttcatttccggatgaaagttttaactccttacccagttagattgtgattttattgagatgagacactgtagtgtccttagtatctatgcccaaaacagacactgagtatatgtttgcttatataacttacatttgaaaatgaaaaacaagtggtgtcagcagtcaaattacaggcatgctttttgtgacatgactcgttaaatctgagtgtagtgaatgacttaagattgggaacaatgtgaggtgttcagcgcatcactaatgacatgtattacatatattttatggtaaaatgtgaaattatagtgctttccctaaaatgcatattatcaaggatatcagtaaactgaaatacgttgttaaactcctcacttttctacagccttctcttaatgtagaggaaataaattaaaactgaaatttggggctttttatttctacaatacttttttttattgcttgcattcaaataatttaaagccgtgcatggtggctcacacctgtaatcctaacactttgggaggccaaagaggaggatcgcttgaatccaggagttagagaccagcttgggcaaccctgtctctacagaaaatacaaaaactatccggctgtggtggcgcatacctgaagtcccagctactcaggtggctgaggtgggaggagatcgcttgagcccaggaggtcgaggctacagtgatccctggtcatgccactgtactccagactgagactctgtctcaaaataaacaaccgatttaatttaagcatttcccttgacaaaaagcaaatatttgttattgttgtaacattaagtttaagcaagctgatgttcataagaggaccatgtaaaccacaagtaaactcagactgtttatttttggcacatataaaaaccaagatgaaaaacatgaataggccgggcacggtggctcacgcctgtaatcccagccctttgggaggctgaggtgggcggatcacgaggtcaggagatcgagaccatcctggctaacacggtgaaaccccgtctctactgaaaatacaaaaaattagctgggtgtcgtggcggacgcctgtagtcccagctactcaggaggctgaggcaggagaatggcgtgaaccgggaggggaggttgcagtgagccgagatcgcgccaccgcactccagcctgggcgacagagcaagactcggtctcaaaaaaaaaaaaaaaaaaaagggaaaacacaaataagttttatttgttcatcctttagtttaacaaatattaattgagcatctattctgtgcctggtatgttcttaggcatcaggtatgcagcaaatgaaccaggtagataagatccctgccaggaacaagtgtggcagcctcaaaatttgatcattcagagtgcaatagtaaaaagtttagttaataggtacactgggtcagatgcagtggcttacacctgtaatcccaacacgttgagaggccgaggcagatggatcgcttgagcccaggagtttgtgaccagcctgggcaacatggcaaaaccctgttgatacaaaaaagagaaaaattagccgggcatggcggtgcgtgcctgtagtcccagctactagggagactaaggtgggagagtcgcttgagcctgggaggttgaggctgcagtgagctgtgatactacaacctgagcatcagagtgagaccgtgtcttaaaacaaacaaacaaaaaacataggtacagtgatgttaaggcagtgtgaattaacgttgcatatacttagctctgtaatgaacagtgagtttattaaatagccaattaacccaactattctaaagcaggtactacagattgaagctttgaagttctatgactttgacttttattaaggaaatgcagagctgaggctaacatctctttttttttttttttttttttttttgagacagagtctcacactgttacccaggctggagtgcagtggcatgatctcggctcactgcaacttcggattcccgggttcaagtgattctcctgcctgagcctcccgagtagctgggactaacccaactattctaaagaaagtactacagattgaacctttgaagttctacagcttttactaaggaaatgcagagctctaacatctctattttttttgttttttttttaaattgttgttgtttgttttttgagatggagtctcactcttcacccaggcttggagtgcagtggcatgatctcaggtcactgcaacctccgcctcccaggttcaagtgattcttctccctcagcctcctgagtagctgagactacaggtgtacaccacagcgcctggctaacttttgtgtttttagtagagatggggtttcaccatgttggccaggctggtctcggactcctgacctcaggtgatccctgcctcagcctaccaaagtgctgggattacaggcatgagccactgtacccagccctaacgtctcttaatatttatcccaaataactgggttttaagtgttcttcacacataatgaatgtagtcataagtactaccagatgtctttgttcattcaacttttattattattattattattattgagccaaggtcttactctgtcacccagactggagtgccgtggtgcaattctagctcactgtagcctggaactcctggacactggcagtcctcccatctcagtcttccaagtagctgggactacgggcatgtgccacagtgaccagctaattttttatcttttgtgtgtgtgggttttttctttctttttttttttttttttttcttttttttgagaaggagtcttgctctgtcgcccaggctggagtgcagtggcacaatctcggctcactgcaatctccgcctcccaggttcaagtgattcttctgcctcagcctcccaagtatctgggattacaggcgcgcaccaccacacccggctaatttttgtatttttagtagagacggggtttcaccatactggccaggctggtctcgaactcctgaccttgtgatctatccgcctcggcctcccaaagtgctgagatacaggcgtgagccaccatgcctggcccttttgtgtttttttttaaattattatttttttttcttgaggcaggctctgctctgtcacctaggctggaatgcagtggctcgatttcaggttactgcatccaaaaccttctgggctcaagcagtcctcccagtctcagcttcccaagtagctgggactacaggcgcatgccaccattcccagctgatttttaattttttttttttagagacaacgtctgtattgcccaggctggtcttgaactcctgggctcgagtgaacctcctaccttagcctcccaaagtgctgggattacaggtgtgagccaccacacctggcctgtttttaaattttaatttatttacttttggtaaagaccaagtctaatgttgactaggctagttttgaatttctagcttcaagggatcctcccacctctgcctcccaaagtgctggggttgcaggcatgagctactacaccaaatgggaaagtatttttttaaagatgcctatgaacggagactcctgaaggttgttgacttcacggtagcattttcagcctagctagtgttatcgtgggttaagaaagataaattcattagcaatataactttactaaggataacctgattgtgatattgttttatttccatatcatatttgcatgtaaaaataccagcagatttgcataaggctttttatcattaagaaaaatgggccgggtgcggtgggtcacgcctgccatcccagcactttgggaggctgaggcgggcagatcatctgagatcaggagctcgagaccagcctgaccaacatggtgaaaccccatctctactaaaaatacaaaattagctgggcatggtggcgcatgcctgtaatcccagctactcaggaaggtgaggcaggagaatcgcttgaaccaaggaggcggaggttgcagcgagctgagatcgtgccaccgcactccagcctgggcaacagagcaagactccgtctcaaaaaaagaaaaaaaaaatttaatattaatggatattctggttccctaagtatgagtgtgttacactgcactgaattctttcagctgactgaaagatttccttgcagctgactgacaattgacaagtctggtattgttcttggtgttcccataaaaatattttcccgataagtgtgaatgcatcctctttgtttcaatcttccggatttatcctagttgttgtaggttgggactgttacttgccaagttgaaagctcttcaattcttagacaaggttagaccttaatgtagaagttgcatgactgtcattccctactcattgttaatagttcattagcacagagatctagatacttaagtggtcttttttttttatattgaggaatttttgtataaaatgtcattgagtctcagatgagatttttggggaagagggggtgttagtgatcaggtaaacttgggtgactgcatgggtttttatctttgaatatttaattatattcttctgtactagttttccttacattaaaaatatgacagtcttagaagcatacttttattctcctaggtgatggtctaaatttgcttctgtgggtctggaagctattagaatgtcatgttattcagcagtatttttccccttgtgttttcccttaatagaaggaaaaaaaaagtactttaatagagatagagtttaagattacagttaattttcctgactctttcgagaacagtaacaacaaaagccttctcttggtaaactgatctttgactaactgttccttagtctctttattctatccttctaagttcctgatggtggcaggaggggatggggttaggttccttaggagcttccttgcccttgttgtctttgttcatgtggaaggtgcaacagctgccgtggcttatgcattcgtcttagttgctgctttatgtagtctatattttggtagttttatctttctgagtaaccaaatcatctgtcacttacctataaattttatagttatattttttccctttggatgtgtattaaatttagacgttttagtttagttttgtttctgttaatcttcacaccaggtcttttctgtgctttaggttgattcttcaccacactgaaaccattaggaaaaatccttgtggttaacagcagaggcttcagagtgtaacctgtactcgggcctagaaattatttaaaatggcgactgatacgtctcaaggtgaactcgtccatcctaaggcactcccacttatagtaggagctcagctgatccacgcggacaagttaggtgaggtaggggctgacacattcttgaagctcactcttggatcaatccctgacttcaggccctgctgggtccttcttggtacatgttccttcccttactttggggagtctaggttgtgaatttgaaacaaaatcagattcttttcatcttccctttcccctcaaattcctgagaaaacctccaaccttctaaatttatagcaaatcaactataattatgtgtttccatttgaaattcaagctaaaataacatactttaaaaagtgtatcttaaaaatcatatttcacttcaaaaaaaacttgttaaaagtaatttgcatcagatcctggagtcgacttgaagaattctcctacatctgacacccagttaggccctttgagaaagagagaaaagagaattttttaatgcatgtttgattatggccatctcttttcttagaaggtagaagatagcaccatgccgattcgtcgaactgtgaattctacccgggaaactcctcccaaaagcaagcttg

SEQ ID NO: 12394 - DNA, 557 bp, Homo sapiens
attacggagctcccagtggtgagtgtgcggagcgccgaggctcgcgttccgccgctgcttccgtcgccggggcgggcgccgcggtgtccctgccgagcgtgagccccgaactgtcaccgcgccgagccccagcctcatccgtcggtgtccgcggtccgagctttccccgcctcgctggcggcccgcgctctcccccgccgtgcgcgttcgccgctgtggcctgtagctacctcgcctcgctgctttgtctccgctgctcttgccgtccttcccgcggccttctgcgggcggggctgtcggctgtcgctttgctgctccgcgacggcggccttgagtctcgctcccccggtgggaaacgtagaactggttactcgccaccttaggcggtggggtttgaatgagagcggtgcctcggtaggtcgtcagaaagttacagtcgcccatctgagcgtttgtaagagatggaggcaggagtggtgagaaggtagaagatagcaccatgccgattcgtcgaactgtgaattctacccgggaaactcctcccaaaagcaagcttg

SEQ ID NO: 12395 - DNA, 5092 bp, Homo sapiens
ggttgattcttcaccacactgaaaccattaggaaaaatccttgtggttaacagcagaggcttcagagtgtaacctgtactcgggcctagaaattatttaaaatggcgactgatacgtctcaaggtgaactcgtccatcctaaggcactcccacttatagtaggagctcagctgatccacgcggacaagttaggtgaggtaggggctgacacattcttgaagctcactcttggatcaatccctgacttcaggccctgctgggtccttcttggtacatgttccttcccttactttggggagtctaggttgtgaatttgaaacaaaatcagattcttttcatcttccctttcccctcaaattcctgagaaaacctccaaccttctaaatttatagcaaatcaactataattatgtgtttccatttgaaattcaagctaaaataacatactttaaaaagtgtatcttaaaaatcatatttcacttcaaaaaaaacttgttaaaagtaatttgcatcagatcctggagtcgacttgaagaattctcctacatctgacacccagttaggccctttgagaaagagagaaaagagaattttttaatgcatgtttgattatggccatctcttttcttagaaggtagaagatagcaccatgccgattcgtcgaactgtgaattctacccgggaaactcctcccaaaagcaagcttgctgaaggggaggaagaaaagccaggtaaagtaaaatggtgacacagcttaaaacatcaaaagttatactgcaatttggagtgtcccataaattcctttgaacttaattgtttttttttttttttcatggctaagtgttttggggaaacatttagagagaatcagtagctattggtatgtcattgccagaccatgagggcaaagtaaggtttcatcttctctataaaggtttttggaaggtgaaaatgttatgttggaattaaaaacaaaaatgtttggggatgacaggaatggccagagagtagcattctggacataaagtgtcatggggatcagtgcagtgtgggagaatggaaaacgtgggcctttagaatagacagtggaaggttcatccagaaatcatctggaggccttcagagaagcaaatggtgatctgttgatctataacaggtattggtagagagaagattggccagtcagtggtgggagcataacaaatggaaagaaacatagacccatcaacatggagtactaatgctcctttatggcatgtataaccacctcttctccttttcccgtctttatttttcttctcatgatctttttggtttttttccttatcttttcccttttttcctttctctcttgccttttatctcaggtttttcagggataagcacactgtgctgcctctgttgtggctgttagaatcaattatttgctgaccagcatgtattaggaatagagggccgggcacagtggctcacacctgtaatcccagcactttgggaggccaaggagggcagatcacctgaggtcaggagttcgagaccagcctggccatcatggtgaaaccccatctctactaaaattataaacattatctgggcatggtggtgcatgcctgtaatccctgctactcaggaggctgaggcacaagaattgcttgagcccaggaggcagaggttgcagtgagctgagatcacgccattgtattccagcctgggcaacagagggaaactgtctccaaaaaaaagaaaaaaaaaaaaaagaggagtagaaaatacatgcatccttggtgcatcagggcagacatcaataaccagtcaatatactcttttctggctgagcctggattttttctctaaatccttagatgaatgctataagcaatttgggcaccctggcctaaggcagttaagaaacacgggaatccaaatatttaaaaaagtaaacgggtgctggtaagttgaagataggttatcttgtccagcactgggataagccacttggtggtccatcttaatccatgtttaacagccagctgaagccactaaatcactaataacatcagttttcagaatatatgccagagggttcagatgtaaagtattagaaaactcaaccagaagtttatgaagaaacagtgtcacttcacaagttgtatgtttgtttaatcttctctctatcccattttgtacacagtattttgtacatagaaattagacttcacttattttaaattttgtaaactctatgttttacacagaaacacagtagtttaatgagttggaaacagtcttatacataatacatattcaatatctgttgagtgactgaactttattaagccataactcttgagcagttattcttgagaagagaaaataatgtaaatttataagtcttactaccgtaaaacccctgaatgattcttagcttttcatcttttttagaataagacaaagtgtaaataaacatgactaactaatagtaaattcttgcccatgcagccatttaggtcaaattgttgggttgaggggcagtaaaagatatatcatgatgaaaaatacattttattgtggaaaacctaaatgtagttattatctttatccccagataccattgttatagtgaagttctatccataatactttgtcatcctaagcatatgggaaacaattctagaagcagagaattccaaaggaggatggaaatcactcgcttagtataagtgttagaattgtacttatgtgatttggttttaagaaagaagtggcattttaaaattctctttatagctgggcgcggtggctcacgcctgtaatcccagaattttgggaggctgaggcgggtggatcacgaggtcaggagatcgagaccatcctggctaacacaatgaaaccctgtcactactaaaaatacaaaaaatcagctgggcatggcggcacgcacctgtagtcccagctactagggaggctgaggcaggagaatcgcttgaacctggggaggtggaagttgcagtgagccaagattgcgccacagcactctagcctgggagacagagcgagactccgtctcaaaaaaaaaataaataaataaataaaattctctttatgggaaggccacaaagaagtcctcgtcattattgcaataattagttcacataatttaaatgatcaaattcttcaagcatatactttggcttgaagtatatgcttgccactggagtcctttttctttcatgttttttttattttttttatttttatttttttttggagttctctgaagtccctgcataaccagtgcctggggttctgtgttttatagtagctactcagagacatgctgtgaaggaaaggcacaaatagcagcagacctccatgttcccctcatatttctactcttgcttcagtcattcctcttggagaatacatgagtttttaaattacttattctctgagatttgcctgttgaattataaaatggctagtttcttaattatgagtctcatgaatattgcaaagtagaataattaaacaattggggatgaaatgagttttcctttctatgtaatttcctggtctatttttctaataatagataaataaccacctgaccaggaaacttgagtgacataaagaatgtaagaaaactgcattagtggtcattcattttcattttagaattcatttgttaattggagactttggctggtccgtttaataagataagcttttaccttttattgactcagattggaatacatctgcttatgcaattctgctcacctgattttttagaaccagacataagttcagaggaatctgtctccactgtagaagaacaagagaatgaaactccacctgctacttcgagtgaggcagagcagccaaagggggaacctgagaatgaagagaaggaagaaaataagtcttctgaggaaaccaaaaaggagtaaggagttatgtcttcttgctatttatatttgaagaatgtgtaaaaggactttagattagattgttttaaagtgttataacattggtttatgctaggtatttgctatttggatttaatttttagaattaccatttgaaataggtttattatatagttgtttgacctgttagaatatgctgtagttagcagaacacaatggtttgaataatccaaaagtctttgtcattggctttggaatgtgtttttgagcttgtaatttattgtgggagtatctgatattttaagcattggcaagacttcaataagaaatgaaacataactataaaaatctgacctagaagacatttcactattttattcctacttctgtgccaggagtgggttgtttttgtgtgcttatgttagaaggcattgatttgtatcaagccattggtagtgtgacctaaaagtctatatatgtttgatgaaatattcagttgaagaattggctttgagaatctgaaagtaaaatttgctattgatgtgtatctatataaagtgatggcagttactttttaatttttaatttttttttttttttttttgcaggagagctgatagtattcattccactcttttcataattggtcagaacagttagaaattgcttttaactatagtcatgcattgcttaacaatgggtatacattctgagagatacatctttaggcgatttcatcatcgtgccaacatcataaagtgtacttacacaaacctacgtggtacagcctactacatacctaggctttatgggatagtctgttgcttctaggctacaaacctgtacagcatgttactgtactaaatactgtaggcagttataacacaacggtaagtatttgtgtatttaaacatagaaaaggtacagtaaaaatataatataaaagataaaaaatggtatacctgtgtaggacacctaccatgaatggaccttaaaggattggaagttgtttgggtgagtgagtgagtggtaagtgaatgcaaaggcctaggactactgtgtgcaacttttaaaactaaaaagtttttatttttagcaacttttaaaactaaaaagtttttatttttaaaaacttttaaaactttaccaaaaacaaagacacaa

SEQ ID NO: 12396 - DNA, 1598 bp, Homo sapiens
ggttgattcttcaccacactgaaaccattaggaaaaatccttgtggttaacagcagaggcttcagagtgtaacctgtactcgggcctagaaattatttaaaatggcgactgatacgtctcaaggtgaactcgtccatcctaaggcactcccacttatagtaggagctcagctgatccacgcggacaagttaggtgagaaggtagaagatagcaccatgccgattcgtcgaactgtgaattctacccgggaaactcctcccaaaagcaagcttgctgaaggggaggaagaaaagccagaaccagacataagttcagaggaatctgtctccactgtagaagaacaagagaatgaaactccacctgctacttcgagtgaggcagagcagccaaagggggaacctgagaatgaagagaaggaagaaaataagtcttctgaggaaaccaaaaaggagtaaggagttatgtcttcttgctatttatatttgaagaatgtgtaaaaggactttagattagattgttttaaagtgttataacattggtttatgctaggtatttgctatttggatttaatttttagaattaccatttgaaataggtttattatatagttgtttgacctgttagaatatgctgtagttagcagaacacaatggtttgaataatccaaaagtctttgtcattggctttggaatgtgtttttgagcttgtaatttattgtgggagtatctgatattttaagcattggcaagacttcaataagaaatgaaacataactataaaaatctgacctagaagacatttcactattttattcctacttctgtgccaggagtgggttgtttttgtgtgcttatgttagaaggcattgatttgtatcaagccattggtagtgtgacctaaaagtctatatatgtttgatgaaatattcagttgaagaattggctttgagaatctgaaagtaaaatttgctattgatgtgtatctatataaagtgatggcagttactttttaatttttaatttttttttttttttttttgcaggagagctgatagtattcattccactcttttcataattggtcagaacagttagaaattgcttttaactatagtcatgcattgcttaacaatgggtatacattctgagagatacatctttaggcgatttcatcatcgtgccaacatcataaagtgtacttacacaaacctacgtggtacagcctactacatacctaggctttatgggatagtctgttgcttctaggctacaaacctgtacagcatgttactgtactaaatactgtaggcagttataacacaacggtaagtatttgtgtatttaaacatagaaaaggtacagtaaaaatataatataaaagataaaaaatggtatacctgtgtaggacacctaccatgaatggaccttaaaggattggaagttgtttgggtgagtgagtgagtggtaagtgaatgcaaaggcctaggactactgtgtgcaacttttaaaactaaaaagtttttatttttagcaacttttaaaactaaaaagtttttatttttaaaaacttttaaaactttaccaaaaacaaagacacaa

SEQ ID NO: 12397 - DNA, 6613 bp, Homo sapiens
ccaggaaccaattctaactatcaaagtaagactcggttgtgtatatttaactgggattaggagaattttcttttgaaaaaaccgtggagggccaggcactgtggctcacgcctgtaatcccagcactttgggaggctgaggcgggtggatcacgaggtcgggagtttgagaccagtctggccaacatagtgaaaccccatctctactacaaatacaaaaaaattagcagggtgtagtggtgtgcatctgtagtcccagctactcgggaggctgaggcaggagaaacgcatgaacccaggaggtggaggttgcagtgagccgagattgcaccattgtactccaatccggacaatagttgcgagactatgtatcaaaaaaaaagaaaagaaaagaaaagaaaaaaaaatcatagagatcatgctattaatgtcaaagtattaactactgactgaaaaccaagagggaacagctttacaaatttcatatttacaaaaagaaaaacaaataatcaaaactgaattcttaatttaaagcatctgcttataagaagttgcttttactgtaaagatttttctgatatttattgtaatttagataaatctctaggttcaaagcaactctaaattatagtgtattttttcctacttttgaatgttcaccaaaaacatctaattttactttgaaacaaagccaggattttagagtacttactacttatattatttcttattaacctaagccccacaacagacaatactttatttcagtaaagtatatttactctaggaggtggtgatttgagatgagacaccctgccttatcagcattatcgtgtggattggtgagactgggtgacttctcaatgaactattagaagaggcacaatgttgtagggtgagggatatggaaattaagtaacagaagaagacaatccagaatatattattgtaattaaaaggtaattttgaagtctttttttttttttagacggagtctcgctgtgttgcccaggctggggggcgcagtggtgcgatcttggctcactgcaagctccgcctcccctgggttcacgccattctcctacctccaccccctgagtagctgggactacaggcacctgccaccacccctggctaatttttttgtttttgtattatttgtttttagtagagacagggtttcaccgtattagccaagatgatctcaatctccttacctcgtgatctgccggcctcggcctcccaaagtgctgggattacaggcgtgagccgccacgcccggcctatttctatatgccagatgttttaagagaagatgaatttggttaacaagcctttcagtttcactgatatttgcagctgttttttggatactgaatcaccataaaatatattttggatatgtctctgtaagaaagatgagaatgaaggacttcaggaaccatgatattgttttgttactgtttactgatttatgaataattagttctgttcatctttataagagattctcctagatgattatcaatacctataggtacacaatagatgtttaagtgaatggaaataattaaatacttagttttaggtctgctgtttatgtgctaccttagagcaagtcacttaactactttgagctcaagtcacttaaccactctgggctttttttttttccctgtgaaataaggtatttgactcaatggtctctaatgtgtcttttcattataactcttgccaggtatggtggctcatgcctggagtcccagcagtctgggaagccaaggtgggagtattgcttgagcccaggagtttgagaccagcctgggcaacatagtgagactttgtctctatattttgcaaaattttaaaatatagatatatgtatgtatgtatgtatataatttaactcttgccaaacttatgggcaataagtaaatgtttaattaaatacctttgaacacataggattcacttagtgtatgtcaattaccgtatgtgacaggatattaaattgatgggcatctgtttgtggttgagggaattatctaatctgaataactagataactttcatttctgaattttttttttcagtgcatttgctgaaaaaaaccctgcagaaatgcgaaaagaatgggtggatggaacagatctctgggaaagggttcagtggcaccttccagctctgttttccctattatcccaggtaagtacttagcctataatagatcactgtaaatttatagtctaagttacacactcagtttaatttattttacccttattactgttttagtgaactggaaatacagtcgtcctttgttacatataggggattggttacagaactgcccgcatacccaaatgcgcatgtactcagccctgtggaatccatgtatctgaaaagtctgtcctctttgtatgcaggcttcgcatcctgtggatgttgtatttctgatctgtgtctggttgaaaaaaaaaagtccacatataaagtgggctaatgcgttgccaacctgtgttgttcaagggacaactgtatttgaaaataaagatgacttttaaggcagtattattttggagtaaaaggttttgtataaaaatagtgattttagccaggcataagattatttgagatcctcggatggtcattttgatgttcattccttctttatcaagtaaatgataatgacagattcttagaggattatgtataagtttttgtttttgttttttgagacagggtctcactctatcgcccaggctggagcagtggtataatctcggctcactgcaatctccgcctcctgggctcaagtgatcctcccacctcaatatcccacgtagctgggactacaggtgcgcgccaccacacccagctaatttttgtgttttttgtagagatgggggtcttaccatattatctaggctggccttgaactcctggctcaagcagtcctctcgcctcagcctcccaaagtgatgggattatatgcataagttttaattgtccaataccaagtggggagaacattgactgttttcaagaatcttaactctacctccatactgtagagacaggaacacttatctgaaaatttgtttcttgcaaataccttatttattctttgaaacaaaaaaatatattgatcacctcctgtggtccaagcattgtttcatgcactgggtttaaagccttttgatttccagtaaagtacataacatataccactaagaccctgttttagcaagactattgtgtaactttcttatattattatttctgtacaaacataagtgttacttggcttaatacatattatataaatttttcgaacattaaacattaaatttaattcccaaagtcacacacacacaaaatgttacattctgccaggtgtggtgggatgcacctgtagtcctaactacttgggaaggtgaggtgggaggatcccttgagcctaggagtttgattccagcctgggcagcatagcaagaccctgtgtctgaaaaaggcaagaaacacacacacacacacacacacacacacacacacacacacatatatgtatgtatgttatcatttaaggatatgttaatcaaaggaatcaaggttcataccaccaaggacaaaaaagagtttaggagatccttgccgaatacctttgaagctttgaacagatttaggcctttgaggtctttttttttaagacttggaggtcttttgccagtattatgaggctgaagtgtgtattccatgcagactgttcattgctgtgtactcattggctaatacagtgccagatacatattaggagtttaagtaattgtttactaaataaatgactatggattaattttattaaatagtgggtatagaattaggtatggtgcaggacttttatagatttggcataactttatatgtatgttcaaaatacggtaaattgtaacctgatacgtgtaacctagcttgacatttttgggaagggtgggaagaagtgggatatgtccaggtaagagcatctaggttcacattatttttcttgttttatatgggacttgtgttttaatctaatttttccccgtatagcccaggagttctgtttccgaagaaagagccagatgattctagagatgaggatgaagatgaagatgagtcatcagaagaagactctgaggatgaagagccgccacctaagagaaggtgtggacatgtgaaaaccccttgtggggaggacactaaatacctcagagctgaaaaatagtgctataggaggggctaaagctaaaaagcatttcagaaactcaggatccttctcaagttctttatataaatttggattgatcttctcctttgaaaatcaagggctccagacttttagggcaagcctgtgtgtatccatagtttagttattcaaagaaaaataattacatatttccctaggaacaacgtcatgaaattgtgtctagacttcatgaattggttgaatttttatacaattttagtaaaatctctagtaaaaaattgtcacattcctattcttaacgtaagtgaccacttcatatgccgtttctctttagaaagcatctggttgtcccaacaaaacgaatctcttaagtactaaatgacggcctttgctctttggttctcacaggttgcagaagaaaaccccagccaagtccccagggaaggccgcatctgtgaagcagagagggtccaaacctgcacctaaagtctcagctgcccagcgggggaaagctaggcccttgcctaagaaagcacctcctaaggccaaaacgcctgccaagaagaccagaccctcatccacagtcatcaagaaacctagtggtggctcctcaaagaagcctgcaaccagtgcaagaaaggaagtaaaattgccgggcaagggcaaatccaccatgaagaagtctttcagagtgaaaaagtaaattttataggaaaaaagggtatcatgatgaaattcaaaatcttattttctaaggtcagtgtgcatttgtttagttttgatgcttttcaaattacattattttcctcccctatgaacattgtggggagggactctaaataaaccagtttaggcatttgctagctttaggtgcttttattggtgcctgcccttttccttgttcattttaatttctgcaataatcctggactttcctaaactatgtaatgtatacttgtcctttttctctgcctcccccaaccccctgttgtttttatggtcagctttgccttttttttttcttccaattttatctaaacagttgcagagatttttatatttgtagaaagcatcaagaacggtatgccagtcaggtcctggaagtaaaatggaggcacaatatagcactgactgagttgtaaagcctcctgcctggagacttcagttatagctgtaataattaatcttatttataaaagccactccactaaccttttctctccaactgtaaacacagagacagctttgggaataagccaaaaacagggtgatctcattagattttgaagatatatgactcctttgggctacatttcatattgatcaatttctaggtatttttcactggcccaaagtattgcattcccttaacagcaagcacaagttctctatatcacttgttttttgttgttgttgttgttgtcgtcgttgttttgagacggagtcttgctcaggtgccccggagtgcagtggtgcaatctcagctcactgcaacctccacctcctgggttcaagcaattctcctgcttcagcctcccgagtagctgggattacaggtgtgtaccaccacgcctggcaatttttttgtatttttagtagagatggggtttcgccgtgttggtcaggctggtctcgaactcctgacctcaggtgatccgcctgcctcggcctcccaaagtgctgggattacaggagtgagccactgtgcctggcctatcccacttggtttttgactgaaggggaagtgtagaaatatattgatttgtgatttctggtgtcacctgtgttaccaaaaatcaaaacaaatcttttttattttttattattattattatttttgagacagagtctcgctctgtcgcccagtgtggagtgcagtggtgtgatcttggctcactgcaaactccgcctcccaggttcaagcgattctcccacctcagcctcctgagttgggtcctacaggcgcacacgaccacgcccagctaattttttgtatttttagtagagttggggtttcaccatgttagccaggatggtctcgatctcctgacctcgtgatccactcacctcagcctcccaaaatcctggggttacagatgtgagctaccactcacggcccaaatcttcttgatcatatgtttaaatatattttttaatatttggagcatgagttgtcacttcttgtttgccttttttataaggaaatgttggagagttacatcattgctaatgtagaaatgttaagtggaaaaatatacagtttggtaaaataaactagattctacatttatttgtgggtttttttcccctcctttctttccacagcacttttgatatcaagcaagtggcttcctttttgagatat

SEQ ID NO: 12398 - DNA, 639 bp, Homo sapiens
ccaggaaccaattctaactatcaaatgcatttgctgaaaaaaaccctgcagaaatgcgaaaagaatgggtggatggaacagatctctgggaaagggttcagtggcaccttccagctctgttttccctattatcccagcccaggagttctgtttccgaagaaagagccagatgattctagagatgaggatgaagatgaagatgagtcatcagaagaagactctgaggatgaagagccgccacctaagagaaggttgcagaagaaaaccccagccaagtccccagggaaggccgcatctgtgaagcagagagggtccaaacctgcacctaaagtctcagctgcccagcgggggaaagctaggcccttgcctaagaaagcacctcctaaggccaaaacgcctgccaagaagaccagaccctcatccacagtcatcaagaaacctagtggtggctcctcaaagaagcctgcaaccagtgcaagaaaggaagtaaaattgccgggcaagggcaaatccaccatgaagaagtctttcagagtgaaaaagtaaattttataggaaaaaagggtatcatgatgaaattcaaaatcttattttctaagcacttttgatatcaagcaagtggcttcctttttgagatat

SEQ ID NO: 12399 - DNA, 4660 bp, Homo sapiens
cctctgcctcccaaagtgctggggctataggtgtgagcacccagccaaaagaatcttaatttttagggacataactggttaacctgcttattgggtacagttgtcagtatctttgggttaggttggctattattttagggtggatggagggtagatggaaggagaaaatatccataggagggttgggacttctcagttagattgaatacctgttgaatgggaagagaaagtccctaagctgacaatttattgtaaaacatatctgtgctaatgcaggaactccgacccacctggtgcagaggagtcttgtcttgacctgctttgggagagtgttgtcttgatgcttttctcttcctccttggaaaacagctgaagaaatcaggggagaaacccctgcttggtggaagcctgatggaatatgcaatcttgtctgccattgctgccatgaatgagccgaagacctgctctaccactgctctgaagaagtatgtcctagagaatcacccaggaaccaattctaactatcaaagtaagactcggttgtgtatatttaactgggattaggagaattttcttttgaaaaaaccgtggagggccaggcactgtggctcacgcctgtaatcccagcactttgggaggctgaggcgggtggatcacgaggtcgggagtttgagaccagtctggccaacatagtgaaaccccatctctactacaaatacaaaaaaattagcagggtgtagtggtgtgcatctgtagtcccagctactcgggaggctgaggcaggagaaacgcatgaacccaggaggtggaggttgcagtgagccgagattgcaccattgtactccaatccggacaatagttgcgagactatgtatcaaaaaaaaagaaaagaaaagaaaagaaaaaaaaatcatagagatcatgctattaatgtcaaagtattaactactgactgaaaaccaagagggaacagctttacaaatttcatatttacaaaaagaaaaacaaataatcaaaactgaattcttaatttaaagcatctgcttataagaagttgcttttactgtaaagatttttctgatatttattgtaatttagataaatctctaggttcaaagcaactctaaattatagtgtattttttcctacttttgaatgttcaccaaaaacatctaattttactttgaaacaaagccaggattttagagtacttactacttatattatttcttattaacctaagccccacaacagacaatactttatttcagtaaagtatatttactctaggaggtggtgatttgagatgagacaccctgccttatcagcattatcgtgtggattggtgagactgggtgacttctcaatgaactattagaagaggcacaatgttgtagggtgagggatatggaaattaagtaacagaagaagacaatccagaatatattattgtaattaaaaggtaattttgaagtctttttttttttttagacggagtctcgctgtgttgcccaggctggggggcgcagtggtgcgatcttggctcactgcaagctccgcctcccctgggttcacgccattctcctacctccaccccctgagtagctgggactacaggcacctgccaccacccctggctaatttttttgtttttgtattatttgtttttagtagagacagggtttcaccgtattagccaagatgatctcaatctccttacctcgtgatctgccggcctcggcctcccaaagtgctgggattacaggcgtgagccgccacgcccggcctatttctatatgccagatgttttaagagaagatgaatttggttaacaagcctttcagtttcactgatatttgcagctgttttttggatactgaatcaccataaaatatattttggatatgtctctgtaagaaagatgagaatgaaggacttcaggaaccatgatattgttttgttactgtttactgatttatgaataattagttctgttcatctttataagagattctcctagatgattatcaatacctataggtacacaatagatgtttaagtgaatggaaataattaaatacttagttttaggtctgctgtttatgtgctaccttagagcaagtcacttaactactttgagctcaagtcacttaaccactctgggctttttttttttccctgtgaaataaggtatttgactcaatggtctctaatgtgtcttttcattataactcttgccaggtatggtggctcatgcctggagtcccagcagtctgggaagccaaggtgggagtattgcttgagcccaggagtttgagaccagcctgggcaacatagtgagactttgtctctatattttgcaaaattttaaaatatagatatatgtatgtatgtatgtatataatttaactcttgccaaacttatgggcaataagtaaatgtttaattaaatacctttgaacacataggattcacttagtgtatgtcaattaccgtatgtgacaggatattaaattgatgggcatctgtttgtggttgagggaattatctaatctgaataactagataactttcatttctgaattttttttttcagtgcatttgctgaaaaaaaccctgcagaaatgcgaaaagaatgggtggatggaacagatctctgggaaagggttcagtggcaccttccagctctgttttccctattatcccaggtaagtacttagcctataatagatcactgtaaatttatagtctaagttacacactcagtttaatttattttacccttattactgttttagtgaactggaaatacagtcgtcctttgttacatataggggattggttacagaactgcccgcatacccaaatgcgcatgtactcagccctgtggaatccatgtatctgaaaagtctgtcctctttgtatgcaggcttcgcatcctgtggatgttgtatttctgatctgtgtctggttgaaaaaaaaaagtccacatataaagtgggctaatgcgttgccaacctgtgttgttcaagggacaactgtatttgaaaataaagatgacttttaaggcagtattattttggagtaaaaggttttgtataaaaatagtgattttagccaggcataagattatttgagatcctcggatggtcattttgatgttcattccttctttatcaagtaaatgataatgacagattcttagaggattatgtataagtttttgtttttgttttttgagacagggtctcactctatcgcccaggctggagcagtggtataatctcggctcactgcaatctccgcctcctgggctcaagtgatcctcccacctcaatatcccacgtagctgggactacaggtgcgcgccaccacacccagctaatttttgtgttttttgtagagatgggggtcttaccatattatctaggctggccttgaactcctggctcaagcagtcctctcgcctcagcctcccaaagtgatgggattatatgcataagttttaattgtccaataccaagtggggagaacattgactgttttcaagaatcttaactctacctccatactgtagagacaggaacacttatctgaaaatttgtttcttgcaaataccttatttattctttgaaacaaaaaaatatattgatcacctcctgtggtccaagcattgtttcatgcactgggtttaaagccttttgatttccagtaaagtacataacatataccactaagaccctgttttagcaagactattgtgtaactttcttatattattatttctgtacaaacataagtgttacttggcttaatacatattatataaatttttcgaacattaaacattaaatttaattcccaaagtcacacacacacaaaatgttacattctgccaggtgtggtgggatgcacctgtagtcctaactacttgggaaggtgaggtgggaggatcccttgagcctaggagtttgattccagcctgggcagcatagcaagaccctgtgtctgaaaaaggcaagaaacacacacacacacacacacacacacacacacacacacacatatatgtatgtatgttatcatttaaggatatgttaatcaaaggaatcaaggttcataccaccaaggacaaaaaagagtttaggagatccttgccgaatacctttgaagctttgaacagatttaggcctttgaggtctttttttttaagacttggaggtcttttgccagtattatgaggctgaagtgtgtattccatgcagactgttcattgctgtgtactcattggctaatacagtgccagatacatattaggagtttaagtaattgtttactaaataaatgactatggattaattttattaaatagtgggtatagaattaggtatggtgcaggacttttatagatttggcataactttatatgtatgttcaaaatacggtaaattgtaacctgatacgtgtaacctagcttgacatttttgggaagggtgggaagaagtgggatatgtccaggtaagagcatctaggttcacattatttttcttgttttatatgggacttgtgttttaatctaatttttccccgtatagcccaggagttctgtttccgaagaaagagccagatgattctagagatgaggatgaagatgaagatg

SEQ ID NO: 12400 - DNA, 706 bp, Homo sapiens
cctctgcctcccaaagtgctggggctataggtgtgagcacccagccaaaagaatcttaatttttagggacataactggttaacctgcttattgggtacagttgtcagtatctttgggttaggttggctattattttagggtggatggagggtagatggaaggagaaaatatccataggagggttgggacttctcagttagattgaatacctgttgaatgggaagagaaagtccctaagctgacaatttattgtaaaacatatctgtgctaatgcaggaactccgacccacctggtgcagaggagtcttgtcttgacctgctttgggagagtgttgtcttgatgcttttctcttcctccttggaaaacagctgaagaaatcaggggagaaacccctgcttggtggaagcctgatggaatatgcaatcttgtctgccattgctgccatgaatgagccgaagacctgctctaccactgctctgaagaagtatgtcctagagaatcacccaggaaccaattctaactatcaaatgcatttgctgaaaaaaaccctgcagaaatgcgaaaagaatgggtggatggaacagatctctgggaaagggttcagtggcaccttccagctctgttttccctattatcccagcccaggagttctgtttccgaagaaagagccagatgattctagagatgaggatgaagatgaagatg

SEQ ID NO: 12401 - DNA, 3703 bp, Homo sapiens
cgggctcctgcaggcggggcgctgtgcgcgccgcgatccggtacgtgggcctccgggctgtcccctctgggggcggcgatcctccctccggagccccccttcaaccctcccggaagtgagcatttgcaggaccagggatgctgtgctgctctcccatgagccagtcaccgagtcggtctgctgcagccctttctgaacctctggccgtctggatgctccactgtgcttgccaagatgaagtgcgtcttggtggccactgagggcgcagaggtcctcttctactggacagatcaggagtttgaagagagtctccggctgaagttcgggcagtcagagaatgaggaagaagagctccctgccctggaggaccagctcagcaccctcctagccccggtcatcatctcctccatgacgatgctggagaagctctcggacacctacacctgcttctccacggaaaatggcaacttcctgtatgtccttcacctgtttggagaatgcctgttcattgccatcaatggtgaccacaccgagagcgagggggacctgcggcggaagctgtatgtgctcaagtacctgtttgaagtgcactttgggctggtgactgtggacggtcatcttatccgaaaggagctgcggcccccagacctggcgcagcgtgtccagctgtgggagcacttccagagcctgctgtggacctacagccgcctgcgggagcaggagcagtgcttcgccgtggaggccctggagcgactgattcacccccagctctgtgagctgtgcatagaggcgctggagcggcacgtcatccaggctgtcaacaccagccccgagcggggaggcgaggaggccctgcatgccttcctgctcgtgcactccaagctgctggcattctactctagccacagtgccagctccctgcgcccggccgacctgcttgccctcatcctcctggttcaggacctctaccccagcgagagcacagcagaggacgacattcagccttccccgcggagggcccggagcagccagaacatccccgtgcagcaggcctggagccctcactccacgggcccaactggggggagctctgcagagacggagacagacagcttctccctccctgaggagtacttcacaccagctccttcccctggcgatcagagctcaggtagcaccatctggctggaggggggcaccccccccatggatgcccttcagatagcagaggacaccctccaaacactggttccccactgccctgtgccttccggccccagaaggatcttcctggatgccaacgtgaaggaaagctactgccccctagtgccccacaccatgtactgcctgcccctgtggcagggcatcaacctggtgctcctgaccaggagccccagcgcgcccctggccctggttctgtcccagctgatggatggcttctccatgctggagaagaagctgaaggaagggccggagcccggggcctccctgcgctcccagcccctcgtgggagacctgcgccagaggatggacaagtttgtcaagaatcgaggggcacaggagattcagagcacctggctggagtttaaggccaaggctttctccaaaagtgagcccggatcctcctgggagctgctccaggcatgtgggaagctgaagcggcagctctgcgccatctaccggctgaactttctgaccacagcccccagcaggggaggcccacacctgccccagcacctgcaggaccaagtgcagaggctcatgcgggagaagctgacggactggaaggacttcttgctggtgaagagcaggaggaacatcaccatggtgtcctacctagaagacttcccaggcttggtgcacttcatctatgtggaccgcaccactgggcagatggtggcgccttccctcaactgcagtcaaaagacctcgtcggagttgggcaaggggccgctggctgcctttgtcaaaactaaggtctggtctctgatccagctggcgcgcagatacctgcagaagggctacaccacgctgctgttccaggagggggatttctactgctcctacttcctgtggttcgagaatgacatggggtacaaactccagatgatcgaggtgcccgtcctctccgacgactcagtgcctatcggcatgctgggaggagactactacaggaagctcctgcgctactacagcaagaaccgcccaaccgaggctgtcaggtgctacgagctgctggccctgcacctgtctgtcatccccactgacctgctggtgcagcaggccggccagctggcccggcgcctctgggaggcctcccgtatccccctgctctaggccaaggtggccgcagtctgcctttgcatcctgtcctccagccacccttgcttgccactgttccccatgacgagagcctcctgtctgcagtggccatcctgaggatagggcagagtgcccagggtggccccagggcttctaaaaccccacctagaccaccctccatgtcaggtactgagcaaggccccagatccttctctctggaggaagagggaagcccaggggtcctgtttgtaaaacaacggtggcaacagctcctcttccagagctgcctctgcctttatcctgggagatggggaggaagccccatctctgctgttccctgcgtggaggaagcccacccagcaagctctctcctaccccaggtaaaaggtgctcctttgcctgggtttgaattccagcgctgccacttcctctctgcacctcctggcaagtttcttctattccccacgtttaaagcgatggcacctccgtcccagggtggtgtgaggattacccagtgtggtaggtgctcaataaatgttggtcattgttatcactgaagcccaacatgctagtgcttctagacccttctgtcagtgctgataagcccttgctaagtcccagccccttcatgcttggctggcgtctgccctagggctggggttctcaagcccctggccctggcccagagatttggattcccttggcggccgtggagcccagcctttgatgtctttcaaagcttctgtggtgcgccctggattgagaaccaccacccgaggggtacagcccctctcttccaaccgagaagttcctgtcccagaatggacccagggacaagagaccctgagagccctgggactgggagtgtctgctcctctgaggccaggaggccggtgctgggccagagaggacggcgtggcgaaagtcagcgtccactgcagcacaggatcagatggccgtgtgctgtgcatgcaggagcctcgccttctgtgtctttagtcttgagccaaaatttgctcaaagactgatctcttccttgcagggaacagctttggggctgggggaactagaacccacatgttggtctaaaccctgagaaggtggcagtgaggaagtatcccctcaggtgactggatctgtgttcctccttaacatcatctgatggaatggcaatgaaaagcgtggattgtggaaaatacagaaaaacataaaggaaaaaactccaatcccctgagcccaccactgttcaggacccctgcttttgtcacctactatttccctttagtttttagcagcggctggatgtgatatgtctagtttaaccagtccccttgatctttctatataataaataacacaggagtgaacatcctgaatcaga

SEQ ID NO: 12402 - DNA, 17763 bp, Homo sapiens
gcggggcgctgtgcgcgccgcgatccggtacgtgggcctccgggctgtcccctctgggggcggcgatcctccctccggagccccccttcaaccctcccggaagtgaggtagggtccctaggggtcccggagcgggcccactcctagcctcacccactccgggcgtgtggccgtgggccggtcgcttcctcgctcggggccaaagttcctcagccgtgaagaggggtggatgtcacaagtcaagcctccttcccagggtggccgtgaggttcgggggtggggggaggtggggatttggggtgaaactggacagaaactggcgtgctaggcaaacgggagccccgcggcggcgaactgctgactcgctctctccagagactcaggggcagggccgggctccgaaggtgtgggaccccagaaggagctgctgaagacgggaccaagggccacagggaggtttgctggggtccagatggtgaaagtgggcgctgggggtcgccccaggttggccccccgccatctggagctcctttcgtcagtgagtcccctccgagttccctttctagggcaagatagcgaggtgaagcggaagtctcagtgtgacaccggcgaggttctcttcccagcagcctttgggaagcatccccctgtttcgggaatatggcattcgggccaatcatgtgggtgatggagcccgtctcagggttcggctgctaaaggccgaactcgtaacagcagtctctgtggcgggtagtcacttgcctcttactggctcacagtgcttgacttcctaattaagttttctgttgttcctgccctctattcaaatatgaatgattccggaaccagattgattaatcctgttatttgaagaagggaagctgggaaataggaataatgatccccacacctatgtaagaacgcagtttgctaaggttactttgcagcttgcctggtcactcccatgatctaaccctgtagggaggtagagtaggggatgttgctctgtttctccgcaggagtttgaggctcagagaggtttatgggacttggcaaagccaaaactagaacctggtcccagatgcctttcctgttagtttccttccattcatcgtatcatcccaggatccccactcccttcaccgggactgcatcctcaccacctgggatgtgctatgctgtctcccgtcagtcactcctagcaagctccctggggctgcttggggagctctgagtgacccgcagaagtgagagcacttcatgggaacaaaggaggaaggaacaaaagtgggcacctgctctgtgcaaagggctgtgctggccgggttcctattctccattatgggaggtgaggggcaggatcccagatatgttcttagcagactgcctcagggcctggagagaccagggaccacgcagcccttctccagcttgtcctttctcaacgggcagcagtcaagaccagggcatctgcctgccctcatattctctctgttttaagcatttgcaggaccagggatgctgtgctgctctcccatgagccagtcaccgagtcggtctgctgcagccctttctgaacctctggccgtctggatgctccactgtgcttgccaaggtagatgatcttgccccacctggggaggacagggaggcaggcagcatccaccctggggctttgggaggcagatggaatgaggtaggcagtggactgagtgctactgggctctgcacacctgctcatcccctccccagccctgcatcctgaggccacccccatcctgatgcctcatctctccttcacccctcgaatccaggcaggtcatcacagcctgctgcatctttaaagctcctcccagcccccaccaaggggtgagcactcattacctgacacccgcacctagatgaccgccttcatgaccttgacctgcccatctccagccagccggtcacttctccgctcacaaccacagcctccattccatagcccactgctccctaacccatacactctggtcagctttgtcacatgtacctgggagtcccagagcagcctcttcaggtccacccgcctctcccagcaacctccttttcacacctgttgcactctcagtgtctgccttggcattgagtaattctgtgggaataggctgcattccttcttcactgtgctgttatgtctcctggcatttgccataaataccttgggaccagttgcaccaagttagtttgggaggaattcagtaaggaccactaagctggacatggggatgacggaacacaagacctggagatgctgtgatcctcccaagaaaactggaaatccacttgtgtgagagttacagcagagcttcctaatcattgtcatggcttagcgcacataccacatgattatatctgcgtgacaccctgaggcacataagaggatttgaaaccactgcctgaggcctcttagctgcagcagccagcctggagcactgtcctcaccagcctggtcaggctgccccaagttttagaagatcgagggtttgccgcacgcagagggccatggcacacagtgtgggaagctgtattaaagatcttccagtgggtgaatagttaagacatttcttacataatcaagcacagagtgtgtggtgtgtgtgtgtgtggcgggggggtggggaaggagatttgggagggctgaagacactggtggctgtggccctagaagctgcagcctactaggtacaggggctttaggcagcctctgttctcaccatgaacagggagagcagcatttgaatgaaacttctgtggtgctgaagtaaattcaggggctttgaggctcatcttctggagctgttttttgtttgtttgtttgtttgtttgtttgttttttcagacagagtctcgctctgtcacccaggctggagtgcagtggtgtaatctcggctcactgcaacctctgcctcccgggttcaagcaattctcctgcctcagcagttatcccgagtagctgggataacaggcacttgccaccatgcctggctaatttttgtatttttagtagagacggggtttcaccatgttggccaggctggtctcgaactcctgacttcaggtgatccaccccccttggcctcccaaagtgctgggattacaggcgtgagccaccgcgcccagccctggaactgtttttatctgagggagagatatctctggactgcccagagatggaggtgcaccagtgccctccgatccacaccaggcactaactggctgccgtgagcatggcctccctgggcattcggctccatgtctaggccaagacctgggtcccttcctgtgccagtctggttccagtaggccccgtggtgggtctgttgctgtgctgagagggaccagataccacagaggaaagggccccagccttggcatcaaacaggtctgggtccagatcccagctttgccacttcaggctgtgcctgtgtcctgctctctaaaatgggggtacctgaagagttctactttgtccagttgtgagggtgcaacaaaaatggaagtcccttgtgatgcctggtgtgcagaaggggctcactgaatgtttgctgaggttggggtcctcttcgttactcagactgagctcatagatgttggggctggaggctgaccttgaccttgcctttccctggcagatgaagtgcgtcttggtggccactgagggcgcagaggtcctcttctactggacagatcaggagtttgaagagagtctccggctgaagttcgggcagtcagagaatgaggaagaagaggtgagtgcagggtaggcagtcccaggaggggtggataggaaggaaccatacaaaactcccagcaggcagagaggcaggaaaacctgtgttcaccctgtcctgggcagcatgagcagggtgctgggtggggtccagcatccttcacacctagacccttatcctcaaggttggcctcttgatgctctgagctcggtgaccccacccccacaccccaccagtcctctctggactaaatgagggcaagaagaagtcgaattttatcacgtaacagaagaacttggagccatcagtttctgtaacctaaaaagtttaacaaggctgggcgcggtggctcacgcctgtaatcacaacactttgggaagccaaggtgggccagttgcttgagctcagggatttgagaccagcctgggcagcatggcgaaaccctgtctctacaaaaaaaatacaaaaattagccaggtgtggtggtgcgtgcctatagtcccagctacttgggaggttgaggtgggaggatcacttgagtccaggtggtagaggctgcagtgagccgagactgtgcccatgcattccaacctgggcgacagagcaaaaaaaaaaaaaaaaagtttaacgtaagctgaacacgttaattttttaatagctgtattaaggtatgattaacataccataaattgcacatatttaaagtgcataatttgataagctttgatatgtatatacctatgattctatcacaatcaataaaaggaatatatctaccacctcaaacatttgtaatcccttctttcccatccccatcgcataggaactgctgatctgctttctgtcatgatagattagtttgtatcatatggccttatataaatggagtcatacagtatgtgcttggatttagtttggttttggtttgactgctttcactcagcataattattttgtgattcatctgtgttgtggcatgtatcaatcgttcattccttgtcattgagtagtaatctattgtatcaggatgccaccatttgttcattcatttacttgttgatggacatctgtgttattttcagtttttgactattacaaataaagcaactatgaacatgcacgtacaagtctatgtatacatggatgctttcatgtccaaggacagatacttaggatagactggctaggtcatgtaggtgtatgtgtaactttttaataaactgccaaacttttccaaagtggttgtgtaatttttgattccacctgtagtgtttgagagttcagttcctccatatcctcaccaacactatagtccgtctttttaattttagccattctaatagatgttcactagaatctcactgtgttttaaatttcatttccttaatgactaatgcttttgagcatcttttcatgtgcttatttgccatatcttttgcccagtttttatttgagttgattgtttcttcttcttattcttactgagttttgagagcttctaatatattttggatggaatcctttatcagatacatgttttacaaatattttctttcagtttgtggcttgtgtttgtattctcaatggtatctttcaaagagcagaagtattagaactcgagtttatccattttgcatttatggattatgcttttagtgttatatctaagaaatctttgcccaacttacaaagagttttctctacatattcttttgaaagttttatagttttaggttttatatcaggtctgatgatctactttgaatttttgtgtgtggtatgagctatggattgaagataattttttttttgcatgtggacatccagttcaacagtttaacattacaactcagaaatacttgtcattttcacttacataatttccactctacattttaaaggagtaatttattttgaaaatgttttccagattaattttgggttaaaaatatttttactggggatgcagtggaaggtgttcttacatttctgcagcatgggctgattgcctctctgtccctttctgctctaaggggtctcatcatccagccaatgagtgagctgactccacctcagggagtccatttaccatcaacatcactcgtgttctcatcacagtctttaggcaaacacaagatatcagagatcatagacattcaagtggttttatttaagctaactgttaggcttttttattttttaacagtcaatacatataatatttaaattaagaatttttaaatatttcagtttttaaactactgttacaactatgtcaacttaagaagcaaactatttggtggcctttctcttcctctttattgaaaacctggcaaaggaacgaactcctgaattttcagttcctaaaaatgagtagtgtaaaggaaaggtggtctttaaagttttttttttttgttaatgtgcaacacattcttttctcatcatataaataatgagttaattgtaggaaatttggaaatacaaagagatagtttttaaatgacctataattccatgacccagagctattagctttttaatatactttctttgggtctttattttttctatataattgggattataccacatttacagttttactgcctgtttttttttccacttgccattatatcaagatatttcttctatttttttaaatagtctcagaagcataattcttaatggaaacattgtactccagtacatgaatcagtgtatcatcctttatttaaccattttcctcatatggacataaatattgctcctaatttgctatatcactcttgctttaagaaacatttgtgcttaaattttatctcatgtcagataaattcctaggataaatttaggataaattcctaaaaataaaaatgttgagtcaaaagccattcaaagatattgtactactttataattccgccaagtaatatatgagtatgctcctttatatacaccaaatatttttatctcccctgtattagtccattttcttaccactataaagaaatgcccaagactgggtactctgtaaaggaaagaagtttaattgactcacagttcagaaggctgtggaggcctcaggaaacttacaatcatgtcaaaaggcaaaggggaagcaagacaccttcttcacaaggcagcaggaaggagaagtgctgagtgaaggggaaagagcctcttataaaaccattagatctcatgagaactcactgtcacaagaacagcatgggggaaactgctcccatgattcaattacctccacctggtttctccgttgacatatgaggattgtggggattatggggattacaattcaagatgagatttggatggggacacaaagcctaatcatatcattctgccccaggaccctcccaaatctcatgtcccttttacatttcaaaaccaatcatgccttcccaacagttccccaaagtcataattcattccagcattaaccaaaaagtccaagactgaagtctcacctgagacaaggcaagtcccttccacctatgaccctgtaaaataaaaaacaagttacttccaagacacaatgggggtataggcattgggtaaatgttcccattccaaatgggagaaattggaactatggggctacaggacccatgcaagtccaaaatccagtggggcagtcaaatcttaaagctttgaaatgatctcctttgactctatccacgtccaggtcacactgatacaagaggtgggctcccaaggccttgggcagccctacccctgtgcttctgcagggcacagtcctcttcccagctgttttcacaggctggtgttgagtgtctgcggcttttccaggtgcatggtgcaagctgtcggtggatctaccattctgggggctagaggatgatggccctattcttacagctccactaggcaatgccccagtggggactctgtgtggaggtgtctgaccccacattcccttaatcactctagcagaggttctccatgagggctctgcccctgtagcaaatttctgcctggacatcctgccatttccatacatcctctgaaatctaggtggaggttcccaaacctcagtttttgatttatgtgcacccgtgggcccaataccacatgtaggtcaccaaagcttggggcttgcactgtctgaaacaacagccagagctatatgttggcaccttttagccatggctaggacgcagggcaccatgtccccagagtgcacaaagcagcaaggccctgggcccaacccctgaaacagttttttcttcctaggcctccaggcctgtggcgagagggcctgctgtgaagacctctgacaggccctggagacatttttcccattgtcttggtgattaacgtttggctcttcattatttatgcaaatttctgcagccagggcttgaatttctcctcagaaaatgggcttttcttttctattgcatcatcaggctgcacattttccaaacttttatgttctgcttcccttttaaacataagtcccaattccaaaccatctattagtgaatgcataaaactgagtgctttttagagcacccaagtcactccctgaatgctttgctacctagaaatttcttccaccccaaatcatctctctcaagttcaaagttgcacagatctctagggcaggggcaaaatgctgccggtctctttgctaaagcataacaagagtcacctttgttccagttccaaataagttcctcatctccatctgagactacctcagcctggacttcattgtccatatcactatcagaattttgttcaaaagcattcaatgagtctctgggaagttccaaactttcccacatcttcctgttttcttctgagccctccatactgttccaacctctgcctgttacccagtttcaaagtcactttcacatttttgggtatctttatagtagcacctcactctctgtggtaccaatttactgtgtcagtccgttttcgtaccactataaagaactgcctgagactgggtaatttataaagaaaaaaggtttaattgactcacagttcagcatggctggggagaactcaggaaacttacagtcgtggtggaaggcaaaggggaaacaaggcaccttcttcgcaaggcagcaggaagaagtgtcaagaaaagtggggaagagccccttataaaaccatcagatctggtgaggactcactcattttcatgagaacaagttgagaacagcctgggggaaccacccccatgattcagttatctccaccaggtctcccttgacacgtggggattatggggattacaagtcaagatgagatttgatggggacacaaagcttaaccatgtcatcccctcaccaaaaaaaagttctattcctgcagaaaaagctatagtcatgccctgcttaatgatggtgatacattctgttaataacaaactcatcattaggtgatttccttgtcatgtgaacatcatagtgtgtgcttacacaaacctagatggtgtagccaactacacacctaggctgtacagtatggcctgttgctcctaggctgcaaacctacagcatgtgactgtactgaatactgcaggcagttgtaacacaatggaaatgtttgtgtatctgaatgaacatagagaaggtatagcaaaaataaagcagtataatcttatggggccactatcatgcgtggtctgttgctgaccaaaacattgctcttcagtatgtgactatactgcttttacgatgagtttctatcaacatctagattcataagtgacttctctattaataaaatttgttcaagaaaatcatggtatatgaataattcagcaaatatttgaattcttgcctgtttatggaattctcgcctatctgtggggtattcattaaccaaatattaattgggaacctaccatgtgccagtctctcggggtaaagcagtaaacgtagcaacatgatccttgctttcatggaacttagagtctaaagaaggacattgtacagtgaaccagatggcaaataagtaccatgagttcagatagtgacaaatagtctggagaagttaaatggggtatgggatggggagtgacagaggtggagggcggtagcctgaggtggccagaaaaaaaaaaatctgagctggaaccagaatgataagtaggagccactgtgaaagctggacagactaactgtgggagctgggtacagtccttggttcccgaatgttggcaggaaaacctactccatagtgctgtgtcccacttgtacttcaatgctgcaccttcccgctggccagttgcctgtctttcttttcaaggcaaggtcttactcagcttcttgtagacttccccagctccaagttaggactgtgccttccccatatttcattcacgtctcctgaaatcttcttgggaagtctgctgttttcttcctttctttttattccactacggagaatttgagttgtaactgttccactggctttatcccattttattcacacatttgcaacaaacttgtccagttcctttttgtttttgtttatttgttttgttccttcttttggagagctgagagaatggatggaggaagagcttatcaaagtcaatgcaggcttgttatggaaaataggaaaagtacagaaacatacttaaaaatagagggaaaaaaatcactcctaattcctctatccagaagtaactttaatagtgttggctttctcagtattttatcaatacttcgttttttctatgcattcacattcttgttttatttttagctacaacattgtatcagaggaattttccatgtcattgaaacactctaatattttaagtggctatagacccttccataattttgatgtgctgctatttatttaactatttccctgatactagatgttaacattttttttccagttgtttgctattataaattaggcagtagtgaacatctttgtgcatgtatctttgtcccaatctctgatcattttccttaggacaaattttccaaagtagacttattgcaaaaaacagcatagactttggtacatgctacaaacttccttccagctccccgttcagtgctccccacattccactgttgtaatgaggcccaattccttaatgtttccttctagattcagagcctaaacagcaccattacccagctggccctccccattcttcctaaccaccacccgaagtgttggggacagtctctttttgctcccctccctaccaggacagtgataccctcccaggagggtctaacactatggaacccttgatatcaaggcctgatcttgtcccttccttagttcttggtgtctggcccactctaagctgtgaaattttcccccatttttgcagctccctgccctggaggaccagctcagcaccctcctagccccggtcatcatctcctccatgacgatgctggagaagctctcggacacctacacctgcttctccacggaaaatggcaacttcctgtatgtccttcacctggtgagtctatagctctggggcccatgttcctcttccctcagcttgatggggagtccacaggcctctcttatttggaactttagactcctttagaaggcagaaacggcatcttatcaaacccgcctgggacccgagcctcccctggcttgtctgcagagaccagggcaggtgaagggagtgcccttggggctggctgacactggcctgcctgtgcctgcagtttggagaatgcctgttcattgccatcaatggtgaccacaccgagagcgagggggacctgcggcggaagctgtatgtgctcaagtacctgtttgaagtgcactttgggctggtgactgtggacggtcatcttatccgaaaggagtgagtcttcaaagctggtcccctctgtcctttgccgagcaccctcgctgggccaggcagcgtgtgcccagcccctgtgaagctgccatttttcacatactgcccccagctgggtccctaggtcagagaaacagctcaagtgaaccttggagaccatctggtctgaccctctgactttatatctggtgaaacagagcagagaatggaactcacttgcctggggtcatctagctggttggtggccacatccaaactggatatttgagctcaggactctcagtccagtgctctttccatcctcccaacatcatcacccgtcattacaaatctggtctgagctagtcctctctggcttctcaagcttcagactctctctccagaaaaacacaaacccatgcacattcatacagtctcgtgaaggttttctcaggagacagaccttaaaacctgtctctgggcccacagtaaagaacttggggaaagagaatcatggttcagagtatacactgaggtgggagggaccccagaaaaggcttgtagttgaaatgtagacctagaaaagagaagttcgtagtatcaccaccccctgattctctaagatggattgggaagctgcggagtgtgaagctctgggactttagttttgtggcgatatgagcaactacccatattgaggcatttctcaaatgcacaaacattgtttcatgagtcattttagcccagataggtcatggtgtcagtggcaaatgctgcaggtggcagatgcctgttacatgaatcacagtggccagtgcagacgttgccagcatccgagatggctgcgaccctgagtagggccctgatgatggaccagatctttctgtgttcagtggcctctgtgtgagaagcttaagcatcaccctggctctctctagctggctttgtatgacatgtgtttgtgtgacagaggctgaggagtgaggtgatttgctcagctgcctgccttccggctccgtgcctatcccaccccactccacagttagagctcggccggaaacctggccccctttcccagctgtgtgggcaggtcatatgggctcaccaagctctgatgctgagctgagactgtggtcctttggttgggtgtgggggagaccagctttcttgtgatctctcccgccctctctggctctgcccccaggctgcggcccccagacctggcgcagcgtgtccagctgtgggagcacttccagagcctgctgtggacctacagccgcctgcgggagcaggagcagtgcttcgccgtggaggtgactactgggcgcgggagtcctcaggacttgaagctgtcaggtcagagggggcgtccacctttaagaccatgttttaaccctaatgaatgaaggcacaagcagcccctgaaactcgtgtattcagagagagttgttctttctggccatatggagggttgggtaccctgatgggctttcccatggtaaaacagctcgatcctggataacacatacttttaatgcaatttttgggttcactgtaaattacaggaatctttgaagacagttccttcaaccctcccctccttttcccacaaaattatattgagctggaactggaggggaaagcagtggagaaaaacacagcgctaaaggcaagattccctgagtgcaaatgataccagcactacagccagtaaatagccttaggccagcagcagcataggagagctgagcctgcaactctaggttaagcccagccccaaaaagttaaagtggctactggtccttttataaagccctagtaaataaaaaactaaaaaattaaaaataaaaactaaagtggctgctggtcagtagcactccttgccttcctaaagaggtaaaccaaattctctttcaagcagtggttttcatactccagtgtgtgtcagaatcctctgtagggcttgttaaatacaggttactgggcctcactttcagcttttctcatttagcgagtctgggatgggggctctagaacttgcatttcttttttttttttttttttgagatggagtctcgctctgttgcccaggctggagtgcagtggagcaatcttggctcactgtgacctctgcttcccgggttcaagcaattctcctgcctcagcctcctgagtagctgggattacaggcacgtgccaccacgcctggctaatttttgtatttttagtagagacggggtttcactatgttggtcaggctggtctcgaactcctgacctcatgatctgcccactcggcctcccaaagtgctgggattacaggcatgagccacagtgcccggccctagaacttccatttctaaaaaattcccaggtgctgtttattgtgcttgtccaggaaccacactttgaaaaccactgctagagcaggaaaggtaaagatcaaacaaacgtgaactcacaactgaagaaaatcagatatggaagaaaataagccaccacgagtgagagtcaggaaaatcaatcaccaacagatttagatcccaaggcacttgatacattggaactattaggtatagaatataaaataactatgaaatatttaaaaatatgaaatgtagaatcacaaaatgagataagaagaaactctaaattgaccaggcaaatttgaaaaagaacacgtacagatattttagaaaagaaaacatagttgttaaaatgaaaaactcaagggatgtgttaaatagcagatgagacatagctagagggagaattaatgagctggaaaatagatctgaaggaattcattctcatacccccactcattcactcttccaataaacatatagtacctattatatgctaagaggtgtgccaggccatgggaataaagagatgaataaagacatattcactgcccttgaggggaaatcagccatgtatatactaaaagatataataaagaatcctggtgccatattaggtttttcatcaaaagctatggtggcacaagagatggagtggtaaactctttctgggacattaggaaagacttcttttaggaggtgacctaatgccattagcataaaatccaaactcttcccaagcctaccaggccctgtgtgatctatcgctgcctatttcactctagcttcatcttatgcctctcttgtccacgcttactgagtgctagtcacatgaaacttctttaagtttcaggaaaactctatatttagatctgtccaatatgatagtcattagctgcatgtggctgttgaacatttgaaatataactagtgcaaattgagttatgctatgcatgtgaaatatataccagattttggtaacttagcacaaaaaagaatgtaaaacattccattaataaggcttttatatcatatggtgataatattttggatatattcagtaaaatgaaatatatcattaaaattaatgtcaactgtttctttttacttttttaatgtggtcactggaaacatttaaattatgcatagggcctttcttttatttctgttggacagcaccattgcaaactctgtccccatctcatggcctctgaatatgcagtctccttgacttgcagtgttctctctctccctctttctctggtgggccatctggttgtttagatattagtttaaaggtgacctaattcagggacatttctttggacaccctacccaaggaggtctctgctatttctctctagcctagtgctgtgtattttgtacttggtgcttacttacaaatggcacttactttatttccttgtgtattgccttgcctcatccactggagtctagtgaccagacagtaagcctcaggaaggctgggacctggtgggtcttagtccccctgtttccaagtatctggtgcagagtccaagctcactgtggacagagtgaatgtccccactagcccagggcttggagtggggcaaggttgttggtgatatggcttcctctcccttcctgccctggctaggccctggagcgactgattcacccccagctctgtgagctgtgcatagaggcgctggagcggcacgtcatccaggctgtcaacaccagccccgagcggggaggcgaggaggccctgcatgccttcctgctcgtgcactccaagctgctggcattctactctaggtgagctcaaggtctggcatgtggtggctaaaggctccctggccttctcactcccctatggcctctgcctgaaaagcaccacctgcccagccaagaatcacctcctccatgaagcctgaaaccttcccagatttgattctccaacctttttcagctcacccatttctctgtatcattccttcctggaacactgtcttagagtctcaatctagaacttccttttatgttgttcttggtccctggtgctttcccactgctaaatcattttcttttctttgttctatacaaccaagttttattttgaaatttgacgagttaattaattgtatttgtgccttgcccatctccagaagtacattgctccttgagggcaggggccaggctccacactcctttaacctgcctgccccgtctcctgctgggcatgtgctgatgggtggccatgctcctgtgtctgcagccacagtgccagctccctgcgcccggccgacctgcttgccctcatcctcctggttcaggacctctaccccagcgagagcacagcagaggacgacattcaggtctcagggcagctttctgggcagagggaggccattagggaggtagttcagaaaacctgcctgaagatggtgggcaggctccccctggggactccatgttttctaagtcacaattctgggtgtgtggttgggcgtgacttctttcccactgctttcagatgtaaggggaattctggagtgcacatggtccagtgggttaaaagtgcagatttttcaagtcagccatggttcgaaacccagcttcaacacctggctgtgtgagctgagcccgtacttgcacccccagagcctcagtgcccttatctgtgcaatgggaataacaaagcatctacttctcaggggtatttggagggacaaaaggggtggttcccacagaacctggcactgcctggggcatagtgaatgcttagtgagtgtcagccaccaccatcgctgttgacctcatcaccaggggtagtggtgggttggataccattgtgttggaatttctcgaatttccacagaacagaccgcctagaatcgaatccctgggaagtctgaggaccacacacccaggactgcacccggaacgggtggaggggtggaggggtggaggcttctctgtgaagcgctgggaggcagaaggggtggagggagccaggtcagataggagctaaccagcctctcccctgccctgcacagccttccccgcggagggcccggagcagccagaacatccccgtgcagcaggcctggagccctcactccacgggcccaactggggggagctctgcagagacggtgtgtgctgtgcacttcgtggagtcaggggcaggaggggatcggcctctgcaggcgaccaggcctttcccatccctcctgggagagcagggacagggttgagccagctgggagagcctctcaacctgagccaccttctccattccaggagacagacagcttctccctccctgaggagtacttcacaccagctccttcccctggcgatcagagctcaggtgaggaccggaggaaagcaggaggaaacaatagctagctgcgagcgacaggcagcccaggacatctgtcttaggctccagtggacccccgtgcctcctaaggcttgagtgcaggtacccgtgttcctagagcacaggacgctgtctgcggctccccatcttccctgccagctccagcctgaactcaaggattgttaagaccactccactgatccctaaagctgttgatgacaagttgattcatttaaaacttctgtacatgcattctcagactcatcttttttgtaattaaaattaaaaattaagttaaatttagtaataatcatctaatttctatacattctaaaatatattcagcatctgtagtttatactttgtttctccaaagtatgtgggtaaacaataaaaaaaaactataaata

SEQ ID NO: 12403 - DNA, 1580 bp, Homo sapiens
gcggggcgctgtgcgcgccgcgatccggtacgtgggcctccgggctgtcccctctgggggcggcgatcctccctccggagccccccttcaaccctcccggaagtgagcatttgcaggaccagggatgctgtgctgctctcccatgagccagtcaccgagtcggtctgctgcagccctttctgaacctctggccgtctggatgctccactgtgcttgccaagatgaagtgcgtcttggtggccactgagggcgcagaggtcctcttctactggacagatcaggagtttgaagagagtctccggctgaagttcgggcagtcagagaatgaggaagaagagctccctgccctggaggaccagctcagcaccctcctagccccggtcatcatctcctccatgacgatgctggagaagctctcggacacctacacctgcttctccacggaaaatggcaacttcctgtatgtccttcacctgtttggagaatgcctgttcattgccatcaatggtgaccacaccgagagcgagggggacctgcggcggaagctgtatgtgctcaagtacctgtttgaagtgcactttgggctggtgactgtggacggtcatcttatccgaaaggagctgcggcccccagacctggcgcagcgtgtccagctgtgggagcacttccagagcctgctgtggacctacagccgcctgcgggagcaggagcagtgcttcgccgtggaggccctggagcgactgattcacccccagctctgtgagctgtgcatagaggcgctggagcggcacgtcatccaggctgtcaacaccagccccgagcggggaggcgaggaggccctgcatgccttcctgctcgtgcactccaagctgctggcattctactctagccacagtgccagctccctgcgcccggccgacctgcttgccctcatcctcctggttcaggacctctaccccagcgagagcacagcagaggacgacattcagccttccccgcggagggcccggagcagccagaacatccccgtgcagcaggcctggagccctcactccacgggcccaactggggggagctctgcagagacggagacagacagcttctccctccctgaggagtacttcacaccagctccttcccctggcgatcagagctcaggtgaggaccggaggaaagcaggaggaaacaatagctagctgcgagcgacaggcagcccaggacatctgtcttaggctccagtggacccccgtgcctcctaaggcttgagtgcaggtacccgtgttcctagagcacaggacgctgtctgcggctccccatcttccctgccagctccagcctgaactcaaggattgttaagaccactccactgatccctaaagctgttgatgacaagttgattcatttaaaacttctgtacatgcattctcagactcatcttttttgtaattaaaattaaaaattaagttaaatttagtaataatcatctaatttctatacattctaaaatatattcagcatctgtagtttatactttgtttctccaaagtatgtgggtaaacaataaaaaaaaactataaata

SEQ ID NO: 12404 - DNA, 7675 bp, Homo sapiens
cgactgattcacccccagctctgtgagctgtgcatagaggcgctggagcggcacgtcatccaggctgtcaacaccagccccgagcggggaggcgaggaggccctgcatgccttcctgctcgtgcactccaagctgctggcattctactctaggtgagctcaaggtctggcatgtggtggctaaaggctccctggccttctcactcccctatggcctctgcctgaaaagcaccacctgcccagccaagaatcacctcctccatgaagcctgaaaccttcccagatttgattctccaacctttttcagctcacccatttctctgtatcattccttcctggaacactgtcttagagtctcaatctagaacttccttttatgttgttcttggtccctggtgctttcccactgctaaatcattttcttttctttgttctatacaaccaagttttattttgaaatttgacgagttaattaattgtatttgtgccttgcccatctccagaagtacattgctccttgagggcaggggccaggctccacactcctttaacctgcctgccccgtctcctgctgggcatgtgctgatgggtggccatgctcctgtgtctgcagccacagtgccagctccctgcgcccggccgacctgcttgccctcatcctcctggttcaggacctctaccccagcgagagcacagcagaggacgacattcaggtctcagggcagctttctgggcagagggaggccattagggaggtagttcagaaaacctgcctgaagatggtgggcaggctccccctggggactccatgttttctaagtcacaattctgggtgtgtggttgggcgtgacttctttcccactgctttcagatgtaaggggaattctggagtgcacatggtccagtgggttaaaagtgcagatttttcaagtcagccatggttcgaaacccagcttcaacacctggctgtgtgagctgagcccgtacttgcacccccagagcctcagtgcccttatctgtgcaatgggaataacaaagcatctacttctcaggggtatttggagggacaaaaggggtggttcccacagaacctggcactgcctggggcatagtgaatgcttagtgagtgtcagccaccaccatcgctgttgacctcatcaccaggggtagtggtgggttggataccattgtgttggaatttctcgaatttccacagaacagaccgcctagaatcgaatccctgggaagtctgaggaccacacacccaggactgcacccggaacgggtggaggggtggaggggtggaggcttctctgtgaagcgctgggaggcagaaggggtggagggagccaggtcagataggagctaaccagcctctcccctgccctgcacagccttccccgcggagggcccggagcagccagaacatccccgtgcagcaggcctggagccctcactccacgggcccaactggggggagctctgcagagacggtgtgtgctgtgcacttcgtggagtcaggggcaggaggggatcggcctctgcaggcgaccaggcctttcccatccctcctgggagagcagggacagggttgagccagctgggagagcctctcaacctgagccaccttctccattccaggagacagacagcttctccctccctgaggagtacttcacaccagctccttcccctggcgatcagagctcaggtgaggaccggaggaaagcaggaggaaacaatagctagctgcgagcgacaggcagcccaggacatctgtcttaggctccagtggacccccgtgcctcctaaggcttgagtgcaggtacccgtgttcctagagcacaggacgctgtctgcggctccccatcttccctgccagctccagcctgaactcaaggattgttaagaccactccactgatccctaaagctgttgatgacaagttgattcatttaaaacttctgtacatgcattctcagactcatcttttttgtaattaaaattaaaaattaagttaaatttagtaataatcatctaatttctatacattctaaaatatattcagcatctgtagtttatactttgtttctccaaagtatgtgggtaaacaataaaaaaaaactataaatattcaaaatggttgaggtgtggtggctcacgcctgtaatcccagcactttgggaggccgaggcgggtagatcacctgaggtcaggagtttgagactagcctggccaacatggcgaaaccccatgtctactaaaaatacaaaaattagccaggtctggtggcaggcgcctgtaatcccagctactcgggaggctgaggcaggagaatcgcttgaacccgggaggtggaggttgcagtgagccaagatcatgccactgcactccagcctgggcgacagagcaagactctgtctcaaaaaaaaaaacaaaacaaaactacaaatattcaaaatgttaacaaaaaatggacaaccttgcttagagaagtagataaaccaaaatccagactgttgtggtcactatgaataaacattacatttatttctgaagttcttaggtaaaaaaaaaaaaaaaaaagggtcctgtggtccctccacatcatctgatggaagaaagaaggccagggtttcaggaggagaaacctactggggactaggatttgaaaggaatttattatgtggctgcttttaacccaaccctggcacattggaatcaccaggcagcttcagccagcccaattaagttacagtctgtgggcctgggacccaggtgtgaatacttctaggaaattttcccaggtgagttcagtgtgcctcgggtgcaaaccactgctgtgcacagatttaggttacagcatgctttgccccctggctgcatattgaactcacctggggatctttaacaattattgaagctgagcctgtacccggagatgctgactcagttggtctgagctatgccctgggcgtcaggattttgtaaaagtccccaaatgattttcgtgtgtagccaaggttgacaaccactgggttagatgcttttaactttaggtctggctagaagcctaggaccccctgagactgtgtgtgaactcactgatgcctgtgcattcctggggtgagggttcctagctatcttcagattccctgagctcttgatgagcctgagacctgttgagaagcagagttctgggtaatctccgaagttcctcttaccactcccttcctcattcatcaccatcttcctcccagtccctctctcttgatagtggttttttatgccttaaaactgtaaaaaataatgctgttccaccgtgcagagaactcacaacttacaaatggtttgggttgcactcatccatttgtaaatcaggtgtttaagatgtaggaacacacttcccccaaagaaacatgattataaatgagggttgtttgcaatgaaatataagaggtaacagtattattacagacacataatatttcagatatgtggtgggttcagtaggtttttgtgcgttatattaggaaggaaatccacctcaattcccagcacacagcaggtgctcagtaagagcttgccggttgaataaatgaatgggcaaacgtggactgtgtgtgctgactcctgaggggcgggttgaggcctgaaggaatacaggggacagaacaaggaggggattgggggcaagggaggggggaggaagatgcccctctaccccctgaccaccattaccaaacatgtcctcaggagcttgattctcagcagctggctctgggggcagcttctctgccaggcccaggccgccttagccctggtactgcagagttcaccttgtgcctgccaacttaggatgaaggggtgttgccccagccacattagcacccctgcgtggagctggcagccaagggctgaggttgtggggggcacctgggccccctaccccatgctgttgagccattgcttacatctcatggtacttacatcgttatgttattacctgtggcctgcaggtagcaccatctggctggaggggggcaccccccccatggatgcccttcaggtgagtttctcctgtgcctgcctgggcgccagctgatctgagatgccgcagtgagtattgggggctctgagggtttcgcctccagggtgactctacccgtgccagccctcctcctgcccaccccagggctggtcagtgcaggtgcctgtcctggtgccagagctcagcccagaggcagggtccaggaatgggctgtgaggggtggcgaacttgcccctcccctcccccaggtgctgtccctcagctccattgttcttgggagtgaaagtccaatagaattttttttttaagtgagcatgtatatttattgtagaaaaatcgggaaatacaaaagtaaactataaaaaagggaataaaaattactcttaatcccgtcctcaaaatgagattaacatcttggggtgtttccttctagtctttttttcctatgactttacacacacacacacacacacacacacacacacactacatatgtacacatgtgtatttttaaaatcagatttggatactaacgtgtttcattatacttttttatttaaacatttttccatttcctaagcactcccacagtgtggtttgtaatgattggtagtccatcacatgcatatgttatttatctagcaaatccccaggaaaatcgcgtcatgtgtccagtgtttgctgttaggtatgacactgaagaggaatttttgtggcatctctcatgatttccttaattctataattttttgcactaaaggctttcttgcttagatccctctgtaaggctggagccttgcccatttggtcactttatgcctcagtttccccaatttgagtggctgttgggatgttctgagggtgattgaaatgatacaatgttgaacattagatacctccatctgttgcaaatgtggggaggggacctctccccgtccactccccatccacgagtgtttccctgccttctcggtcctctgtgccaccacccagcccctctgcccctgcccactgccctgcttggcacccgggccagactctgggcagaaaggcccaggagcagctgagggagaggggcaacagcgaaactggagctgcgagggcaggttcagcagagtgcaggaatttaaaaactggagtttcttggagctaaaaatgattatttcttgtggttcacagatagggccgcaatgggtgggtccaacttagggatcccacctctcactgcagctcttcttcctctgtagatagcagaggacaccctccaaacactggttccccactgccctgtgccttccggccccagaaggatcttcctggatgccaacgtgaaggaaagctactgccccctagtgccccacaccatgtactgcctgcccctgtggcagggcatcaacctggtgctcctgaccagggtaggagagcccctcaccctgccctgatgatgcttagggttggcacgtcttccccaggggcagccccgttcacccgcctctcggcccttaccctcagagccccagcgcgcccctggccctggttctgtcccagctgatggatggcttctccatgctggagaagaagctgaaggaagggccggagcccggggcctccctgcgctcccagcccctcgtgggagacctgcgccagaggatggacaagtttgtcaagaatcgaggggcacaggagattcaggtgagacccaagttccagtcctccccacctggggaagaggcagggctggcagcagggtacatccggtccacagcagctgaggggccaatgggcctgggttcctgtccgggctccacctcccccgggcctacgatccttgttttccctattatgaaatgatattgaaaacttagctgctttttggttttcagaatctttttatgtgtgtttggcagaatacgaattataattccccttttttaggtgtggaaactaaggcttagacaagttttaacttggccaagattatgcagctcatgagcagtggagccagagcccggatgcagtgagcaagtgcagtcgggatccgcccgtcacgggcttcctctctgcagcggggctgtgtccccgggctcacagggcaacacagggatgtgcaggtcacggctccaccccacccccagtgagcttagggcccaggtggggagctgagaccaggagacaggtgagaatgtgcaggcagtagaaacagtccatcaccccgtgctctgacaaagcccagatcagggcctggacggcagtggggctggtggggcttgactctggatttaagcagtggaggcgcctggtgtttgaggagctgggacccattgtggctggagtgcctgtcagtctgaaggctgcaggattggctggaggaggcagtgccacatcccgcagtgcctcagggtgtcctaaggagcactttcactagaacaccaagttcttctgctttatagagatcccgtgaggccgccccctgcatggctaccccatgcccaccccataccctcccagcttctgcagcagcacctcctccgcacaccccagccgctgccctgtgtgtgccccccaccccgaggggctggcctggttgctgtgacggtgctactatgtgtgcctgtgcccgtcagacagcgagcccctggaaactgccctttaaataaacgctgctgagtgactagaacatggcacactgaagtctgcagggggctggtggggcctgccagggtagcctgcattggccagaagggcagatttgtctgggggccctgtgccctctcagagcctgatctgagaaggactttggcctggacctcactggaaatatggtcgggatgcaaacctgccccctgtcttccttccagagcacctggctggagtttaaggccaaggctttctccaaaagtgagcccggatcctcctgggagtgagtggtgggcctcaggacaaggggtgggtcgtgtgcccaggggactgttccctgggaggccacatctcctccaccactgcccttcatttatcagcaaaataatttcaagaaaggagatttcttcccacatacgtggagcaccgcgtggagaagctgggaagctccttcccattgcctgatcagctgtggctgcccccttaggtctttccatctgtctgtcctgggtgcaggagcagggtggtccacctgggagtgaggggctccccaggttggtctgtcctgggtacaagagtggggtggtccacaagggggaagggctccccaggtctgtctgtcctgggtgcaggaacaaggtggtccacacagggcgaggggctcccctaggtcccttctgctgtaatgccctcctctctcgtgctcaggctgctccaggcatgtgggaagctgaagcggcagctctgcgccatctaccggctgaactttctgaccacagcccccagcaggggaggcccacacctgccccagcacctgcaggaccaagtgcagaggctcatgcggtaagtgcagtgcggccccctgggtggccagggcagggtctggggcccgtacttccttcacgcagcccgagcttccctcggcagggagaagctgacggactggaaggacttcttgctggtgaagagcaggaggaacatcaccatg

SEQ ID NO: 12405 - DNA, 978 bp, Homo sapiens
cgactgattcacccccagctctgtgagctgtgcatagaggcgctggagcggcacgtcatccaggctgtcaacaccagccccgagcggggaggcgaggaggccctgcatgccttcctgctcgtgcactccaagctgctggcattctactctagccacagtgccagctccctgcgcccggccgacctgcttgccctcatcctcctggttcaggacctctaccccagcgagagcacagcagaggacgacattcaggagacagacagcttctccctccctgaggagtacttcacaccagctccttcccctggcgatcagagctcaggtagcaccatctggctggaggggggcaccccccccatggatgcccttcagatagcagaggacaccctccaaacactggttccccactgccctgtgccttccggccccagaaggatcttcctggatgccaacgtgaaggaaagctactgccccctagtgccccacaccatgtactgcctgcccctgtggcagggcatcaacctggtgctcctgaccaggagccccagcgcgcccctggccctggttctgtcccagctgatggatggcttctccatgctggagaagaagctgaaggaagggccggagcccggggcctccctgcgctcccagcccctcgtgggagacctgcgccagaggatggacaagtttgtcaagaatcgaggggcacaggagattcagagcacctggctggagtttaaggccaaggctttctccaaaagtgagcccggatcctcctgggagctgctccaggcatgtgggaagctgaagcggcagctctgcgccatctaccggctgaactttctgaccacagcccccagcaggggaggcccacacctgccccagcacctgcaggaccaagtgcagaggctcatgcgggagaagctgacggactggaaggacttcttgctggtgaagagcaggaggaacatcaccatg

SEQ ID NO: 12406 - DNA, 3703 bp, Homo sapiens
aagcgcgcccgggctcctgcaggcggggcgctgtgcgcgccgcgatccggtacgtgggcctccgggctgtcccctctgggggcggcgatcctccctccggagccccccttcaaccctcccggaagtgaggaccagggatgctgtgctgctctcccatgagccagtcaccgagtcggtctgctgcagccctttctgaacctctggccgtctggatgctccactgtgcttgccaagatgaagtgcgtcttggtggccactgagggcgcagaggtcctcttctactggacagatcaggagtttgaagagagtctccggctgaagttcgggcagtcagagaatgaggaagaagagctccctgccctggaggaccagctcagcaccctcctagccccggtcatcatctcctccatgacgatgctggagaagctctcggacacctacacctgcttctccacggaaaatggcaacttcctgtatgtccttcacctgtttggagaatgcctgttcattgccatcaatggtgaccacaccgagagcgagggggacctgcggcggaagctgtatgtgctcaagtacctgtttgaagtgcactttgggctggtgactgtggacggtcatcttatccgaaaggagctgcggcccccagacctggcgcagcgtgtccagctgtgggagcacttccagagcctgctgtggacctacagccgcctgcgggagcaggagcagtgcttcgccgtggaggccctggagcgactgattcacccccagctctgtgagctgtgcatagaggcgctggagcggcacgtcatccaggctgtcaacaccagccccgagcggggaggcgaggaggccctgcatgccttcctgctcgtgcactccaagctgctggcattctactctagccacagtgccagctccctgcgcccggccgacctgcttgccctcatcctcctggttcaggacctctaccccagcgagagcacagcagaggacgacattcagccttccccgcggagggcccggagcagccagaacatccccgtgcagcaggcctggagccctcactccacgggcccaactggggggagctctgcagagacggagacagacagcttctccctccctgaggagtacttcacaccagctccttcccctggcgatcagagctcaggtagcaccatctggctggaggggggcaccccccccatggatgcccttcagatagcagaggacaccctccaaacactggttccccactgccctgtgccttccggccccagaaggatcttcctggatgccaacgtgaaggaaagctactgccccctagtgccccacaccatgtactgcctgcccctgtggcagggcatcaacctggtgctcctgaccaggagccccagcgcgcccctggccctggttctgtcccagctgatggatggcttctccatgctggagaagaagctgaaggaagggccggagcccggggcctccctgcgctcccagcccctcgtgggagacctgcgccagaggatggacaagtttgtcaagaatcgaggggcacaggagattcagagcacctggctggagtttaaggccaaggctttctccaaaagtgagcccggatcctcctgggagctgctccaggcatgtgggaagctgaagcggcagctctgcgccatctaccggctgaactttctgaccacagcccccagcaggggaggcccacacctgccccagcacctgcaggaccaagtgcagaggctcatgcgggagaagctgacggactggaaggacttcttgctggtgaagagcaggaggaacatcaccatggtgtcctacctagaagacttcccaggcttggtgcacttcatctatgtggaccgcaccactgggcagatggtggcgccttccctcaactgcagtcaaaagacctcgtcggagttgggcaaggggccgctggctgcctttgtcaaaactaaggtctggtctctgatccagctggcgcgcagatacctgcagaagggctacaccacgctgctgttccaggagggggatttctactgctcctacttcctgtggttcgagaatgacatggggtacaaactccagatgatcgaggtgcccgtcctctccgacgactcagtgcctatcggcatgctgggaggagactactacaggaagctcctgcgctactacagcaagaaccgcccaaccgaggctgtcaggtgctacgagctgctggccctgcacctgtctgtcatccccactgacctgctggtgcagcaggccggccagctggcccggcgcctctgggaggcctcccgtatccccctgctctaggccaaggtggccgcagtctgcctttgcatcctgtcctccagccacccttgcttgccactgttccccatgacgagagcctcctgtctgcagtggccatcctgaggatagggcagagtgcccagggtggccccagggcttctaaaaccccacctagaccaccctccatgtcaggtactgagcaaggccccagatccttctctctggaggaagagggaagcccaggggtcctgtttgtaaaacaacggtggcaacagctcctcttccagagctgcctctgcctttatcctgggagatggggaggaagccccatctctgctgttccctgcgtggaggaagcccacccagcaagctctctcctaccccaggtaaaaggtgctcctttgcctgggtttgaattccagcgctgccacttcctctctgcacctcctggcaagtttcttctattccccacgtttaaagcgatggcacctccgtcccagggtggtgtgaggattacccagtgtggtaggtgctcaataaatgttggtcattgttatcactgaagcccaacatgctagtgcttctagacccttctgtcagtgctgataagcccttgctaagtcccagccccttcatgcttggctggcgtctgccctagggctggggttctcaagcccctggccctggcccagagatttggattcccttggcggccgtggagcccagcctttgatgtctttcaaagcttctgtggtgcgccctggattgagaaccaccacccgaggggtacagcccctctcttccaaccgagaagttcctgtcccagaatggacccagggacaagagaccctgagagccctgggactgggagtgtctgctcctctgaggccaggaggccggtgctgggccagagaggacggcgtggcgaaagtcagcgtccactgcagcacaggatcagatggccgtgtgctgtgcatgcaggagcctcgccttctgtgtctttagtcttgagccaaaatttgctcaaagactgatctcttccttgcagggaacagctttggggctgggggaactagaacccacatgttggtctaaaccctgagaaggtggcagtgaggaagtatcccctcaggtgactggatctgtgttcctccttaacatcatctgatggaatggcaatgaaaagcgtggattgtggaaaatacagaaaaacataaaggaaaaaactccaatcccctgagcccaccactgttcaggacccctgcttttgtcacctactatttccctttagtttttagcagcggctggatgtgatatgtctagtttaaccagtccccttgatctttctatataataaataacacaggagtgaacatcctgaatcaga

SEQ ID NO: 12407 - DNA, 4936 bp, Homo sapiens
gctgcggcccccagacctggcgcagcgtgtccagctgtgggagcacttccagagcctgctgtggacctacagccgcctgcgggagcaggagcagtgcttcgccgtggaggtgactactgggcgcgggagtcctcaggacttgaagctgtcaggtcagagggggcgtccacctttaagaccatgttttaaccctaatgaatgaaggcacaagcagcccctgaaactcgtgtattcagagagagttgttctttctggccatatggagggttgggtaccctgatgggctttcccatggtaaaacagctcgatcctggataacacatacttttaatgcaatttttgggttcactgtaaattacaggaatctttgaagacagttccttcaaccctcccctccttttcccacaaaattatattgagctggaactggaggggaaagcagtggagaaaaacacagcgctaaaggcaagattccctgagtgcaaatgataccagcactacagccagtaaatagccttaggccagcagcagcataggagagctgagcctgcaactctaggttaagcccagccccaaaaagttaaagtggctactggtccttttataaagccctagtaaataaaaaactaaaaaattaaaaataaaaactaaagtggctgctggtcagtagcactccttgccttcctaaagaggtaaaccaaattctctttcaagcagtggttttcatactccagtgtgtgtcagaatcctctgtagggcttgttaaatacaggttactgggcctcactttcagcttttctcatttagcgagtctgggatgggggctctagaacttgcatttcttttttttttttttttttgagatggagtctcgctctgttgcccaggctggagtgcagtggagcaatcttggctcactgtgacctctgcttcccgggttcaagcaattctcctgcctcagcctcctgagtagctgggattacaggcacgtgccaccacgcctggctaatttttgtatttttagtagagacggggtttcactatgttggtcaggctggtctcgaactcctgacctcatgatctgcccactcggcctcccaaagtgctgggattacaggcatgagccacagtgcccggccctagaacttccatttctaaaaaattcccaggtgctgtttattgtgcttgtccaggaaccacactttgaaaaccactgctagagcaggaaaggtaaagatcaaacaaacgtgaactcacaactgaagaaaatcagatatggaagaaaataagccaccacgagtgagagtcaggaaaatcaatcaccaacagatttagatcccaaggcacttgatacattggaactattaggtatagaatataaaataactatgaaatatttaaaaatatgaaatgtagaatcacaaaatgagataagaagaaactctaaattgaccaggcaaatttgaaaaagaacacgtacagatattttagaaaagaaaacatagttgttaaaatgaaaaactcaagggatgtgttaaatagcagatgagacatagctagagggagaattaatgagctggaaaatagatctgaaggaattcattctcatacccccactcattcactcttccaataaacatatagtacctattatatgctaagaggtgtgccaggccatgggaataaagagatgaataaagacatattcactgcccttgaggggaaatcagccatgtatatactaaaagatataataaagaatcctggtgccatattaggtttttcatcaaaagctatggtggcacaagagatggagtggtaaactctttctgggacattaggaaagacttcttttaggaggtgacctaatgccattagcataaaatccaaactcttcccaagcctaccaggccctgtgtgatctatcgctgcctatttcactctagcttcatcttatgcctctcttgtccacgcttactgagtgctagtcacatgaaacttctttaagtttcaggaaaactctatatttagatctgtccaatatgatagtcattagctgcatgtggctgttgaacatttgaaatataactagtgcaaattgagttatgctatgcatgtgaaatatataccagattttggtaacttagcacaaaaaagaatgtaaaacattccattaataaggcttttatatcatatggtgataatattttggatatattcagtaaaatgaaatatatcattaaaattaatgtcaactgtttctttttacttttttaatgtggtcactggaaacatttaaattatgcatagggcctttcttttatttctgttggacagcaccattgcaaactctgtccccatctcatggcctctgaatatgcagtctccttgacttgcagtgttctctctctccctctttctctggtgggccatctggttgtttagatattagtttaaaggtgacctaattcagggacatttctttggacaccctacccaaggaggtctctgctatttctctctagcctagtgctgtgtattttgtacttggtgcttacttacaaatggcacttactttatttccttgtgtattgccttgcctcatccactggagtctagtgaccagacagtaagcctcaggaaggctgggacctggtgggtcttagtccccctgtttccaagtatctggtgcagagtccaagctcactgtggacagagtgaatgtccccactagcccagggcttggagtggggcaaggttgttggtgatatggcttcctctcccttcctgccctggctaggccctggagcgactgattcacccccagctctgtgagctgtgcatagaggcgctggagcggcacgtcatccaggctgtcaacaccagccccgagcggggaggcgaggaggccctgcatgccttcctgctcgtgcactccaagctgctggcattctactctaggtgagctcaaggtctggcatgtggtggctaaaggctccctggccttctcactcccctatggcctctgcctgaaaagcaccacctgcccagccaagaatcacctcctccatgaagcctgaaaccttcccagatttgattctccaacctttttcagctcacccatttctctgtatcattccttcctggaacactgtcttagagtctcaatctagaacttccttttatgttgttcttggtccctggtgctttcccactgctaaatcattttcttttctttgttctatacaaccaagttttattttgaaatttgacgagttaattaattgtatttgtgccttgcccatctccagaagtacattgctccttgagggcaggggccaggctccacactcctttaacctgcctgccccgtctcctgctgggcatgtgctgatgggtggccatgctcctgtgtctgcagccacagtgccagctccctgcgcccggccgacctgcttgccctcatcctcctggttcaggacctctaccccagcgagagcacagcagaggacgacattcaggtctcagggcagctttctgggcagagggaggccattagggaggtagttcagaaaacctgcctgaagatggtgggcaggctccccctggggactccatgttttctaagtcacaattctgggtgtgtggttgggcgtgacttctttcccactgctttcagatgtaaggggaattctggagtgcacatggtccagtgggttaaaagtgcagatttttcaagtcagccatggttcgaaacccagcttcaacacctggctgtgtgagctgagcccgtacttgcacccccagagcctcagtgcccttatctgtgcaatgggaataacaaagcatctacttctcaggggtatttggagggacaaaaggggtggttcccacagaacctggcactgcctggggcatagtgaatgcttagtgagtgtcagccaccaccatcgctgttgacctcatcaccaggggtagtggtgggttggataccattgtgttggaatttctcgaatttccacagaacagaccgcctagaatcgaatccctgggaagtctgaggaccacacacccaggactgcacccggaacgggtggaggggtggaggggtggaggcttctctgtgaagcgctgggaggcagaaggggtggagggagccaggtcagataggagctaaccagcctctcccctgccctgcacagccttccccgcggagggcccggagcagccagaacatccccgtgcagcaggcctggagccctcactccacgggcccaactggggggagctctgcagagacggtgtgtgctgtgcacttcgtggagtcaggggcaggaggggatcggcctctgcaggcgaccaggcctttcccatccctcctgggagagcagggacagggttgagccagctgggagagcctctcaacctgagccaccttctccattccaggagacagacagcttctccctccctgaggagtacttcacaccagctccttcccctggcgatcagagctcaggtgaggaccggaggaaagcaggaggaaacaatagctagctgcgagcgacaggcagcccaggacatctgtcttaggctccagtggacccccgtgcctcctaaggcttgagtgcaggtacccgtgttcctagagcacaggacgctgtctgcggctccccatcttccctgccagctccagcctgaactcaaggattgttaagaccactccactgatccctaaagctgttgatgacaagttgattcatttaaaacttctgtacatgcattctcagactcatcttttttgtaattaaaattaaaaattaagttaaatttagtaataatcatctaatttctatacattctaaaatatattcagcatctgtagtttatactttgtttctccaaagtatgtgggtaaacaataaaaaaaaactat

SEQ ID NO: 12408 - DNA, 857 bp, Homo sapiens
gctgcggcccccagacctggcgcagcgtgtccagctgtgggagcacttccagagcctgctgtggacctacagccgcctgcgggagcaggagcagtgcttcgccgtggaggccctggagcgactgattcacccccagctctgtgagctgtgcatagaggcgctggagcggcacgtcatccaggctgtcaacaccagccccgagcggggaggcgaggaggccctgcatgccttcctgctcgtgcactccaagctgctggcattctactctagccacagtgccagctccctgcgcccggccgacctgcttgccctcatcctcctggttcaggacctctaccccagcgagagcacagcagaggacgacattcaggagacagacagcttctccctccctgaggagtacttcacaccagctccttcccctggcgatcagagctcaggtgaggaccggaggaaagcaggaggaaacaatagctagctgcgagcgacaggcagcccaggacatctgtcttaggctccagtggacccccgtgcctcctaaggcttgagtgcaggtacccgtgttcctagagcacaggacgctgtctgcggctccccatcttccctgccagctccagcctgaactcaaggattgttaagaccactccactgatccctaaagctgttgatgacaagttgattcatttaaaacttctgtacatgcattctcagactcatcttttttgtaattaaaattaaaaattaagttaaatttagtaataatcatctaatttctatacattctaaaatatattcagcatctgtagtttatactttgtttctccaaagtatgtgggtaaacaataaaaaaaaactat

SEQ ID NO: 12409 - DNA, 2218 bp, Homo sapiens
tgcccccacgctaactggagggtagtccatccatccaataatgatttattgttgagcctcctgctctgagccaaggcagtgcccgggtactaggagaggcccctggcactcacggagcttctcggctgtgccctttccttccttcggaggtgagagctgcccaggcagaccaaggctgggagagtggtgatgcttgctgtcttttccccaggtctggtctctgatccagctggcgcgcagatacctgcagaagggctacaccacgctgctgttccaggagggggatttctactgctcctacttcctgtggttcgagaatgacatggtaggtgaggctgagtccctgggccaggacgggccacacacacttcccgctctgtaactcttggattcctttcttctgaattgttgtctgtctgtctcatcttctcttcttgttgctggtaagcccagcaggttgggagccagagttcagaggtcacattttcacatgggcgtttaactgctttgtgatccctctgcccagctgtctggcaaactcttgccattgtccacgtggcatccaggcacacatgtgagcagaaaggcacatgccccactgtgagaaatgcgactcagaccacacactttgtcgctagtgcttccatgtcgccagcgtcacatgccaagtgtggcacatggtcatccctgtggcataggcccctgaactcaagagcataggcccctgcttgaagcagtgagccaggctgcctgaggagacactggtggtgtggctcggggccctggcctccaggccctgcactgcttcttctgggcctcactgttactgcagagtagggtccagtggggggagcttactatcattgtgtctccatccatacaacggggtcagggatccctgccccagccactgcacagggctgtgaggggtgcagtggctgggactcctctcctcctgtctctccctcctctctgtcttttccctttcttcgctttcctcctgtttctcttttatttgcatctcgcttgtcaccataagtggttgttccagctctcaggagtggttgttccagctctcaggagtgttcctcctccctcgcagcccttggtctctgggtccctgcactcctgtgccttcccctgcccccaccctgcactctttgttcactgagggtgacagccatccctttccatagggcagggcggttactggggctctccaccactgttctctcagttaccccctcacagccctgtaaagtggctggggcagggattcctgaccccgttgtacggatggagacacaatgatccggagatcagacgccatggccagggccaccgaggctgtaagtgaggaagccggagcccaagctctgctcccccggcctgcaggctcccagctttcctccgtgccctcagaagtgcccaggacgtgtgtacaacagaagtgctagaaaattcctgtgacctttaccttcacttctagggagggacaggagtctgtgtgcttgggtggccccgtggggtgataaagtgaggcagagctgtgggctggagaggccaggtttgaatgccagccacacagcccagccggtgccgtgggggcagccctgcacactagggagtccactccccctgcagggcaggccacggtgcccaggcaagcatcagctaagtgccatgttcatgcctggcacacacggcacgtccagcagatcttaattcccttccccaccttatcccaccctgggaattcccaattctttcagagcagaggcttgggccttttgtgaatgctctgctcttcaagacctgtatgacagccctgcagggtgccctcctgagcgtgtgtttgtggcctgtacaggtccaggtattgacggtaatgagagctaccctgccggcccttgaagctttgtatactttttctctaatgttcataaggtgactgttgtcattctgacttcaaagatgaaaaaacaaggtccaggcattttcccaagcacccagcgcacatgacagagccaagccaggccgcaagcccggtgcgtctgactcaggcccttgcactacccccacacccactgcctccctgtcctccctcctcaggggtacaaactccagatgatcgaggtgcccgtcctctccgacgactcagtgcctatcggcatgctgggaggagactactacaggtgacgctgcgttgggagccact

SEQ ID NO: 12410 - DNA, 431 bp, Homo sapiens
tgcccccacgctaactggagggtagtccatccatccaataatgatttattgttgagcctcctgctctgagccaaggcagtgcccgggtactaggagaggcccctggcactcacggagcttctcggctgtgccctttccttccttcggaggtgagagctgcccaggcagaccaaggctgggagagtggtgatgcttgctgtcttttccccaggtctggtctctgatccagctggcgcgcagatacctgcagaagggctacaccacgctgctgttccaggagggggatttctactgctcctacttcctgtggttcgagaatgacatggggtacaaactccagatgatcgaggtgcccgtcctctccgacgactcagtgcctatcggcatgctgggaggagactactacaggtgacgctgcgttgggagccact

SEQ ID NO: 12411 - DNA, 4540 bp, Homo sapiens
ccgggctcctgcaggcggggcgctgtgcgcgccgcgatccggtacgtgggcctccgggctgtcccctctgggggcggcgatcctccctccggagccccccttcaaccctcccggaagtgaggtagggtccctaggggtcccggagcgggcccactcctagcctcacccactccgggcgtgtggccgtgggccggtcgcttcctcgctcggggccaaagttcctcagccgtgaagaggggtggatgtcacaagtcaagcctccttcccagggtggccgtgaggttcgggggtggggggaggtggggatttggggtgaaactggacagaaactggcgtgctaggcaaacgggagccccgcggcggcgaactgctgactcgctctctccagagactcaggggcagggccgggctccgaaggtgtgggaccccagaaggagctgctgaagacgggaccaagggccacagggaggtttgctggggtccagatggtgaaagtgggcgctgggggtcgccccaggttggccccccgccatctggagctcctttcgtcagtgagtcccctccgagttccctttctagggcaagatagcgaggtgaagcggaagtctcagtgtgacaccggcgaggttctcttcccagcagcctttgggaagcatccccctgtttcgggaatatggcattcgggccaatcatgtgggtgatggagcccgtctcagggttcggctgctaaaggccgaactcgtaacagcagtctctgtggcgggtagtcacttgcctcttactggctcacagtgcttgacttcctaattaagttttctgttgttcctgccctctattcaaatatgaatgattccggaaccagattgattaatcctgttatttgaagaagggaagctgggaaataggaataatgatccccacacctatgtaagaacgcagtttgctaaggttactttgcagcttgcctggtcactcccatgatctaaccctgtagggaggtagagtaggggatgttgctctgtttctccgcaggagtttgaggctcagagaggtttatgggacttggcaaagccaaaactagaacctggtcccagatgcctttcctgttagtttccttccattcatcgtatcatcccaggatccccactcccttcaccgggactgcatcctcaccacctgggatgtgctatgctgtctcccgtcagtcactcctagcaagctccctggggctgcttggggagctctgagtgacccgcagaagtgagagcacttcatgggaacaaaggaggaaggaacaaaagtgggcacctgctctgtgcaaagggctgtgctggccgggttcctattctccattatgggaggtgaggggcaggatcccagatatgttcttagcagactgcctcagggcctggagagaccagggaccacgcagcccttctccagcttgtcctttctcaacgggcagcagtcaagaccagggcatctgcctgccctcatattctctctgttttaagcatttgcaggaccagggatgctgtgctgctctcccatgagccagtcaccgagtcggtctgctgcagccctttctgaacctctggccgtctggatgctccactgtgcttgccaaggtagatgatcttgccccacctggggaggacagggaggcaggcagcatccaccctggggctttgggaggcagatggaatgaggtaggcagtggactgagtgctactgggctctgcacacctgctcatcccctccccagccctgcatcctgaggccacccccatcctgatgcctcatctctccttcacccctcgaatccaggcaggtcatcacagcctgctgcatctttaaagctcctcccagcccccaccaaggggtgagcactcattacctgacacccgcacctagatgaccgccttcatgaccttgacctgcccatctccagccagccggtcacttctccgctcacaaccacagcctccattccatagcccactgctccctaacccatacactctggtcagctttgtcacatgtacctgggagtcccagagcagcctcttcaggtccacccgcctctcccagcaacctccttttcacacctgttgcactctcagtgtctgccttggcattgagtaattctgtgggaataggctgcattccttcttcactgtgctgttatgtctcctggcatttgccataaataccttgggaccagttgcaccaagttagtttgggaggaattcagtaaggaccactaagctggacatggggatgacggaacacaagacctggagatgctgtgatcctcccaagaaaactggaaatccacttgtgtgagagttacagcagagcttcctaatcattgtcatggcttagcgcacataccacatgattatatctgcgtgacaccctgaggcacataagaggatttgaaaccactgcctgaggcctcttagctgcagcagccagcctggagcactgtcctcaccagcctggtcaggctgccccaagttttagaagatcgagggtttgccgcacgcagagggccatggcacacagtgtgggaagctgtattaaagatcttccagtgggtgaatagttaagacatttcttacataatcaagcacagagtgtgtggtgtgtgtgtgtgtggcgggggggtggggaaggagatttgggagggctgaagacactggtggctgtggccctagaagctgcagcctactaggtacaggggctttaggcagcctctgttctcaccatgaacagggagagcagcatttgaatgaaacttctgtggtgctgaagtaaattcaggggctttgaggctcatcttctggagctgttttttgtttgtttgtttgtttgtttgtttgttttttcagacagagtctcgctctgtcacccaggctggagtgcagtggtgtaatctcggctcactgcaacctctgcctcccgggttcaagcaattctcctgcctcagcagttatcccgagtagctgggataacaggcacttgccaccatgcctggctaatttttgtatttttagtagagacggggtttcaccatgttggccaggctggtctcgaactcctgacttcaggtgatccaccccccttggcctcccaaagtgctgggattacaggcgtgagccaccgcgcccagccctggaactgtttttatctgagggagagatatctctggactgcccagagatggaggtgcaccagtgccctccgatccacaccaggcactaactggctgccgtgagcatggcctccctgggcattcggctccatgtctaggccaagacctgggtcccttcctgtgccagtctggttccagtaggccccgtggtgggtctgttgctgtgctgagagggaccagataccacagaggaaagggccccagccttggcatcaaacaggtctgggtccagatcccagctttgccacttcaggctgtgcctgtgtcctgctctctaaaatgggggtacctgaagagttctactttgtccagttgtgagggtgcaacaaaaatggaagtcccttgtgatgcctggtgtgcagaaggggctcactgaatgtttgctgaggttggggtcctcttcgttactcagactgagctcatagatgttggggctggaggctgaccttgaccttgcctttccctggcagatgaagtgcgtcttggtggccactgagggcgcagaggtcctcttctactggacagatcaggagtttgaagagagtctccggctgaagttcgggcagtcagagaatgaggaagaagaggtgagtgcagggtaggcagtcccaggaggggtggataggaaggaaccatacaaaactcccagcaggcagagaggcaggaaaacctgtgttcaccctgtcctgggcagcatgagcagggtgctgggtggggtccagcatccttcacacctagacccttatcctcaaggttggcctcttgatgctctgagctcggtgaccccacccccacaccccaccagtcctctctggactaaatgagggcaagaagaagtcgaattttatcacgtaacagaagaacttggagccatcagtttctgtaacctaaaaagtttaacaaggctgggcgcggtggctcacgcctgtaatcacaacactttgggaagccaaggtgggccagttgcttgagctcagggatttgagaccagcctgggcagcatggcgaaaccctgtctctacaaaaaaaatacaaaaattagccaggtgtggtggtgcgtgcctatagtcccagctacttgggaggttgaggtgggaggatcacttgagtccaggtggtagaggctgcagtgagccgagactgtgcccatgcattccaacctgggcgacagagcaaaaaaaaaaaaaaaaagtttaacgtaagctgaacacgttaattttttaatagctgtattaaggtatgattaacataccataaattgcacatatttaaagtgcataatttgataagctttgatatgtatatacctatgattctatcaca

SEQ ID NO: 12412 - DNA, 922 bp, Homo sapiens
ccgggctcctgcaggcggggcgctgtgcgcgccgcgatccggtacgtgggcctccgggctgtcccctctgggggcggcgatcctccctccggagccccccttcaaccctcccggaagtgagcatttgcaggaccagggatgctgtgctgctctcccatgagccagtcaccgagtcggtctgctgcagccctttctgaacctctggccgtctggatgctccactgtgcttgccaagatgaagtgcgtcttggtggccactgagggcgcagaggtcctcttctactggacagatcaggagtttgaagagagtctccggctgaagttcgggcagtcagagaatgaggaagaagaggttggcctcttgatgctctgagctcggtgaccccacccccacaccccaccagtcctctctggactaaatgagggcaagaagaagtcgaattttatcacgtaacagaagaacttggagccatcagtttctgtaacctaaaaagtttaacaaggctgggcgcggtggctcacgcctgtaatcacaacactttgggaagccaaggtgggccagttgcttgagctcagggatttgagaccagcctgggcagcatggcgaaaccctgtctctacaaaaaaaatacaaaaattagccaggtgtggtggtgcgtgcctatagtcccagctacttgggaggttgaggtgggaggatcacttgagtccaggtggtagaggctgcagtgagccgagactgtgcccatgcattccaacctgggcgacagagcaaaaaaaaaaaaaaaaagtttaacgtaagctgaacacgttaattttttaatagctgtattaaggtatgattaacataccataaattgcacatatttaaagtgcataatttgataagctttgatatgtatatacctatgattctatcaca

SEQ ID NO: 12413 - DNA, 29873 bp, Homo sapiens
ggtacgtgggcctccgggctgtcccctctgggggcggcgatcctccctccggagccccccttcaaccctcccggaagtgaggtagggtccctaggggtcccggagcgggcccactcctagcctcacccactccgggcgtgtggccgtgggccggtcgcttcctcgctcggggccaaagttcctcagccgtgaagaggggtggatgtcacaagtcaagcctccttcccagggtggccgtgaggttcgggggtggggggaggtggggatttggggtgaaactggacagaaactggcgtgctaggcaaacgggagccccgcggcggcgaactgctgactcgctctctccagagactcaggggcagggccgggctccgaaggtgtgggaccccagaaggagctgctgaagacgggaccaagggccacagggaggtttgctggggtccagatggtgaaagtgggcgctgggggtcgccccaggttggccccccgccatctggagctcctttcgtcagtgagtcccctccgagttccctttctagggcaagatagcgaggtgaagcggaagtctcagtgtgacaccggcgaggttctcttcccagcagcctttgggaagcatccccctgtttcgggaatatggcattcgggccaatcatgtgggtgatggagcccgtctcagggttcggctgctaaaggccgaactcgtaacagcagtctctgtggcgggtagtcacttgcctcttactggctcacagtgcttgacttcctaattaagttttctgttgttcctgccctctattcaaatatgaatgattccggaaccagattgattaatcctgttatttgaagaagggaagctgggaaataggaataatgatccccacacctatgtaagaacgcagtttgctaaggttactttgcagcttgcctggtcactcccatgatctaaccctgtagggaggtagagtaggggatgttgctctgtttctccgcaggagtttgaggctcagagaggtttatgggacttggcaaagccaaaactagaacctggtcccagatgcctttcctgttagtttccttccattcatcgtatcatcccaggatccccactcccttcaccgggactgcatcctcaccacctgggatgtgctatgctgtctcccgtcagtcactcctagcaagctccctggggctgcttggggagctctgagtgacccgcagaagtgagagcacttcatgggaacaaaggaggaaggaacaaaagtgggcacctgctctgtgcaaagggctgtgctggccgggttcctattctccattatgggaggtgaggggcaggatcccagatatgttcttagcagactgcctcagggcctggagagaccagggaccacgcagcccttctccagcttgtcctttctcaacgggcagcagtcaagaccagggcatctgcctgccctcatattctctctgttttaagcatttgcaggaccagggatgctgtgctgctctcccatgagccagtcaccgagtcggtctgctgcagccctttctgaacctctggccgtctggatgctccactgtgcttgccaaggtagatgatcttgccccacctggggaggacagggaggcaggcagcatccaccctggggctttgggaggcagatggaatgaggtaggcagtggactgagtgctactgggctctgcacacctgctcatcccctccccagccctgcatcctgaggccacccccatcctgatgcctcatctctccttcacccctcgaatccaggcaggtcatcacagcctgctgcatctttaaagctcctcccagcccccaccaaggggtgagcactcattacctgacacccgcacctagatgaccgccttcatgaccttgacctgcccatctccagccagccggtcacttctccgctcacaaccacagcctccattccatagcccactgctccctaacccatacactctggtcagctttgtcacatgtacctgggagtcccagagcagcctcttcaggtccacccgcctctcccagcaacctccttttcacacctgttgcactctcagtgtctgccttggcattgagtaattctgtgggaataggctgcattccttcttcactgtgctgttatgtctcctggcatttgccataaataccttgggaccagttgcaccaagttagtttgggaggaattcagtaaggaccactaagctggacatggggatgacggaacacaagacctggagatgctgtgatcctcccaagaaaactggaaatccacttgtgtgagagttacagcagagcttcctaatcattgtcatggcttagcgcacataccacatgattatatctgcgtgacaccctgaggcacataagaggatttgaaaccactgcctgaggcctcttagctgcagcagccagcctggagcactgtcctcaccagcctggtcaggctgccccaagttttagaagatcgagggtttgccgcacgcagagggccatggcacacagtgtgggaagctgtattaaagatcttccagtgggtgaatagttaagacatttcttacataatcaagcacagagtgtgtggtgtgtgtgtgtgtggcgggggggtggggaaggagatttgggagggctgaagacactggtggctgtggccctagaagctgcagcctactaggtacaggggctttaggcagcctctgttctcaccatgaacagggagagcagcatttgaatgaaacttctgtggtgctgaagtaaattcaggggctttgaggctcatcttctggagctgttttttgtttgtttgtttgtttgtttgtttgttttttcagacagagtctcgctctgtcacccaggctggagtgcagtggtgtaatctcggctcactgcaacctctgcctcccgggttcaagcaattctcctgcctcagcagttatcccgagtagctgggataacaggcacttgccaccatgcctggctaatttttgtatttttagtagagacggggtttcaccatgttggccaggctggtctcgaactcctgacttcaggtgatccaccccccttggcctcccaaagtgctgggattacaggcgtgagccaccgcgcccagccctggaactgtttttatctgagggagagatatctctggactgcccagagatggaggtgcaccagtgccctccgatccacaccaggcactaactggctgccgtgagcatggcctccctgggcattcggctccatgtctaggccaagacctgggtcccttcctgtgccagtctggttccagtaggccccgtggtgggtctgttgctgtgctgagagggaccagataccacagaggaaagggccccagccttggcatcaaacaggtctgggtccagatcccagctttgccacttcaggctgtgcctgtgtcctgctctctaaaatgggggtacctgaagagttctactttgtccagttgtgagggtgcaacaaaaatggaagtcccttgtgatgcctggtgtgcagaaggggctcactgaatgtttgctgaggttggggtcctcttcgttactcagactgagctcatagatgttggggctggaggctgaccttgaccttgcctttccctggcagatgaagtgcgtcttggtggccactgagggcgcagaggtcctcttctactggacagatcaggagtttgaagagagtctccggctgaagttcgggcagtcagagaatgaggaagaagaggtgagtgcagggtaggcagtcccaggaggggtggataggaaggaaccatacaaaactcccagcaggcagagaggcaggaaaacctgtgttcaccctgtcctgggcagcatgagcagggtgctgggtggggtccagcatccttcacacctagacccttatcctcaaggttggcctcttgatgctctgagctcggtgaccccacccccacaccccaccagtcctctctggactaaatgagggcaagaagaagtcgaattttatcacgtaacagaagaacttggagccatcagtttctgtaacctaaaaagtttaacaaggctgggcgcggtggctcacgcctgtaatcacaacactttgggaagccaaggtgggccagttgcttgagctcagggatttgagaccagcctgggcagcatggcgaaaccctgtctctacaaaaaaaatacaaaaattagccaggtgtggtggtgcgtgcctatagtcccagctacttgggaggttgaggtgggaggatcacttgagtccaggtggtagaggctgcagtgagccgagactgtgcccatgcattccaacctgggcgacagagcaaaaaaaaaaaaaaaaagtttaacgtaagctgaacacgttaattttttaatagctgtattaaggtatgattaacataccataaattgcacatatttaaagtgcataatttgataagctttgatatgtatatacctatgattctatcacaatcaataaaaggaatatatctaccacctcaaacatttgtaatcccttctttcccatccccatcgcataggaactgctgatctgctttctgtcatgatagattagtttgtatcatatggccttatataaatggagtcatacagtatgtgcttggatttagtttggttttggtttgactgctttcactcagcataattattttgtgattcatctgtgttgtggcatgtatcaatcgttcattccttgtcattgagtagtaatctattgtatcaggatgccaccatttgttcattcatttacttgttgatggacatctgtgttattttcagtttttgactattacaaataaagcaactatgaacatgcacgtacaagtctatgtatacatggatgctttcatgtccaaggacagatacttaggatagactggctaggtcatgtaggtgtatgtgtaactttttaataaactgccaaacttttccaaagtggttgtgtaatttttgattccacctgtagtgtttgagagttcagttcctccatatcctcaccaacactatagtccgtctttttaattttagccattctaatagatgttcactagaatctcactgtgttttaaatttcatttccttaatgactaatgcttttgagcatcttttcatgtgcttatttgccatatcttttgcccagtttttatttgagttgattgtttcttcttcttattcttactgagttttgagagcttctaatatattttggatggaatcctttatcagatacatgttttacaaatattttctttcagtttgtggcttgtgtttgtattctcaatggtatctttcaaagagcagaagtattagaactcgagtttatccattttgcatttatggattatgcttttagtgttatatctaagaaatctttgcccaacttacaaagagttttctctacatattcttttgaaagttttatagttttaggttttatatcaggtctgatgatctactttgaatttttgtgtgtggtatgagctatggattgaagataattttttttttgcatgtggacatccagttcaacagtttaacattacaactcagaaatacttgtcattttcacttacataatttccactctacattttaaaggagtaatttattttgaaaatgttttccagattaattttgggttaaaaatatttttactggggatgcagtggaaggtgttcttacatttctgcagcatgggctgattgcctctctgtccctttctgctctaaggggtctcatcatccagccaatgagtgagctgactccacctcagggagtccatttaccatcaacatcactcgtgttctcatcacagtctttaggcaaacacaagatatcagagatcatagacattcaagtggttttatttaagctaactgttaggcttttttattttttaacagtcaatacatataatatttaaattaagaatttttaaatatttcagtttttaaactactgttacaactatgtcaacttaagaagcaaactatttggtggcctttctcttcctctttattgaaaacctggcaaaggaacgaactcctgaattttcagttcctaaaaatgagtagtgtaaaggaaaggtggtctttaaagttttttttttttgttaatgtgcaacacattcttttctcatcatataaataatgagttaattgtaggaaatttggaaatacaaagagatagtttttaaatgacctataattccatgacccagagctattagctttttaatatactttctttgggtctttattttttctatataattgggattataccacatttacagttttactgcctgtttttttttccacttgccattatatcaagatatttcttctatttttttaaatagtctcagaagcataattcttaatggaaacattgtactccagtacatgaatcagtgtatcatcctttatttaaccattttcctcatatggacataaatattgctcctaatttgctatatcactcttgctttaagaaacatttgtgcttaaattttatctcatgtcagataaattcctaggataaatttaggataaattcctaaaaataaaaatgttgagtcaaaagccattcaaagatattgtactactttataattccgccaagtaatatatgagtatgctcctttatatacaccaaatatttttatctcccctgtattagtccattttcttaccactataaagaaatgcccaagactgggtactctgtaaaggaaagaagtttaattgactcacagttcagaaggctgtggaggcctcaggaaacttacaatcatgtcaaaaggcaaaggggaagcaagacaccttcttcacaaggcagcaggaaggagaagtgctgagtgaaggggaaagagcctcttataaaaccattagatctcatgagaactcactgtcacaagaacagcatgggggaaactgctcccatgattcaattacctccacctggtttctccgttgacatatgaggattgtggggattatggggattacaattcaagatgagatttggatggggacacaaagcctaatcatatcattctgccccaggaccctcccaaatctcatgtcccttttacatttcaaaaccaatcatgccttcccaacagttccccaaagtcataattcattccagcattaaccaaaaagtccaagactgaagtctcacctgagacaaggcaagtcccttccacctatgaccctgtaaaataaaaaacaagttacttccaagacacaatgggggtataggcattgggtaaatgttcccattccaaatgggagaaattggaactatggggctacaggacccatgcaagtccaaaatccagtggggcagtcaaatcttaaagctttgaaatgatctcctttgactctatccacgtccaggtcacactgatacaagaggtgggctcccaaggccttgggcagccctacccctgtgcttctgcagggcacagtcctcttcccagctgttttcacaggctggtgttgagtgtctgcggcttttccaggtgcatggtgcaagctgtcggtggatctaccattctgggggctagaggatgatggccctattcttacagctccactaggcaatgccccagtggggactctgtgtggaggtgtctgaccccacattcccttaatcactctagcagaggttctccatgagggctctgcccctgtagcaaatttctgcctggacatcctgccatttccatacatcctctgaaatctaggtggaggttcccaaacctcagtttttgatttatgtgcacccgtgggcccaataccacatgtaggtcaccaaagcttggggcttgcactgtctgaaacaacagccagagctatatgttggcaccttttagccatggctaggacgcagggcaccatgtccccagagtgcacaaagcagcaaggccctgggcccaacccctgaaacagttttttcttcctaggcctccaggcctgtggcgagagggcctgctgtgaagacctctgacaggccctggagacatttttcccattgtcttggtgattaacgtttggctcttcattatttatgcaaatttctgcagccagggcttgaatttctcctcagaaaatgggcttttcttttctattgcatcatcaggctgcacattttccaaacttttatgttctgcttcccttttaaacataagtcccaattccaaaccatctattagtgaatgcataaaactgagtgctttttagagcacccaagtcactccctgaatgctttgctacctagaaatttcttccaccccaaatcatctctctcaagttcaaagttgcacagatctctagggcaggggcaaaatgctgccggtctctttgctaaagcataacaagagtcacctttgttccagttccaaataagttcctcatctccatctgagactacctcagcctggacttcattgtccatatcactatcagaattttgttcaaaagcattcaatgagtctctgggaagttccaaactttcccacatcttcctgttttcttctgagccctccatactgttccaacctctgcctgttacccagtttcaaagtcactttcacatttttgggtatctttatagtagcacctcactctctgtggtaccaatttactgtgtcagtccgttttcgtaccactataaagaactgcctgagactgggtaatttataaagaaaaaaggtttaattgactcacagttcagcatggctggggagaactcaggaaacttacagtcgtggtggaaggcaaaggggaaacaaggcaccttcttcgcaaggcagcaggaagaagtgtcaagaaaagtggggaagagccccttataaaaccatcagatctggtgaggactcactcattttcatgagaacaagttgagaacagcctgggggaaccacccccatgattcagttatctccaccaggtctcccttgacacgtggggattatggggattacaagtcaagatgagatttgatggggacacaaagcttaaccatgtcatcccctcaccaaaaaaaagttctattcctgcagaaaaagctatagtcatgccctgcttaatgatggtgatacattctgttaataacaaactcatcattaggtgatttccttgtcatgtgaacatcatagtgtgtgcttacacaaacctagatggtgtagccaactacacacctaggctgtacagtatggcctgttgctcctaggctgcaaacctacagcatgtgactgtactgaatactgcaggcagttgtaacacaatggaaatgtttgtgtatctgaatgaacatagagaaggtatagcaaaaataaagcagtataatcttatggggccactatcatgcgtggtctgttgctgaccaaaacattgctcttcagtatgtgactatactgcttttacgatgagtttctatcaacatctagattcataagtgacttctctattaataaaatttgttcaagaaaatcatggtatatgaataattcagcaaatatttgaattcttgcctgtttatggaattctcgcctatctgtggggtattcattaaccaaatattaattgggaacctaccatgtgccagtctctcggggtaaagcagtaaacgtagcaacatgatccttgctttcatggaacttagagtctaaagaaggacattgtacagtgaaccagatggcaaataagtaccatgagttcagatagtgacaaatagtctggagaagttaaatggggtatgggatggggagtgacagaggtggagggcggtagcctgaggtggccagaaaaaaaaaaatctgagctggaaccagaatgataagtaggagccactgtgaaagctggacagactaactgtgggagctgggtacagtccttggttcccgaatgttggcaggaaaacctactccatagtgctgtgtcccacttgtacttcaatgctgcaccttcccgctggccagttgcctgtctttcttttcaaggcaaggtcttactcagcttcttgtagacttccccagctccaagttaggactgtgccttccccatatttcattcacgtctcctgaaatcttcttgggaagtctgctgttttcttcctttctttttattccactacggagaatttgagttgtaactgttccactggctttatcccattttattcacacatttgcaacaaacttgtccagttcctttttgtttttgtttatttgttttgttccttcttttggagagctgagagaatggatggaggaagagcttatcaaagtcaatgcaggcttgttatggaaaataggaaaagtacagaaacatacttaaaaatagagggaaaaaaatcactcctaattcctctatccagaagtaactttaatagtgttggctttctcagtattttatcaatacttcgttttttctatgcattcacattcttgttttatttttagctacaacattgtatcagaggaattttccatgtcattgaaacactctaatattttaagtggctatagacccttccataattttgatgtgctgctatttatttaactatttccctgatactagatgttaacattttttttccagttgtttgctattataaattaggcagtagtgaacatctttgtgcatgtatctttgtcccaatctctgatcattttccttaggacaaattttccaaagtagacttattgcaaaaaacagcatagactttggtacatgctacaaacttccttccagctccccgttcagtgctccccacattccactgttgtaatgaggcccaattccttaatgtttccttctagattcagagcctaaacagcaccattacccagctggccctccccattcttcctaaccaccacccgaagtgttggggacagtctctttttgctcccctccctaccaggacagtgataccctcccaggagggtctaacactatggaacccttgatatcaaggcctgatcttgtcccttccttagttcttggtgtctggcccactctaagctgtgaaattttcccccatttttgcagctccctgccctggaggaccagctcagcaccctcctagccccggtcatcatctcctccatgacgatgctggagaagctctcggacacctacacctgcttctccacggaaaatggcaacttcctgtatgtccttcacctggtgagtctatagctctggggcccatgttcctcttccctcagcttgatggggagtccacaggcctctcttatttggaactttagactcctttagaaggcagaaacggcatcttatcaaacccgcctgggacccgagcctcccctggcttgtctgcagagaccagggcaggtgaagggagtgcccttggggctggctgacactggcctgcctgtgcctgcagtttggagaatgcctgttcattgccatcaatggtgaccacaccgagagcgagggggacctgcggcggaagctgtatgtgctcaagtacctgtttgaagtgcactttgggctggtgactgtggacggtcatcttatccgaaaggagtgagtcttcaaagctggtcccctctgtcctttgccgagcaccctcgctgggccaggcagcgtgtgcccagcccctgtgaagctgccatttttcacatactgcccccagctgggtccctaggtcagagaaacagctcaagtgaaccttggagaccatctggtctgaccctctgactttatatctggtgaaacagagcagagaatggaactcacttgcctggggtcatctagctggttggtggccacatccaaactggatatttgagctcaggactctcagtccagtgctctttccatcctcccaacatcatcacccgtcattacaaatctggtctgagctagtcctctctggcttctcaagcttcagactctctctccagaaaaacacaaacccatgcacattcatacagtctcgtgaaggttttctcaggagacagaccttaaaacctgtctctgggcccacagtaaagaacttggggaaagagaatcatggttcagagtatacactgaggtgggagggaccccagaaaaggcttgtagttgaaatgtagacctagaaaagagaagttcgtagtatcaccaccccctgattctctaagatggattgggaagctgcggagtgtgaagctctgggactttagttttgtggcgatatgagcaactacccatattgaggcatttctcaaatgcacaaacattgtttcatgagtcattttagcccagataggtcatggtgtcagtggcaaatgctgcaggtggcagatgcctgttacatgaatcacagtggccagtgcagacgttgccagcatccgagatggctgcgaccctgagtagggccctgatgatggaccagatctttctgtgttcagtggcctctgtgtgagaagcttaagcatcaccctggctctctctagctggctttgtatgacatgtgtttgtgtgacagaggctgaggagtgaggtgatttgctcagctgcctgccttccggctccgtgcctatcccaccccactccacagttagagctcggccggaaacctggccccctttcccagctgtgtgggcaggtcatatgggctcaccaagctctgatgctgagctgagactgtggtcctttggttgggtgtgggggagaccagctttcttgtgatctctcccgccctctctggctctgcccccaggctgcggcccccagacctggcgcagcgtgtccagctgtgggagcacttccagagcctgctgtggacctacagccgcctgcgggagcaggagcagtgcttcgccgtggaggtgactactgggcgcgggagtcctcaggacttgaagctgtcaggtcagagggggcgtccacctttaagaccatgttttaaccctaatgaatgaaggcacaagcagcccctgaaactcgtgtattcagagagagttgttctttctggccatatggagggttgggtaccctgatgggctttcccatggtaaaacagctcgatcctggataacacatacttttaatgcaatttttgggttcactgtaaattacaggaatctttgaagacagttccttcaaccctcccctccttttcccacaaaattatattgagctggaactggaggggaaagcagtggagaaaaacacagcgctaaaggcaagattccctgagtgcaaatgataccagcactacagccagtaaatagccttaggccagcagcagcataggagagctgagcctgcaactctaggttaagcccagccccaaaaagttaaagtggctactggtccttttataaagccctagtaaataaaaaactaaaaaattaaaaataaaaactaaagtggctgctggtcagtagcactccttgccttcctaaagaggtaaaccaaattctctttcaagcagtggttttcatactccagtgtgtgtcagaatcctctgtagggcttgttaaatacaggttactgggcctcactttcagcttttctcatttagcgagtctgggatgggggctctagaacttgcatttcttttttttttttttttttgagatggagtctcgctctgttgcccaggctggagtgcagtggagcaatcttggctcactgtgacctctgcttcccgggttcaagcaattctcctgcctcagcctcctgagtagctgggattacaggcacgtgccaccacgcctggctaatttttgtatttttagtagagacggggtttcactatgttggtcaggctggtctcgaactcctgacctcatgatctgcccactcggcctcccaaagtgctgggattacaggcatgagccacagtgcccggccctagaacttccatttctaaaaaattcccaggtgctgtttattgtgcttgtccaggaaccacactttgaaaaccactgctagagcaggaaaggtaaagatcaaacaaacgtgaactcacaactgaagaaaatcagatatggaagaaaataagccaccacgagtgagagtcaggaaaatcaatcaccaacagatttagatcccaaggcacttgatacattggaactattaggtatagaatataaaataactatgaaatatttaaaaatatgaaatgtagaatcacaaaatgagataagaagaaactctaaattgaccaggcaaatttgaaaaagaacacgtacagatattttagaaaagaaaacatagttgttaaaatgaaaaactcaagggatgtgttaaatagcagatgagacatagctagagggagaattaatgagctggaaaatagatctgaaggaattcattctcatacccccactcattcactcttccaataaacatatagtacctattatatgctaagaggtgtgccaggccatgggaataaagagatgaataaagacatattcactgcccttgaggggaaatcagccatgtatatactaaaagatataataaagaatcctggtgccatattaggtttttcatcaaaagctatggtggcacaagagatggagtggtaaactctttctgggacattaggaaagacttcttttaggaggtgacctaatgccattagcataaaatccaaactcttcccaagcctaccaggccctgtgtgatctatcgctgcctatttcactctagcttcatcttatgcctctcttgtccacgcttactgagtgctagtcacatgaaacttctttaagtttcaggaaaactctatatttagatctgtccaatatgatagtcattagctgcatgtggctgttgaacatttgaaatataactagtgcaaattgagttatgctatgcatgtgaaatatataccagattttggtaacttagcacaaaaaagaatgtaaaacattccattaataaggcttttatatcatatggtgataatattttggatatattcagtaaaatgaaatatatcattaaaattaatgtcaactgtttctttttacttttttaatgtggtcactggaaacatttaaattatgcatagggcctttcttttatttctgttggacagcaccattgcaaactctgtccccatctcatggcctctgaatatgcagtctccttgacttgcagtgttctctctctccctctttctctggtgggccatctggttgtttagatattagtttaaaggtgacctaattcagggacatttctttggacaccctacccaaggaggtctctgctatttctctctagcctagtgctgtgtattttgtacttggtgcttacttacaaatggcacttactttatttccttgtgtattgccttgcctcatccactggagtctagtgaccagacagtaagcctcaggaaggctgggacctggtgggtcttagtccccctgtttccaagtatctggtgcagagtccaagctcactgtggacagagtgaatgtccccactagcccagggcttggagtggggcaaggttgttggtgatatggcttcctctcccttcctgccctggctaggccctggagcgactgattcacccccagctctgtgagctgtgcatagaggcgctggagcggcacgtcatccaggctgtcaacaccagccccgagcggggaggcgaggaggccctgcatgccttcctgctcgtgcactccaagctgctggcattctactctaggtgagctcaaggtctggcatgtggtggctaaaggctccctggccttctcactcccctatggcctctgcctgaaaagcaccacctgcccagccaagaatcacctcctccatgaagcctgaaaccttcccagatttgattctccaacctttttcagctcacccatttctctgtatcattccttcctggaacactgtcttagagtctcaatctagaacttccttttatgttgttcttggtccctggtgctttcccactgctaaatcattttcttttctttgttctatacaaccaagttttattttgaaatttgacgagttaattaattgtatttgtgccttgcccatctccagaagtacattgctccttgagggcaggggccaggctccacactcctttaacctgcctgccccgtctcctgctgggcatgtgctgatgggtggccatgctcctgtgtctgcagccacagtgccagctccctgcgcccggccgacctgcttgccctcatcctcctggttcaggacctctaccccagcgagagcacagcagaggacgacattcaggtctcagggcagctttctgggcagagggaggccattagggaggtagttcagaaaacctgcctgaagatggtgggcaggctccccctggggactccatgttttctaagtcacaattctgggtgtgtggttgggcgtgacttctttcccactgctttcagatgtaaggggaattctggagtgcacatggtccagtgggttaaaagtgcagatttttcaagtcagccatggttcgaaacccagcttcaacacctggctgtgtgagctgagcccgtacttgcacccccagagcctcagtgcccttatctgtgcaatgggaataacaaagcatctacttctcaggggtatttggagggacaaaaggggtggttcccacagaacctggcactgcctggggcatagtgaatgcttagtgagtgtcagccaccaccatcgctgttgacctcatcaccaggggtagtggtgggttggataccattgtgttggaatttctcgaatttccacagaacagaccgcctagaatcgaatccctgggaagtctgaggaccacacacccaggactgcacccggaacgggtggaggggtggaggggtggaggcttctctgtgaagcgctgggaggcagaaggggtggagggagccaggtcagataggagctaaccagcctctcccctgccctgcacagccttccccgcggagggcccggagcagccagaacatccccgtgcagcaggcctggagccctcactccacgggcccaactggggggagctctgcagagacggtgtgtgctgtgcacttcgtggagtcaggggcaggaggggatcggcctctgcaggcgaccaggcctttcccatccctcctgggagagcagggacagggttgagccagctgggagagcctctcaacctgagccaccttctccattccaggagacagacagcttctccctccctgaggagtacttcacaccagctccttcccctggcgatcagagctcaggtgaggaccggaggaaagcaggaggaaacaatagctagctgcgagcgacaggcagcccaggacatctgtcttaggctccagtggacccccgtgcctcctaaggcttgagtgcaggtacccgtgttcctagagcacaggacgctgtctgcggctccccatcttccctgccagctccagcctgaactcaaggattgttaagaccactccactgatccctaaagctgttgatgacaagttgattcatttaaaacttctgtacatgcattctcagactcatcttttttgtaattaaaattaaaaattaagttaaatttagtaataatcatctaatttctatacattctaaaatatattcagcatctgtagtttatactttgtttctccaaagtatgtgggtaaacaataaaaaaaaactataaatattcaaaatggttgaggtgtggtggctcacgcctgtaatcccagcactttgggaggccgaggcgggtagatcacctgaggtcaggagtttgagactagcctggccaacatggcgaaaccccatgtctactaaaaatacaaaaattagccaggtctggtggcaggcgcctgtaatcccagctactcgggaggctgaggcaggagaatcgcttgaacccgggaggtggaggttgcagtgagccaagatcatgccactgcactccagcctgggcgacagagcaagactctgtctcaaaaaaaaaaacaaaacaaaactacaaatattcaaaatgttaacaaaaaatggacaaccttgcttagagaagtagataaaccaaaatccagactgttgtggtcactatgaataaacattacatttatttctgaagttcttaggtaaaaaaaaaaaaaaaaaagggtcctgtggtccctccacatcatctgatggaagaaagaaggccagggtttcaggaggagaaacctactggggactaggatttgaaaggaatttattatgtggctgcttttaacccaaccctggcacattggaatcaccaggcagcttcagccagcccaattaagttacagtctgtgggcctgggacccaggtgtgaatacttctaggaaattttcccaggtgagttcagtgtgcctcgggtgcaaaccactgctgtgcacagatttaggttacagcatgctttgccccctggctgcatattgaactcacctggggatctttaacaattattgaagctgagcctgtacccggagatgctgactcagttggtctgagctatgccctgggcgtcaggattttgtaaaagtccccaaatgattttcgtgtgtagccaaggttgacaaccactgggttagatgcttttaactttaggtctggctagaagcctaggaccccctgagactgtgtgtgaactcactgatgcctgtgcattcctggggtgagggttcctagctatcttcagattccctgagctcttgatgagcctgagacctgttgagaagcagagttctgggtaatctccgaagttcctcttaccactcccttcctcattcatcaccatcttcctcccagtccctctctcttgatagtggttttttatgccttaaaactgtaaaaaataatgctgttccaccgtgcagagaactcacaacttacaaatggtttgggttgcactcatccatttgtaaatcaggtgtttaagatgtaggaacacacttcccccaaagaaacatgattataaatgagggttgtttgcaatgaaatataagaggtaacagtattattacagacacataatatttcagatatgtggtgggttcagtaggtttttgtgcgttatattaggaaggaaatccacctcaattcccagcacacagcaggtgctcagtaagagcttgccggttgaataaatgaatgggcaaacgtggactgtgtgtgctgactcctgaggggcgggttgaggcctgaaggaatacaggggacagaacaaggaggggattgggggcaagggaggggggaggaagatgcccctctaccccctgaccaccattaccaaacatgtcctcaggagcttgattctcagcagctggctctgggggcagcttctctgccaggcccaggccgccttagccctggtactgcagagttcaccttgtgcctgccaacttaggatgaaggggtgttgccccagccacattagcacccctgcgtggagctggcagccaagggctgaggttgtggggggcacctgggccccctaccccatgctgttgagccattgcttacatctcatggtacttacatcgttatgttattacctgtggcctgcaggtagcaccatctggctggaggggggcaccccccccatggatgcccttcaggtgagtttctcctgtgcctgcctgggcgccagctgatctgagatgccgcagtgagtattgggggctctgagggtttcgcctccagggtgactctacccgtgccagccctcctcctgcccaccccagggctggtcagtgcaggtgcctgtcctggtgccagagctcagcccagaggcagggtccaggaatgggctgtgaggggtggcgaacttgcccctcccctcccccaggtgctgtccctcagctccattgttcttgggagtgaaagtccaatagaattttttttttaagtgagcatgtatatttattgtagaaaaatcgggaaatacaaaagtaaactataaaaaagggaataaaaattactcttaatcccgtcctcaaaatgagattaacatcttggggtgtttccttctagtctttttttcctatgactttacacacacacacacacacacacacacacacacactacatatgtacacatgtgtatttttaaaatcagatttggatactaacgtgtttcattatacttttttatttaaacatttttccatttcctaagcactcccacagtgtggtttgtaatgattggtagtccatcacatgcatatgttatttatctagcaaatccccaggaaaatcgcgtcatgtgtccagtgtttgctgttaggtatgacactgaagaggaatttttgtggcatctctcatgatttccttaattctataattttttgcactaaaggctttcttgcttagatccctctgtaaggctggagccttgcccatttggtcactttatgcctcagtttccccaatttgagtggctgttgggatgttctgagggtgattgaaatgatacaatgttgaacattagatacctccatctgttgcaaatgtggggaggggacctctccccgtccactccccatccacgagtgtttccctgccttctcggtcctctgtgccaccacccagcccctctgcccctgcccactgccctgcttggcacccgggccagactctgggcagaaaggcccaggagcagctgagggagaggggcaacagcgaaactggagctgcgagggcaggttcagcagagtgcaggaatttaaaaactggagtttcttggagctaaaaatgattatttcttgtggttcacagatagggccgcaatgggtgggtccaacttagggatcccacctctcactgcagctcttcttcctctgtagatagcagaggacaccctccaaacactggttccccactgccctgtgccttccggccccagaaggatcttcctggatgccaacgtgaaggaaagctactgccccctagtgccccacaccatgtactgcctgcccctgtggcagggcatcaacctggtgctcctgaccagggtaggagagcccctcaccctgccctgatgatgcttagggttggcacgtcttccccaggggcagccccgttcacccgcctctcggcccttaccctcagagccccagcgcgcccctggccctggttctgtcccagctgatggatggcttctccatgctggagaagaagctgaaggaagggccggagcccggggcctccctgcgctcccagcccctcgtgggagacctgcgccagaggatggacaagtttgtcaagaatcgaggggcacaggagattcaggtgagacccaagttccagtcctccccacctggggaagaggcagggctggcagcagggtacatccggtccacagcagctgaggggccaatgggcctgggttcctgtccgggctccacctcccccgggcctacgatccttgttttccctattatgaaatgatattgaaaacttagctgctttttggttttcagaatctttttatgtgtgtttggcagaatacgaattataattccccttttttaggtgtggaaactaaggcttagacaagttttaacttggccaagattatgcagctcatgagcagtggagccagagcccggatgcagtgagcaagtgcagtcgggatccgcccgtcacgggcttcctctctgcagcggggctgtgtccccgggctcacagggcaacacagggatgtgcaggtcacggctccaccccacccccagtgagcttagggcccaggtggggagctgagaccaggagacaggtgagaatgtgcaggcagtagaaacagtccatcaccccgtgctctgacaaagcccagatcagggcctggacggcagtggggctggtggggcttgactctggatttaagcagtggaggcgcctggtgtttgaggagctgggacccattgtggctggagtgcctgtcagtctgaaggctgcaggattggctggaggaggcagtgccacatcccgcagtgcctcagggtgtcctaaggagcactttcactagaacaccaagttcttctgctttatagagatcccgtgaggccgccccctgcatggctaccccatgcccaccccataccctcccagcttctgcagcagcacctcctccgcacaccccagccgctgccctgtgtgtgccccccaccccgaggggctggcctggttgctgtgacggtgctactatgtgtgcctgtgcccgtcagacagcgagcccctggaaactgccctttaaataaacgctgctgagtgactagaacatggcacactgaagtctgcagggggctggtggggcctgccagggtagcctgcattggccagaagggcagatttgtctgggggccctgtgccctctcagagcctgatctgagaaggactttggcctggacctcactggaaatatggtcgggatgcaaacctgccccctgtcttccttccagagcacctggctggagtttaaggccaaggctttctccaaaagtgagcccggatcctcctgggagtgagtggtgggcctcaggacaaggggtgggtcgtgtgcccaggggactgttccctgggaggccacatctcctccaccactgcccttcatttatcagcaaaataatttcaagaaaggagatttcttcccacatacgtggagcaccgcgtggagaagctgggaagctccttcccattgcctgatcagctgtggctgcccccttaggtctttccatctgtctgtcctgggtgcaggagcagggtggtccacctgggagtgaggggctccccaggttggtctgtcctgggtacaagagtggggtggtccacaagggggaagggctccccaggtctgtctgtcctgggtgcaggaacaaggtggtccacacagggcgaggggctcccctaggtcccttctgctgtaatgccctcctctctcgtgctcaggctgctccaggcatgtgggaagctgaagcggcagctctgcgccatctaccggctgaactttctgaccacagcccccagcaggggaggcccacacctgccccagcacctgcaggaccaagtgcagaggctcatgcggtaagtgcagtgcggccccctgggtggccagggcagggtctggggcccgtacttccttcacgcagcccgagcttccctcggcagggagaagctgacggactggaaggacttcttgctggtgaagagcaggaggaacatcaccatggtgtcatatcctgacgccggggccccagccagcccaacaagcctcttggatctgctgcctctacacctgctccctggagggactatgggccccagggaagggggatatatgttccaccccatcagctgctcaccacctctctgaaggaaaataatgggacatagtggcccatgtgccttgtctataggaatacttcaagctgaaatttcaggaattcctcctgtcccaaagttaattcacaaaagccataaagaccctttatgtcagtgttgcccagctggcaaaatggtagtaggtattccacgaggggtggggaccggggggggggttcctgtggtctagtttggttgaaagggccgttgtccttcttagatcatgacagtgcacagtggcatgtaaaagctctagaaggcctacggcaaatgtttatccctgtttcagaagccattcctaagactatttgacccttttattatggaacactaattttatcgaatactgattttccatgaaaattcatgtaaagcagcttttcccatatcatctctgaaatgtccagcccccagtctcctgaggcaggtcctcagtgggcaggtgaaaggatgccagagggcctctttagccaccagctgctgcccttctatggatgtctcttcccctcccaaatgggagccttccaaactctcatgatgaagtgtaagggtttagcaagatcacagtgaggtgcataggctgggcagtcagctaggctcactcatgaaccaagtggctgtgctcacactccagcctcacgtgtgtctgacttaaattcatccctcatgaaaatgatgcataccatgttcctgtagggccagaactgcccgtgtcaaatgtgcaagtgttgaggatcttacagcttttcaaggcctggggagcttggaggtagtgggggatctgaggaagcaaggatacagggggcttagctgaaatggaagctgctggaaagaggcagtcctggccctcctgccaccatgactgggcacagctagaagcccaggacagaggcaggccgtccctagctcctggcttgtaagcaccttaactcagaccttcacctacctagaagacttcccaggcttggtgcacttcatctatgtggaccgcaccactgggcagatggtggcgccttccctcaactgcagtcaaaagacctcgtcggagttgggcaaggggccgctggctgcctttgtcaaaactaaggtaaccatttggacccagggcggggatgggtgggcctcagccaatattgggtagcccttcctggtgtgatccacatgcctggggctagcagagtgcgctgggcagcaggcccaaggaggcagtggccagtgccggcataaataaatgctcgacaagtatttgttgaatgagctagaatggagagaacggcaaggtccatcagttgggcatcagaatttaaaacaaggtgatttctgttaaggaagcattccctggaaattcttttattctccttatttaactgactgtttttcatgacaaagttgtatttttgatagggggaggacccctgccactctccaaaaaaactatacgtgtgtgtgtgtgtgtgtgtgtgtgtgtgtgtgtgtctgtgtgtgtgtgttcttttctttctttgttttggtgggggaggcaagtaaagtgtattctaatgtttaaaacaagatgggaagatgggtggtggaggcatgtgttggaagcccagccccgtctcccaccagttatgtggctttgggcagtacttagcccaagggtcagtttcctcatctgtagaaggaaataatagtgctatttacatcacagagttatgaagagtacatgagaggatacgtatcaaatatttagcatagcacgtagcacaaaatacagatacagttcattcagtacttactggtggcatcatcatcaccatcttcatccttgcccctcattctggagacagttggggttatcttggtacgtttctttctgttggttttctgtgcagtttgttgtagttgagatcactctgtatgtgcaactttgctaccatgttttcatttcacattatatcagatgctttccctcatgccattaactctttatagacatgatttttagcagctccataatagtccatcatgtgaatgtaacataatttattgaaccatttccctgatgtttagacatacagattatttctaggcttttgctgttataaataattctgcagtatacaccttgcatacatctgggtccccatctctgattatgtccccaatatggattcctagaaatggaattattaagtcagatgggaggaatgtttttaagattattgatggatgttgtcaaattactttcctgaaaagtacagtcaatccatggcagatttaatgagtaatcacacggcgatgcagtttggagcagatcgcctgtccctcccgttaagggtagaggagagggctcctcgagtctcttcccagccctgagaggtggcagagagcccactgtccctgctgccttccctggggcacttcaccggcagcactggtgacagtccctgcgtcaggcaggaggacattcccaggggagctaaggcacgtggtttctcaggccctgtgtttccatctgaccccttggtgaactctgatttggacttcccccctggctcagcacatcctacagggtcactcacctgtgccatcagttcccagcctgaagggcactaggtgagtgggcgaccccaggcagaggaggggattcaggagaccacaccttgttctcctgtgttcattaatgatgtccctggctattctctggcctgaatgatcatttcactaatttattttttttttaatattattattttttgagacagggtctcactttgtcacccaggctagagtgcagcggcacaagcacagctcactgcagcctcgacctcctgggctcaagcgatcctctcatctcagccccccaaatagctgggactacaggtgtgtgctaccacacccggctaattattttgtatattttgtagagacagggttttgctatgttgcccaggatggtctcgaactcctgagctcaagcaatccacctacctcagcctcccaaagtgctaggattacaggcgtaagccaccacactagcccagttcactaatttatggcatatgtgtatagtaaagttacacaaagcttttttacatatattttgcccccacgctaactggagggtagtccatccatccaataatgatttattgttgagcctcctgctctgagccaaggcagtgcccgggtactaggagaggcccctggcactcacggagcttctcggctgtgccctttccttccttcggaggtgagagctgcccaggcagaccaaggctgggagagtggtgatgcttgctgtcttttccccaggtctggtctctgatccagctggcgcgcagatacctgcagaagggctacaccacgctgctgttccaggagggggatttctactgctcctacttcctgtggttcgagaatgacatggtaggtgaggctgagtccctgggccaggacgggccacacacacttcccgctctgtaactcttggattcctttcttctgaattgttgtctgtctgtctcatcttctcttcttgttgctggtaagcccagcaggttgggagccagagttcagaggtcacattttcacatgggcgtttaactgctttgtgatccctctgcccagctgtctggcaaactcttgccattgtccacgtggcatccaggcacacatgtgagcagaaaggcacatgccccactgtgagaaatgcgactcagaccacacactttgtcgctagtgcttccatgtcgccagcgtcacatgccaagtgtggcacatggtcatccctgtggcataggcccctgaactcaagagcataggcccctgcttgaagcagtgagccaggctgcctgaggagacactggtggtgtggctcggggccctggcctccaggccctgcactgcttcttctgggcctcactgttactgcagagtagggtccagtggggggagcttactatcattgtgtctccatccatacaacggggtcagggatccctgccccagccactgcacagggctgtgaggggtgcagtggctgggactcctctcctcctgtctctccctcctctctgtcttttccctttcttcgctttcctcctgtttctcttttatttgcatctcgcttgtcaccataagtggttgttccagctctcaggagtggttgttccagctctcaggagtgttcctcctccctcgcagcccttggtctctgggtccctgcactcctgtgccttcccctgcccccaccctgcactctttgttcactgagggtgacagccatccctttccatagggcagggcggttactggggctctccaccactgttctctcagttaccccctcacagccctgtaaagtggctggggcagggattcctgaccccgttgtacggatggagacacaatgatccggagatcagacgccatggccagggccaccgaggctgtaagtgaggaagccggagcccaagctctgctcccccggcctgcaggctcccagctttcctccgtgccctcagaagtgcccaggacgtgtgtacaacagaagtgctagaaaattcctgtgacctttaccttcacttctagggagggacaggagtctgtgtgcttgggtggccccgtggggtgataaagtgaggcagagctgtgggctggagaggccaggtttgaatgccagccacacagcccagccggtgccgtgggggcagccctgcacactagggagtccactccccctgcagggcaggccacggtgcccaggcaagcatcagctaagtgccatgttcatgcctggcacacacggcacgtccagcagatcttaattcccttccccaccttatcccaccctgggaattcccaattctttcagagcagaggcttgggccttttgtgaatgctctgctcttcaagacctgtatgacagccctgcagggtgccctcctgagcgtgtgtttgtggcctgtacaggtccaggtattgacggtaatgagagctaccctgccggcccttgaagctttgtatactttttctctaatgttcataaggtgactgttgtcattctgacttcaaagatgaaaaaacaaggtccaggcattttcccaagcacccagcgcacatgacagagccaagccaggccgcaagcccggtgcgtctgactcaggcccttgcactacccccacacccactgcctccctgtcctccctcctcaggggtacaaactccagatgatcgaggtgcccgtcctctccgacgactcagtgcctatcggcatgctgggaggagactactacaggtgacgctgcgttgggagccactggggacagatgcccccatttgggtgataagtgctcgcctctgccgggagcagcttctgcttcagcagtgccctacctcagacccagaaatccacgctgggaacaccttcccggctggccctgtgtgcagcgagggaggacgggtgtggagggtacatctgtgttcctaccaccttcctgctggcatggtcttggcagcacggggaacgtctgtgcccggcccagaacatccccactgctacctcgtagccaggatgccactgttaggtcagtgaggaaccggagcggttgtcaaggcccacatgcaggggcctagtgagatgaccgagggcatgggcatttgcttgcgagggcccagagaggcctctggcgctggaggagtgccacagcctcactcctgaatcccatcctccccttcctccccaggaagctcctgcgctactacagcaagaaccgcccaaccgaggctgtcaggtgctacgagctgctggccctgcacctgtctgtcatccccactgacctgctggtgcagcaggccggccagctggcccggcgcctctgggaggcctcccgtatccccctgctctaggccaaggtggccgcagtctgcctttgcatcctgtcctccagccacccttgcttgccactgttccccatgacgagagcctcctgtctgcagtggccatcctgaggatagggcagagtgcccagggtggccccagggcttctaaaaccccacctagaccaccctccatgtcaggtactgagcaaggccccagatccttctctctggaggaagagggaagcccaggggtcctgtttgtaaaacaacggtggcaacagctcctcttccagagctgcctctgcctttatcctgggagatggggaggaagccccatctctgctgttccctgcgtggaggaagcccacccagcaagctctctcctaccccaggtaaaaggtgctcctttgcctgggtttgaattccagcgctgccacttcctctctgcacctcctggcaagtttcttctattccccacgtttaaagcgatggcacctccgtcccagggtggtgtgaggattacccagtgtggtaggtgctcaataaatgttggtcattgttatcactgaagcccaa

SEQ ID NO: 12414 - DNA, 2791 bp, Homo sapiens
ggtacgtgggcctccgggctgtcccctctgggggcggcgatcctccctccggagccccccttcaaccctcccggaagtgagcatttgcaggaccagggatgctgtgctgctctcccatgagccagtcaccgagtcggtctgctgcagccctttctgaacctctggccgtctggatgctccactgtgcttgccaagatgaagtgcgtcttggtggccactgagggcgcagaggtcctcttctactggacagatcaggagtttgaagagagtctccggctgaagttcgggcagtcagagaatgaggaagaagagctccctgccctggaggaccagctcagcaccctcctagccccggtcatcatctcctccatgacgatgctggagaagctctcggacacctacacctgcttctccacggaaaatggcaacttcctgtatgtccttcacctgtttggagaatgcctgttcattgccatcaatggtgaccacaccgagagcgagggggacctgcggcggaagctgtatgtgctcaagtacctgtttgaagtgcactttgggctggtgactgtggacggtcatcttatccgaaaggagctgcggcccccagacctggcgcagcgtgtccagctgtgggagcacttccagagcctgctgtggacctacagccgcctgcgggagcaggagcagtgcttcgccgtggaggtgactactgggcgcgggagtcctcaggacttgaagctgtcaggccctggagcgactgattcacccccagctctgtgagctgtgcatagaggcgctggagcggcacgtcatccaggctgtcaacaccagccccgagcggggaggcgaggaggccctgcatgccttcctgctcgtgcactccaagctgctggcattctactctagccacagtgccagctccctgcgcccggccgacctgcttgccctcatcctcctggttcaggacctctaccccagcgagagcacagcagaggacgacattcaggagacagacagcttctccctccctgaggagtacttcacaccagctccttcccctggcgatcagagctcaggtagcaccatctggctggaggggggcaccccccccatggatgcccttcagatagcagaggacaccctccaaacactggttccccactgccctgtgccttccggccccagaaggatcttcctggatgccaacgtgaaggaaagctactgccccctagtgccccacaccatgtactgcctgcccctgtggcagggcatcaacctggtgctcctgaccaggagccccagcgcgcccctggccctggttctgtcccagctgatggatggcttctccatgctggagaagaagctgaaggaagggccggagcccggggcctccctgcgctcccagcccctcgtgggagacctgcgccagaggatggacaagtttgtcaagaatcgaggggcacaggagattcagagcacctggctggagtttaaggccaaggctttctccaaaagtgagcccggatcctcctgggagctgctccaggcatgtgggaagctgaagcggcagctctgcgccatctaccggctgaactttctgaccacagcccccagcaggggaggcccacacctgccccagcacctgcaggaccaagtgcagaggctcatgcgggagaagctgacggactggaaggacttcttgctggtgaagagcaggaggaacatcaccatggtgtcctacctagaagacttcccaggcttggtgcacttcatctatgtggaccgcaccactgggcagatggtggcgccttccctcaactgcagtcaaaagacctcgtcggagttgggcaaggggccgctggctgcctttgtcaaaactaaggtctggtctctgatccagctggcgcgcagatacctgcagaagggctacaccacgctgctgttccaggagggggatttctactgctcctacttcctgtggttcgagaatgacatggggtacaaactccagatgatcgaggtgcccgtcctctccgacgactcagtgcctatcggcatgctgggaggagactactacaggaagctcctgcgctactacagcaagaaccgcccaaccgaggctgtcaggtgctacgagctgctggccctgcacctgtctgtcatccccactgacctgctggtgcagcaggccggccagctggcccggcgcctctgggaggcctcccgtatccccctgctctaggccaaggtggccgcagtctgcctttgcatcctgtcctccagccacccttgcttgccactgttccccatgacgagagcctcctgtctgcagtggccatcctgaggatagggcagagtgcccagggtggccccagggcttctaaaaccccacctagaccaccctccatgtcaggtactgagcaaggccccagatccttctctctggaggaagagggaagcccaggggtcctgtttgtaaaacaacggtggcaacagctcctcttccagagctgcctctgcctttatcctgggagatggggaggaagccccatctctgctgttccctgcgtggaggaagcccacccagcaagctctctcctaccccaggtaaaaggtgctcctttgcctgggtttgaattccagcgctgccacttcctctctgcacctcctggcaagtttcttctattccccacgtttaaagcgatggcacctccgtcccagggtggtgtgaggattacccagtgtggtaggtgctcaataaatgttggtcattgttatcactgaagcccaa

SEQ ID NO: 12415 - DNA, 10475 bp, Homo sapiens
gctgcggcccccagacctggcgcagcgtgtccagctgtgggagcacttccagagcctgctgtggacctacagccgcctgcgggagcaggagcagtgcttcgccgtggaggtgactactgggcgcgggagtcctcaggacttgaagctgtcaggtcagagggggcgtccacctttaagaccatgttttaaccctaatgaatgaaggcacaagcagcccctgaaactcgtgtattcagagagagttgttctttctggccatatggagggttgggtaccctgatgggctttcccatggtaaaacagctcgatcctggataacacatacttttaatgcaatttttgggttcactgtaaattacaggaatctttgaagacagttccttcaaccctcccctccttttcccacaaaattatattgagctggaactggaggggaaagcagtggagaaaaacacagcgctaaaggcaagattccctgagtgcaaatgataccagcactacagccagtaaatagccttaggccagcagcagcataggagagctgagcctgcaactctaggttaagcccagccccaaaaagttaaagtggctactggtccttttataaagccctagtaaataaaaaactaaaaaattaaaaataaaaactaaagtggctgctggtcagtagcactccttgccttcctaaagaggtaaaccaaattctctttcaagcagtggttttcatactccagtgtgtgtcagaatcctctgtagggcttgttaaatacaggttactgggcctcactttcagcttttctcatttagcgagtctgggatgggggctctagaacttgcatttcttttttttttttttttttgagatggagtctcgctctgttgcccaggctggagtgcagtggagcaatcttggctcactgtgacctctgcttcccgggttcaagcaattctcctgcctcagcctcctgagtagctgggattacaggcacgtgccaccacgcctggctaatttttgtatttttagtagagacggggtttcactatgttggtcaggctggtctcgaactcctgacctcatgatctgcccactcggcctcccaaagtgctgggattacaggcatgagccacagtgcccggccctagaacttccatttctaaaaaattcccaggtgctgtttattgtgcttgtccaggaaccacactttgaaaaccactgctagagcaggaaaggtaaagatcaaacaaacgtgaactcacaactgaagaaaatcagatatggaagaaaataagccaccacgagtgagagtcaggaaaatcaatcaccaacagatttagatcccaaggcacttgatacattggaactattaggtatagaatataaaataactatgaaatatttaaaaatatgaaatgtagaatcacaaaatgagataagaagaaactctaaattgaccaggcaaatttgaaaaagaacacgtacagatattttagaaaagaaaacatagttgttaaaatgaaaaactcaagggatgtgttaaatagcagatgagacatagctagagggagaattaatgagctggaaaatagatctgaaggaattcattctcatacccccactcattcactcttccaataaacatatagtacctattatatgctaagaggtgtgccaggccatgggaataaagagatgaataaagacatattcactgcccttgaggggaaatcagccatgtatatactaaaagatataataaagaatcctggtgccatattaggtttttcatcaaaagctatggtggcacaagagatggagtggtaaactctttctgggacattaggaaagacttcttttaggaggtgacctaatgccattagcataaaatccaaactcttcccaagcctaccaggccctgtgtgatctatcgctgcctatttcactctagcttcatcttatgcctctcttgtccacgcttactgagtgctagtcacatgaaacttctttaagtttcaggaaaactctatatttagatctgtccaatatgatagtcattagctgcatgtggctgttgaacatttgaaatataactagtgcaaattgagttatgctatgcatgtgaaatatataccagattttggtaacttagcacaaaaaagaatgtaaaacattccattaataaggcttttatatcatatggtgataatattttggatatattcagtaaaatgaaatatatcattaaaattaatgtcaactgtttctttttacttttttaatgtggtcactggaaacatttaaattatgcatagggcctttcttttatttctgttggacagcaccattgcaaactctgtccccatctcatggcctctgaatatgcagtctccttgacttgcagtgttctctctctccctctttctctggtgggccatctggttgtttagatattagtttaaaggtgacctaattcagggacatttctttggacaccctacccaaggaggtctctgctatttctctctagcctagtgctgtgtattttgtacttggtgcttacttacaaatggcacttactttatttccttgtgtattgccttgcctcatccactggagtctagtgaccagacagtaagcctcaggaaggctgggacctggtgggtcttagtccccctgtttccaagtatctggtgcagagtccaagctcactgtggacagagtgaatgtccccactagcccagggcttggagtggggcaaggttgttggtgatatggcttcctctcccttcctgccctggctaggccctggagcgactgattcacccccagctctgtgagctgtgcatagaggcgctggagcggcacgtcatccaggctgtcaacaccagccccgagcggggaggcgaggaggccctgcatgccttcctgctcgtgcactccaagctgctggcattctactctaggtgagctcaaggtctggcatgtggtggctaaaggctccctggccttctcactcccctatggcctctgcctgaaaagcaccacctgcccagccaagaatcacctcctccatgaagcctgaaaccttcccagatttgattctccaacctttttcagctcacccatttctctgtatcattccttcctggaacactgtcttagagtctcaatctagaacttccttttatgttgttcttggtccctggtgctttcccactgctaaatcattttcttttctttgttctatacaaccaagttttattttgaaatttgacgagttaattaattgtatttgtgccttgcccatctccagaagtacattgctccttgagggcaggggccaggctccacactcctttaacctgcctgccccgtctcctgctgggcatgtgctgatgggtggccatgctcctgtgtctgcagccacagtgccagctccctgcgcccggccgacctgcttgccctcatcctcctggttcaggacctctaccccagcgagagcacagcagaggacgacattcaggtctcagggcagctttctgggcagagggaggccattagggaggtagttcagaaaacctgcctgaagatggtgggcaggctccccctggggactccatgttttctaagtcacaattctgggtgtgtggttgggcgtgacttctttcccactgctttcagatgtaaggggaattctggagtgcacatggtccagtgggttaaaagtgcagatttttcaagtcagccatggttcgaaacccagcttcaacacctggctgtgtgagctgagcccgtacttgcacccccagagcctcagtgcccttatctgtgcaatgggaataacaaagcatctacttctcaggggtatttggagggacaaaaggggtggttcccacagaacctggcactgcctggggcatagtgaatgcttagtgagtgtcagccaccaccatcgctgttgacctcatcaccaggggtagtggtgggttggataccattgtgttggaatttctcgaatttccacagaacagaccgcctagaatcgaatccctgggaagtctgaggaccacacacccaggactgcacccggaacgggtggaggggtggaggggtggaggcttctctgtgaagcgctgggaggcagaaggggtggagggagccaggtcagataggagctaaccagcctctcccctgccctgcacagccttccccgcggagggcccggagcagccagaacatccccgtgcagcaggcctggagccctcactccacgggcccaactggggggagctctgcagagacggtgtgtgctgtgcacttcgtggagtcaggggcaggaggggatcggcctctgcaggcgaccaggcctttcccatccctcctgggagagcagggacagggttgagccagctgggagagcctctcaacctgagccaccttctccattccaggagacagacagcttctccctccctgaggagtacttcacaccagctccttcccctggcgatcagagctcaggtgaggaccggaggaaagcaggaggaaacaatagctagctgcgagcgacaggcagcccaggacatctgtcttaggctccagtggacccccgtgcctcctaaggcttgagtgcaggtacccgtgttcctagagcacaggacgctgtctgcggctccccatcttccctgccagctccagcctgaactcaaggattgttaagaccactccactgatccctaaagctgttgatgacaagttgattcatttaaaacttctgtacatgcattctcagactcatcttttttgtaattaaaattaaaaattaagttaaatttagtaataatcatctaatttctatacattctaaaatatattcagcatctgtagtttatactttgtttctccaaagtatgtgggtaaacaataaaaaaaaactataaatattcaaaatggttgaggtgtggtggctcacgcctgtaatcccagcactttgggaggccgaggcgggtagatcacctgaggtcaggagtttgagactagcctggccaacatggcgaaaccccatgtctactaaaaatacaaaaattagccaggtctggtggcaggcgcctgtaatcccagctactcgggaggctgaggcaggagaatcgcttgaacccgggaggtggaggttgcagtgagccaagatcatgccactgcactccagcctgggcgacagagcaagactctgtctcaaaaaaaaaaacaaaacaaaactacaaatattcaaaatgttaacaaaaaatggacaaccttgcttagagaagtagataaaccaaaatccagactgttgtggtcactatgaataaacattacatttatttctgaagttcttaggtaaaaaaaaaaaaaaaaaagggtcctgtggtccctccacatcatctgatggaagaaagaaggccagggtttcaggaggagaaacctactggggactaggatttgaaaggaatttattatgtggctgcttttaacccaaccctggcacattggaatcaccaggcagcttcagccagcccaattaagttacagtctgtgggcctgggacccaggtgtgaatacttctaggaaattttcccaggtgagttcagtgtgcctcgggtgcaaaccactgctgtgcacagatttaggttacagcatgctttgccccctggctgcatattgaactcacctggggatctttaacaattattgaagctgagcctgtacccggagatgctgactcagttggtctgagctatgccctgggcgtcaggattttgtaaaagtccccaaatgattttcgtgtgtagccaaggttgacaaccactgggttagatgcttttaactttaggtctggctagaagcctaggaccccctgagactgtgtgtgaactcactgatgcctgtgcattcctggggtgagggttcctagctatcttcagattccctgagctcttgatgagcctgagacctgttgagaagcagagttctgggtaatctccgaagttcctcttaccactcccttcctcattcatcaccatcttcctcccagtccctctctcttgatagtggttttttatgccttaaaactgtaaaaaataatgctgttccaccgtgcagagaactcacaacttacaaatggtttgggttgcactcatccatttgtaaatcaggtgtttaagatgtaggaacacacttcccccaaagaaacatgattataaatgagggttgtttgcaatgaaatataagaggtaacagtattattacagacacataatatttcagatatgtggtgggttcagtaggtttttgtgcgttatattaggaaggaaatccacctcaattcccagcacacagcaggtgctcagtaagagcttgccggttgaataaatgaatgggcaaacgtggactgtgtgtgctgactcctgaggggcgggttgaggcctgaaggaatacaggggacagaacaaggaggggattgggggcaagggaggggggaggaagatgcccctctaccccctgaccaccattaccaaacatgtcctcaggagcttgattctcagcagctggctctgggggcagcttctctgccaggcccaggccgccttagccctggtactgcagagttcaccttgtgcctgccaacttaggatgaaggggtgttgccccagccacattagcacccctgcgtggagctggcagccaagggctgaggttgtggggggcacctgggccccctaccccatgctgttgagccattgcttacatctcatggtacttacatcgttatgttattacctgtggcctgcaggtagcaccatctggctggaggggggcaccccccccatggatgcccttcaggtgagtttctcctgtgcctgcctgggcgccagctgatctgagatgccgcagtgagtattgggggctctgagggtttcgcctccagggtgactctacccgtgccagccctcctcctgcccaccccagggctggtcagtgcaggtgcctgtcctggtgccagagctcagcccagaggcagggtccaggaatgggctgtgaggggtggcgaacttgcccctcccctcccccaggtgctgtccctcagctccattgttcttgggagtgaaagtccaatagaattttttttttaagtgagcatgtatatttattgtagaaaaatcgggaaatacaaaagtaaactataaaaaagggaataaaaattactcttaatcccgtcctcaaaatgagattaacatcttggggtgtttccttctagtctttttttcctatgactttacacacacacacacacacacacacacacacacactacatatgtacacatgtgtatttttaaaatcagatttggatactaacgtgtttcattatacttttttatttaaacatttttccatttcctaagcactcccacagtgtggtttgtaatgattggtagtccatcacatgcatatgttatttatctagcaaatccccaggaaaatcgcgtcatgtgtccagtgtttgctgttaggtatgacactgaagaggaatttttgtggcatctctcatgatttccttaattctataattttttgcactaaaggctttcttgcttagatccctctgtaaggctggagccttgcccatttggtcactttatgcctcagtttccccaatttgagtggctgttgggatgttctgagggtgattgaaatgatacaatgttgaacattagatacctccatctgttgcaaatgtggggaggggacctctccccgtccactccccatccacgagtgtttccctgccttctcggtcctctgtgccaccacccagcccctctgcccctgcccactgccctgcttggcacccgggccagactctgggcagaaaggcccaggagcagctgagggagaggggcaacagcgaaactggagctgcgagggcaggttcagcagagtgcaggaatttaaaaactggagtttcttggagctaaaaatgattatttcttgtggttcacagatagggccgcaatgggtgggtccaacttagggatcccacctctcactgcagctcttcttcctctgtagatagcagaggacaccctccaaacactggttccccactgccctgtgccttccggccccagaaggatcttcctggatgccaacgtgaaggaaagctactgccccctagtgccccacaccatgtactgcctgcccctgtggcagggcatcaacctggtgctcctgaccagggtaggagagcccctcaccctgccctgatgatgcttagggttggcacgtcttccccaggggcagccccgttcacccgcctctcggcccttaccctcagagccccagcgcgcccctggccctggttctgtcccagctgatggatggcttctccatgctggagaagaagctgaaggaagggccggagcccggggcctccctgcgctcccagcccctcgtgggagacctgcgccagaggatggacaagtttgtcaagaatcgaggggcacaggagattcaggtgagacccaagttccagtcctccccacctggggaagaggcagggctggcagcagggtacatccggtccacagcagctgaggggccaatgggcctgggttcctgtccgggctccacctcccccgggcctacgatccttgttttccctattatgaaatgatattgaaaacttagctgctttttggttttcagaatctttttatgtgtgtttggcagaatacgaattataattccccttttttaggtgtggaaactaaggcttagacaagttttaacttggccaagattatgcagctcatgagcagtggagccagagcccggatgcagtgagcaagtgcagtcgggatccgcccgtcacgggcttcctctctgcagcggggctgtgtccccgggctcacagggcaacacagggatgtgcaggtcacggctccaccccacccccagtgagcttagggcccaggtggggagctgagaccaggagacaggtgagaatgtgcaggcagtagaaacagtccatcaccccgtgctctgacaaagcccagatcagggcctggacggcagtggggctggtggggcttgactctggatttaagcagtggaggcgcctggtgtttgaggagctgggacccattgtggctggagtgcctgtcagtctgaaggctgcaggattggctggaggaggcagtgccacatcccgcagtgcctcagggtgtcctaaggagcactttcactagaacaccaagttcttctgctttatagagatcccgtgaggccgccccctgcatggctaccccatgcccaccccataccctcccagcttctgcagcagcacctcctccgcacaccccagccgctgccctgtgtgtgccccccaccccgaggggctggcctggttgctgtgacggtgctactatgtgtgcctgtgcccgtcagacagcgagcccctggaaactgccctttaaataaacgctgctgagtgactagaacatggcacactgaagtctgcagggggctggtggggcctgccagggtagcctgcattggccagaagggcagatttgtctgggggccctgtgccctctcagagcctgatctgagaaggactttggcctggacctcactggaaatatggtcgggatgcaaacctgccccctgtcttccttccagagcacctggctggagtttaaggccaaggctttctccaaaagtgagcccggatcctcctgggagtgagtggtgggcctcaggacaaggggtgggtcgtgtgcccaggggactgttccctgggaggccacatctcctccaccactgcccttcatttatcagcaaaataatttcaagaaaggagatttcttcccacatacgtggagcaccgcgtggagaagctgggaagctccttcccattgcctgatcagctgtggctgcccccttaggtctttccatctgtctgtcctgggtgcaggagcagggtggtccacctgggagtgaggggctccccaggttggtctgtcctgggtacaagagtggggtggtccacaagggggaagggctccccaggtctgtctgtcctgggtgcaggaacaaggtggtccacacagggcgaggggctcccctaggtcccttctgctgtaatgccctcctctctcgtgctcaggctgctccaggcatgtgggaagctgaagcggcagctctgcgccatctaccggctgaactttctgaccacagcccccagcaggggaggcccacacctgccccagcacctgcaggaccaagtgcagaggctcatgcggtaagtgcagtgcggccccctgggtggccagggcagggtctggggcccgtacttccttcacgcagcccgagcttccctcggcagggagaagctgacggactggaaggacttcttgctggtgaagagcaggaggaac

SEQ ID NO: 12416 - DNA, 801 bp, Homo sapiens
gctgcggcccccagacctggcgcagcgtgtccagctgtgggagcacttccagagcctgctgtggacctacagccgcctgcgggagcaggagcagtgcttcgccgtggaggtgactactgggcgcgggagtcctcaggacttgaagctgtcagccacagtgccagctccctgcgcccggccgacctgcttgccctcatcctcctggttcaggacctctaccccagcgagagcacagcagaggacgacattcaggagacagacagcttctccctccctgaggagtacttcacaccagctccttcccctggcgatcagagctcaggtagcaccatctggctggaggggggcaccccccccatggatgcccttcagagccccagcgcgcccctggccctggttctgtcccagctgatggatggcttctccatgctggagaagaagctgaaggaagggccggagcccggggcctccctgcgctcccagcccctcgtgggagacctgcgccagaggatggacaagtttgtcaagaatcgaggggcacaggagattcagagcacctggctggagtttaaggccaaggctttctccaaaagtgagcccggatcctcctgggagctgctccaggcatgtgggaagctgaagcggcagctctgcgccatctaccggctgaactttctgaccacagcccccagcaggggaggcccacacctgccccagcacctgcaggaccaagtgcagaggctcatgcgggagaagctgacggactggaaggacttcttgctggtgaagagcaggaggaac

SEQ ID NO: 12417 - DNA, 10328 bp, Homo sapiens
catttgcaggaccagggatgctgtgctgctctcccatgagccagtcaccgagtcggtctgctgcagccctttctgaacctctggccgtctggatgctccactgtgcttgccaaggtagatgatcttgccccacctggggaggacagggaggcaggcagcatccaccctggggctttgggaggcagatggaatgaggtaggcagtggactgagtgctactgggctctgcacacctgctcatcccctccccagccctgcatcctgaggccacccccatcctgatgcctcatctctccttcacccctcgaatccaggcaggtcatcacagcctgctgcatctttaaagctcctcccagcccccaccaaggggtgagcactcattacctgacacccgcacctagatgaccgccttcatgaccttgacctgcccatctccagccagccggtcacttctccgctcacaaccacagcctccattccatagcccactgctccctaacccatacactctggtcagctttgtcacatgtacctgggagtcccagagcagcctcttcaggtccacccgcctctcccagcaacctccttttcacacctgttgcactctcagtgtctgccttggcattgagtaattctgtgggaataggctgcattccttcttcactgtgctgttatgtctcctggcatttgccataaataccttgggaccagttgcaccaagttagtttgggaggaattcagtaaggaccactaagctggacatggggatgacggaacacaagacctggagatgctgtgatcctcccaagaaaactggaaatccacttgtgtgagagttacagcagagcttcctaatcattgtcatggcttagcgcacataccacatgattatatctgcgtgacaccctgaggcacataagaggatttgaaaccactgcctgaggcctcttagctgcagcagccagcctggagcactgtcctcaccagcctggtcaggctgccccaagttttagaagatcgagggtttgccgcacgcagagggccatggcacacagtgtgggaagctgtattaaagatcttccagtgggtgaatagttaagacatttcttacataatcaagcacagagtgtgtggtgtgtgtgtgtgtggcgggggggtggggaaggagatttgggagggctgaagacactggtggctgtggccctagaagctgcagcctactaggtacaggggctttaggcagcctctgttctcaccatgaacagggagagcagcatttgaatgaaacttctgtggtgctgaagtaaattcaggggctttgaggctcatcttctggagctgttttttgtttgtttgtttgtttgtttgtttgttttttcagacagagtctcgctctgtcacccaggctggagtgcagtggtgtaatctcggctcactgcaacctctgcctcccgggttcaagcaattctcctgcctcagcagttatcccgagtagctgggataacaggcacttgccaccatgcctggctaatttttgtatttttagtagagacggggtttcaccatgttggccaggctggtctcgaactcctgacttcaggtgatccaccccccttggcctcccaaagtgctgggattacaggcgtgagccaccgcgcccagccctggaactgtttttatctgagggagagatatctctggactgcccagagatggaggtgcaccagtgccctccgatccacaccaggcactaactggctgccgtgagcatggcctccctgggcattcggctccatgtctaggccaagacctgggtcccttcctgtgccagtctggttccagtaggccccgtggtgggtctgttgctgtgctgagagggaccagataccacagaggaaagggccccagccttggcatcaaacaggtctgggtccagatcccagctttgccacttcaggctgtgcctgtgtcctgctctctaaaatgggggtacctgaagagttctactttgtccagttgtgagggtgcaacaaaaatggaagtcccttgtgatgcctggtgtgcagaaggggctcactgaatgtttgctgaggttggggtcctcttcgttactcagactgagctcatagatgttggggctggaggctgaccttgaccttgcctttccctggcagatgaagtgcgtcttggtggccactgagggcgcagaggtcctcttctactggacagatcaggagtttgaagagagtctccggctgaagttcgggcagtcagagaatgaggaagaagaggtgagtgcagggtaggcagtcccaggaggggtggataggaaggaaccatacaaaactcccagcaggcagagaggcaggaaaacctgtgttcaccctgtcctgggcagcatgagcagggtgctgggtggggtccagcatccttcacacctagacccttatcctcaaggttggcctcttgatgctctgagctcggtgaccccacccccacaccccaccagtcctctctggactaaatgagggcaagaagaagtcgaattttatcacgtaacagaagaacttggagccatcagtttctgtaacctaaaaagtttaacaaggctgggcgcggtggctcacgcctgtaatcacaacactttgggaagccaaggtgggccagttgcttgagctcagggatttgagaccagcctgggcagcatggcgaaaccctgtctctacaaaaaaaatacaaaaattagccaggtgtggtggtgcgtgcctatagtcccagctacttgggaggttgaggtgggaggatcacttgagtccaggtggtagaggctgcagtgagccgagactgtgcccatgcattccaacctgggcgacagagcaaaaaaaaaaaaaaaaagtttaacgtaagctgaacacgttaattttttaatagctgtattaaggtatgattaacataccataaattgcacatatttaaagtgcataatttgataagctttgatatgtatatacctatgattctatcacaatcaataaaaggaatatatctaccacctcaaacatttgtaatcccttctttcccatccccatcgcataggaactgctgatctgctttctgtcatgatagattagtttgtatcatatggccttatataaatggagtcatacagtatgtgcttggatttagtttggttttggtttgactgctttcactcagcataattattttgtgattcatctgtgttgtggcatgtatcaatcgttcattccttgtcattgagtagtaatctattgtatcaggatgccaccatttgttcattcatttacttgttgatggacatctgtgttattttcagtttttgactattacaaataaagcaactatgaacatgcacgtacaagtctatgtatacatggatgctttcatgtccaaggacagatacttaggatagactggctaggtcatgtaggtgtatgtgtaactttttaataaactgccaaacttttccaaagtggttgtgtaatttttgattccacctgtagtgtttgagagttcagttcctccatatcctcaccaacactatagtccgtctttttaattttagccattctaatagatgttcactagaatctcactgtgttttaaatttcatttccttaatgactaatgcttttgagcatcttttcatgtgcttatttgccatatcttttgcccagtttttatttgagttgattgtttcttcttcttattcttactgagttttgagagcttctaatatattttggatggaatcctttatcagatacatgttttacaaatattttctttcagtttgtggcttgtgtttgtattctcaatggtatctttcaaagagcagaagtattagaactcgagtttatccattttgcatttatggattatgcttttagtgttatatctaagaaatctttgcccaacttacaaagagttttctctacatattcttttgaaagttttatagttttaggttttatatcaggtctgatgatctactttgaatttttgtgtgtggtatgagctatggattgaagataattttttttttgcatgtggacatccagttcaacagtttaacattacaactcagaaatacttgtcattttcacttacataatttccactctacattttaaaggagtaatttattttgaaaatgttttccagattaattttgggttaaaaatatttttactggggatgcagtggaaggtgttcttacatttctgcagcatgggctgattgcctctctgtccctttctgctctaaggggtctcatcatccagccaatgagtgagctgactccacctcagggagtccatttaccatcaacatcactcgtgttctcatcacagtctttaggcaaacacaagatatcagagatcatagacattcaagtggttttatttaagctaactgttaggcttttttattttttaacagtcaatacatataatatttaaattaagaatttttaaatatttcagtttttaaactactgttacaactatgtcaacttaagaagcaaactatttggtggcctttctcttcctctttattgaaaacctggcaaaggaacgaactcctgaattttcagttcctaaaaatgagtagtgtaaaggaaaggtggtctttaaagttttttttttttgttaatgtgcaacacattcttttctcatcatataaataatgagttaattgtaggaaatttggaaatacaaagagatagtttttaaatgacctataattccatgacccagagctattagctttttaatatactttctttgggtctttattttttctatataattgggattataccacatttacagttttactgcctgtttttttttccacttgccattatatcaagatatttcttctatttttttaaatagtctcagaagcataattcttaatggaaacattgtactccagtacatgaatcagtgtatcatcctttatttaaccattttcctcatatggacataaatattgctcctaatttgctatatcactcttgctttaagaaacatttgtgcttaaattttatctcatgtcagataaattcctaggataaatttaggataaattcctaaaaataaaaatgttgagtcaaaagccattcaaagatattgtactactttataattccgccaagtaatatatgagtatgctcctttatatacaccaaatatttttatctcccctgtattagtccattttcttaccactataaagaaatgcccaagactgggtactctgtaaaggaaagaagtttaattgactcacagttcagaaggctgtggaggcctcaggaaacttacaatcatgtcaaaaggcaaaggggaagcaagacaccttcttcacaaggcagcaggaaggagaagtgctgagtgaaggggaaagagcctcttataaaaccattagatctcatgagaactcactgtcacaagaacagcatgggggaaactgctcccatgattcaattacctccacctggtttctccgttgacatatgaggattgtggggattatggggattacaattcaagatgagatttggatggggacacaaagcctaatcatatcattctgccccaggaccctcccaaatctcatgtcccttttacatttcaaaaccaatcatgccttcccaacagttccccaaagtcataattcattccagcattaaccaaaaagtccaagactgaagtctcacctgagacaaggcaagtcccttccacctatgaccctgtaaaataaaaaacaagttacttccaagacacaatgggggtataggcattgggtaaatgttcccattccaaatgggagaaattggaactatggggctacaggacccatgcaagtccaaaatccagtggggcagtcaaatcttaaagctttgaaatgatctcctttgactctatccacgtccaggtcacactgatacaagaggtgggctcccaaggccttgggcagccctacccctgtgcttctgcagggcacagtcctcttcccagctgttttcacaggctggtgttgagtgtctgcggcttttccaggtgcatggtgcaagctgtcggtggatctaccattctgggggctagaggatgatggccctattcttacagctccactaggcaatgccccagtggggactctgtgtggaggtgtctgaccccacattcccttaatcactctagcagaggttctccatgagggctctgcccctgtagcaaatttctgcctggacatcctgccatttccatacatcctctgaaatctaggtggaggttcccaaacctcagtttttgatttatgtgcacccgtgggcccaataccacatgtaggtcaccaaagcttggggcttgcactgtctgaaacaacagccagagctatatgttggcaccttttagccatggctaggacgcagggcaccatgtccccagagtgcacaaagcagcaaggccctgggcccaacccctgaaacagttttttcttcctaggcctccaggcctgtggcgagagggcctgctgtgaagacctctgacaggccctggagacatttttcccattgtcttggtgattaacgtttggctcttcattatttatgcaaatttctgcagccagggcttgaatttctcctcagaaaatgggcttttcttttctattgcatcatcaggctgcacattttccaaacttttatgttctgcttcccttttaaacataagtcccaattccaaaccatctattagtgaatgcataaaactgagtgctttttagagcacccaagtcactccctgaatgctttgctacctagaaatttcttccaccccaaatcatctctctcaagttcaaagttgcacagatctctagggcaggggcaaaatgctgccggtctctttgctaaagcataacaagagtcacctttgttccagttccaaataagttcctcatctccatctgagactacctcagcctggacttcattgtccatatcactatcagaattttgttcaaaagcattcaatgagtctctgggaagttccaaactttcccacatcttcctgttttcttctgagccctccatactgttccaacctctgcctgttacccagtttcaaagtcactttcacatttttgggtatctttatagtagcacctcactctctgtggtaccaatttactgtgtcagtccgttttcgtaccactataaagaactgcctgagactgggtaatttataaagaaaaaaggtttaattgactcacagttcagcatggctggggagaactcaggaaacttacagtcgtggtggaaggcaaaggggaaacaaggcaccttcttcgcaaggcagcaggaagaagtgtcaagaaaagtggggaagagccccttataaaaccatcagatctggtgaggactcactcattttcatgagaacaagttgagaacagcctgggggaaccacccccatgattcagttatctccaccaggtctcccttgacacgtggggattatggggattacaagtcaagatgagatttgatggggacacaaagcttaaccatgtcatcccctcaccaaaaaaaagttctattcctgcagaaaaagctatagtcatgccctgcttaatgatggtgatacattctgttaataacaaactcatcattaggtgatttccttgtcatgtgaacatcatagtgtgtgcttacacaaacctagatggtgtagccaactacacacctaggctgtacagtatggcctgttgctcctaggctgcaaacctacagcatgtgactgtactgaatactgcaggcagttgtaacacaatggaaatgtttgtgtatctgaatgaacatagagaaggtatagcaaaaataaagcagtataatcttatggggccactatcatgcgtggtctgttgctgaccaaaacattgctcttcagtatgtgactatactgcttttacgatgagtttctatcaacatctagattcataagtgacttctctattaataaaatttgttcaagaaaatcatggtatatgaataattcagcaaatatttgaattcttgcctgtttatggaattctcgcctatctgtggggtattcattaaccaaatattaattgggaacctaccatgtgccagtctctcggggtaaagcagtaaacgtagcaacatgatccttgctttcatggaacttagagtctaaagaaggacattgtacagtgaaccagatggcaaataagtaccatgagttcagatagtgacaaatagtctggagaagttaaatggggtatgggatggggagtgacagaggtggagggcggtagcctgaggtggccagaaaaaaaaaaatctgagctggaaccagaatgataagtaggagccactgtgaaagctggacagactaactgtgggagctgggtacagtccttggttcccgaatgttggcaggaaaacctactccatagtgctgtgtcccacttgtacttcaatgctgcaccttcccgctggccagttgcctgtctttcttttcaaggcaaggtcttactcagcttcttgtagacttccccagctccaagttaggactgtgccttccccatatttcattcacgtctcctgaaatcttcttgggaagtctgctgttttcttcctttctttttattccactacggagaatttgagttgtaactgttccactggctttatcccattttattcacacatttgcaacaaacttgtccagttcctttttgtttttgtttatttgttttgttccttcttttggagagctgagagaatggatggaggaagagcttatcaaagtcaatgcaggcttgttatggaaaataggaaaagtacagaaacatacttaaaaatagagggaaaaaaatcactcctaattcctctatccagaagtaactttaatagtgttggctttctcagtattttatcaatacttcgttttttctatgcattcacattcttgttttatttttagctacaacattgtatcagaggaattttccatgtcattgaaacactctaatattttaagtggctatagacccttccataattttgatgtgctgctatttatttaactatttccctgatactagatgttaacattttttttccagttgtttgctattataaattaggcagtagtgaacatctttgtgcatgtatctttgtcccaatctctgatcattttccttaggacaaattttccaaagtagacttattgcaaaaaacagcatagactttggtacatgctacaaacttccttccagctccccgttcagtgctccccacattccactgttgtaatgaggcccaattccttaatgtttccttctagattcagagcctaaacagcaccattacccagctggccctccccattcttcctaaccaccacccgaagtgttggggacagtctctttttgctcccctccctaccaggacagtgataccctcccaggagggtctaacactatggaacccttgatatcaaggcctgatcttgtcccttccttagttcttggtgtctggcccactctaagctgtgaaattttcccccatttttgcagctccctgccctggaggaccagctcagcaccctcctagccccggtcatcatctcctccatgacgatgctggagaagctctcggacacctacacctgcttctccacggaaaatggcaacttcctgtatgtccttcacctggtgagtctatagctctggggcccatgttcctcttccctcagcttgatggggagtccacaggcctctcttatttggaactttagactcctttagaaggcagaaacggcatcttatcaaacccgcctgggacccgagcctcccctggcttgtctgcagagaccagggcaggtgaagggagtgcccttggggctggctgacactggcctgcctgtgcctgcagtttggagaatgcctgttcattgccatcaatggtgaccacaccgagagcgagggggacctgcggcggaagctgtatgtgctcaagtacctgtttgaagtgcactttgggctggtgactgtggacggtcatcttatccgaaaggagtgagtcttcaaagctggtcccctctgtcctttgccgagcaccctcgctgggccaggcagcgtgtgcccagcccctgtgaagctgccatttttcacatactgcccccagctgggtccctaggtcagagaaacagctcaagtgaaccttggagaccatctggtctgaccctctgactttatatctgg

SEQ ID NO: 12418 - DNA, 698 bp, Homo sapiens
catttgcaggaccagggatgctgtgctgctctcccatgagccagtcaccgagtcggtctgctgcagccctttctgaacctctggccgtctggatgctccactgtgcttgccaagatgaagtgcgtcttggtggccactgagggcgcagaggtcctcttctactggacagatcaggagtttgaagagagtctccggctgaagttcgggcagtcagagaatgaggaagaagagctccctgccctggaggaccagctcagcaccctcctagccccggtcatcatctcctccatgacgatgctggagaagctctcggacacctacacctgcttctccacggaaaatggcaacttcctgtatgtccttcacctgtttggagaatgcctgttcattgccatcaatggtgaccacaccgagagcgagggggacctgcggcggaagctgtatgtgctcaagtacctgtttgaagtgcactttgggctggtgactgtggacggtcatcttatccgaaaggagtgagtcttcaaagctggtcccctctgtcctttgccgagcaccctcgctgggccaggcagcgtgtgcccagcccctgtgaagctgccatttttcacatactgcccccagctgggtccctaggtcagagaaacagctcaagtgaaccttggagaccatctggtctgaccctctgactttatatctgg

SEQ ID NO: 12419 - DNA, 10484 bp, Homo sapiens
gctgcggcccccagacctggcgcagcgtgtccagctgtgggagcacttccagagcctgctgtggacctacagccgcctgcgggagcaggagcagtgcttcgccgtggaggtgactactgggcgcgggagtcctcaggacttgaagctgtcaggtcagagggggcgtccacctttaagaccatgttttaaccctaatgaatgaaggcacaagcagcccctgaaactcgtgtattcagagagagttgttctttctggccatatggagggttgggtaccctgatgggctttcccatggtaaaacagctcgatcctggataacacatacttttaatgcaatttttgggttcactgtaaattacaggaatctttgaagacagttccttcaaccctcccctccttttcccacaaaattatattgagctggaactggaggggaaagcagtggagaaaaacacagcgctaaaggcaagattccctgagtgcaaatgataccagcactacagccagtaaatagccttaggccagcagcagcataggagagctgagcctgcaactctaggttaagcccagccccaaaaagttaaagtggctactggtccttttataaagccctagtaaataaaaaactaaaaaattaaaaataaaaactaaagtggctgctggtcagtagcactccttgccttcctaaagaggtaaaccaaattctctttcaagcagtggttttcatactccagtgtgtgtcagaatcctctgtagggcttgttaaatacaggttactgggcctcactttcagcttttctcatttagcgagtctgggatgggggctctagaacttgcatttcttttttttttttttttttgagatggagtctcgctctgttgcccaggctggagtgcagtggagcaatcttggctcactgtgacctctgcttcccgggttcaagcaattctcctgcctcagcctcctgagtagctgggattacaggcacgtgccaccacgcctggctaatttttgtatttttagtagagacggggtttcactatgttggtcaggctggtctcgaactcctgacctcatgatctgcccactcggcctcccaaagtgctgggattacaggcatgagccacagtgcccggccctagaacttccatttctaaaaaattcccaggtgctgtttattgtgcttgtccaggaaccacactttgaaaaccactgctagagcaggaaaggtaaagatcaaacaaacgtgaactcacaactgaagaaaatcagatatggaagaaaataagccaccacgagtgagagtcaggaaaatcaatcaccaacagatttagatcccaaggcacttgatacattggaactattaggtatagaatataaaataactatgaaatatttaaaaatatgaaatgtagaatcacaaaatgagataagaagaaactctaaattgaccaggcaaatttgaaaaagaacacgtacagatattttagaaaagaaaacatagttgttaaaatgaaaaactcaagggatgtgttaaatagcagatgagacatagctagagggagaattaatgagctggaaaatagatctgaaggaattcattctcatacccccactcattcactcttccaataaacatatagtacctattatatgctaagaggtgtgccaggccatgggaataaagagatgaataaagacatattcactgcccttgaggggaaatcagccatgtatatactaaaagatataataaagaatcctggtgccatattaggtttttcatcaaaagctatggtggcacaagagatggagtggtaaactctttctgggacattaggaaagacttcttttaggaggtgacctaatgccattagcataaaatccaaactcttcccaagcctaccaggccctgtgtgatctatcgctgcctatttcactctagcttcatcttatgcctctcttgtccacgcttactgagtgctagtcacatgaaacttctttaagtttcaggaaaactctatatttagatctgtccaatatgatagtcattagctgcatgtggctgttgaacatttgaaatataactagtgcaaattgagttatgctatgcatgtgaaatatataccagattttggtaacttagcacaaaaaagaatgtaaaacattccattaataaggcttttatatcatatggtgataatattttggatatattcagtaaaatgaaatatatcattaaaattaatgtcaactgtttctttttacttttttaatgtggtcactggaaacatttaaattatgcatagggcctttcttttatttctgttggacagcaccattgcaaactctgtccccatctcatggcctctgaatatgcagtctccttgacttgcagtgttctctctctccctctttctctggtgggccatctggttgtttagatattagtttaaaggtgacctaattcagggacatttctttggacaccctacccaaggaggtctctgctatttctctctagcctagtgctgtgtattttgtacttggtgcttacttacaaatggcacttactttatttccttgtgtattgccttgcctcatccactggagtctagtgaccagacagtaagcctcaggaaggctgggacctggtgggtcttagtccccctgtttccaagtatctggtgcagagtccaagctcactgtggacagagtgaatgtccccactagcccagggcttggagtggggcaaggttgttggtgatatggcttcctctcccttcctgccctggctaggccctggagcgactgattcacccccagctctgtgagctgtgcatagaggcgctggagcggcacgtcatccaggctgtcaacaccagccccgagcggggaggcgaggaggccctgcatgccttcctgctcgtgcactccaagctgctggcattctactctaggtgagctcaaggtctggcatgtggtggctaaaggctccctggccttctcactcccctatggcctctgcctgaaaagcaccacctgcccagccaagaatcacctcctccatgaagcctgaaaccttcccagatttgattctccaacctttttcagctcacccatttctctgtatcattccttcctggaacactgtcttagagtctcaatctagaacttccttttatgttgttcttggtccctggtgctttcccactgctaaatcattttcttttctttgttctatacaaccaagttttattttgaaatttgacgagttaattaattgtatttgtgccttgcccatctccagaagtacattgctccttgagggcaggggccaggctccacactcctttaacctgcctgccccgtctcctgctgggcatgtgctgatgggtggccatgctcctgtgtctgcagccacagtgccagctccctgcgcccggccgacctgcttgccctcatcctcctggttcaggacctctaccccagcgagagcacagcagaggacgacattcaggtctcagggcagctttctgggcagagggaggccattagggaggtagttcagaaaacctgcctgaagatggtgggcaggctccccctggggactccatgttttctaagtcacaattctgggtgtgtggttgggcgtgacttctttcccactgctttcagatgtaaggggaattctggagtgcacatggtccagtgggttaaaagtgcagatttttcaagtcagccatggttcgaaacccagcttcaacacctggctgtgtgagctgagcccgtacttgcacccccagagcctcagtgcccttatctgtgcaatgggaataacaaagcatctacttctcaggggtatttggagggacaaaaggggtggttcccacagaacctggcactgcctggggcatagtgaatgcttagtgagtgtcagccaccaccatcgctgttgacctcatcaccaggggtagtggtgggttggataccattgtgttggaatttctcgaatttccacagaacagaccgcctagaatcgaatccctgggaagtctgaggaccacacacccaggactgcacccggaacgggtggaggggtggaggggtggaggcttctctgtgaagcgctgggaggcagaaggggtggagggagccaggtcagataggagctaaccagcctctcccctgccctgcacagccttccccgcggagggcccggagcagccagaacatccccgtgcagcaggcctggagccctcactccacgggcccaactggggggagctctgcagagacggtgtgtgctgtgcacttcgtggagtcaggggcaggaggggatcggcctctgcaggcgaccaggcctttcccatccctcctgggagagcagggacagggttgagccagctgggagagcctctcaacctgagccaccttctccattccaggagacagacagcttctccctccctgaggagtacttcacaccagctccttcccctggcgatcagagctcaggtgaggaccggaggaaagcaggaggaaacaatagctagctgcgagcgacaggcagcccaggacatctgtcttaggctccagtggacccccgtgcctcctaaggcttgagtgcaggtacccgtgttcctagagcacaggacgctgtctgcggctccccatcttccctgccagctccagcctgaactcaaggattgttaagaccactccactgatccctaaagctgttgatgacaagttgattcatttaaaacttctgtacatgcattctcagactcatcttttttgtaattaaaattaaaaattaagttaaatttagtaataatcatctaatttctatacattctaaaatatattcagcatctgtagtttatactttgtttctccaaagtatgtgggtaaacaataaaaaaaaactataaatattcaaaatggttgaggtgtggtggctcacgcctgtaatcccagcactttgggaggccgaggcgggtagatcacctgaggtcaggagtttgagactagcctggccaacatggcgaaaccccatgtctactaaaaatacaaaaattagccaggtctggtggcaggcgcctgtaatcccagctactcgggaggctgaggcaggagaatcgcttgaacccgggaggtggaggttgcagtgagccaagatcatgccactgcactccagcctgggcgacagagcaagactctgtctcaaaaaaaaaaacaaaacaaaactacaaatattcaaaatgttaacaaaaaatggacaaccttgcttagagaagtagataaaccaaaatccagactgttgtggtcactatgaataaacattacatttatttctgaagttcttaggtaaaaaaaaaaaaaaaaaagggtcctgtggtccctccacatcatctgatggaagaaagaaggccagggtttcaggaggagaaacctactggggactaggatttgaaaggaatttattatgtggctgcttttaacccaaccctggcacattggaatcaccaggcagcttcagccagcccaattaagttacagtctgtgggcctgggacccaggtgtgaatacttctaggaaattttcccaggtgagttcagtgtgcctcgggtgcaaaccactgctgtgcacagatttaggttacagcatgctttgccccctggctgcatattgaactcacctggggatctttaacaattattgaagctgagcctgtacccggagatgctgactcagttggtctgagctatgccctgggcgtcaggattttgtaaaagtccccaaatgattttcgtgtgtagccaaggttgacaaccactgggttagatgcttttaactttaggtctggctagaagcctaggaccccctgagactgtgtgtgaactcactgatgcctgtgcattcctggggtgagggttcctagctatcttcagattccctgagctcttgatgagcctgagacctgttgagaagcagagttctgggtaatctccgaagttcctcttaccactcccttcctcattcatcaccatcttcctcccagtccctctctcttgatagtggttttttatgccttaaaactgtaaaaaataatgctgttccaccgtgcagagaactcacaacttacaaatggtttgggttgcactcatccatttgtaaatcaggtgtttaagatgtaggaacacacttcccccaaagaaacatgattataaatgagggttgtttgcaatgaaatataagaggtaacagtattattacagacacataatatttcagatatgtggtgggttcagtaggtttttgtgcgttatattaggaaggaaatccacctcaattcccagcacacagcaggtgctcagtaagagcttgccggttgaataaatgaatgggcaaacgtggactgtgtgtgctgactcctgaggggcgggttgaggcctgaaggaatacaggggacagaacaaggaggggattgggggcaagggaggggggaggaagatgcccctctaccccctgaccaccattaccaaacatgtcctcaggagcttgattctcagcagctggctctgggggcagcttctctgccaggcccaggccgccttagccctggtactgcagagttcaccttgtgcctgccaacttaggatgaaggggtgttgccccagccacattagcacccctgcgtggagctggcagccaagggctgaggttgtggggggcacctgggccccctaccccatgctgttgagccattgcttacatctcatggtacttacatcgttatgttattacctgtggcctgcaggtagcaccatctggctggaggggggcaccccccccatggatgcccttcaggtgagtttctcctgtgcctgcctgggcgccagctgatctgagatgccgcagtgagtattgggggctctgagggtttcgcctccagggtgactctacccgtgccagccctcctcctgcccaccccagggctggtcagtgcaggtgcctgtcctggtgccagagctcagcccagaggcagggtccaggaatgggctgtgaggggtggcgaacttgcccctcccctcccccaggtgctgtccctcagctccattgttcttgggagtgaaagtccaatagaattttttttttaagtgagcatgtatatttattgtagaaaaatcgggaaatacaaaagtaaactataaaaaagggaataaaaattactcttaatcccgtcctcaaaatgagattaacatcttggggtgtttccttctagtctttttttcctatgactttacacacacacacacacacacacacacacacacactacatatgtacacatgtgtatttttaaaatcagatttggatactaacgtgtttcattatacttttttatttaaacatttttccatttcctaagcactcccacagtgtggtttgtaatgattggtagtccatcacatgcatatgttatttatctagcaaatccccaggaaaatcgcgtcatgtgtccagtgtttgctgttaggtatgacactgaagaggaatttttgtggcatctctcatgatttccttaattctataattttttgcactaaaggctttcttgcttagatccctctgtaaggctggagccttgcccatttggtcactttatgcctcagtttccccaatttgagtggctgttgggatgttctgagggtgattgaaatgatacaatgttgaacattagatacctccatctgttgcaaatgtggggaggggacctctccccgtccactccccatccacgagtgtttccctgccttctcggtcctctgtgccaccacccagcccctctgcccctgcccactgccctgcttggcacccgggccagactctgggcagaaaggcccaggagcagctgagggagaggggcaacagcgaaactggagctgcgagggcaggttcagcagagtgcaggaatttaaaaactggagtttcttggagctaaaaatgattatttcttgtggttcacagatagggccgcaatgggtgggtccaacttagggatcccacctctcactgcagctcttcttcctctgtagatagcagaggacaccctccaaacactggttccccactgccctgtgccttccggccccagaaggatcttcctggatgccaacgtgaaggaaagctactgccccctagtgccccacaccatgtactgcctgcccctgtggcagggcatcaacctggtgctcctgaccagggtaggagagcccctcaccctgccctgatgatgcttagggttggcacgtcttccccaggggcagccccgttcacccgcctctcggcccttaccctcagagccccagcgcgcccctggccctggttctgtcccagctgatggatggcttctccatgctggagaagaagctgaaggaagggccggagcccggggcctccctgcgctcccagcccctcgtgggagacctgcgccagaggatggacaagtttgtcaagaatcgaggggcacaggagattcaggtgagacccaagttccagtcctccccacctggggaagaggcagggctggcagcagggtacatccggtccacagcagctgaggggccaatgggcctgggttcctgtccgggctccacctcccccgggcctacgatccttgttttccctattatgaaatgatattgaaaacttagctgctttttggttttcagaatctttttatgtgtgtttggcagaatacgaattataattccccttttttaggtgtggaaactaaggcttagacaagttttaacttggccaagattatgcagctcatgagcagtggagccagagcccggatgcagtgagcaagtgcagtcgggatccgcccgtcacgggcttcctctctgcagcggggctgtgtccccgggctcacagggcaacacagggatgtgcaggtcacggctccaccccacccccagtgagcttagggcccaggtggggagctgagaccaggagacaggtgagaatgtgcaggcagtagaaacagtccatcaccccgtgctctgacaaagcccagatcagggcctggacggcagtggggctggtggggcttgactctggatttaagcagtggaggcgcctggtgtttgaggagctgggacccattgtggctggagtgcctgtcagtctgaaggctgcaggattggctggaggaggcagtgccacatcccgcagtgcctcagggtgtcctaaggagcactttcactagaacaccaagttcttctgctttatagagatcccgtgaggccgccccctgcatggctaccccatgcccaccccataccctcccagcttctgcagcagcacctcctccgcacaccccagccgctgccctgtgtgtgccccccaccccgaggggctggcctggttgctgtgacggtgctactatgtgtgcctgtgcccgtcagacagcgagcccctggaaactgccctttaaataaacgctgctgagtgactagaacatggcacactgaagtctgcagggggctggtggggcctgccagggtagcctgcattggccagaagggcagatttgtctgggggccctgtgccctctcagagcctgatctgagaaggactttggcctggacctcactggaaatatggtcgggatgcaaacctgccccctgtcttccttccagagcacctggctggagtttaaggccaaggctttctccaaaagtgagcccggatcctcctgggagtgagtggtgggcctcaggacaaggggtgggtcgtgtgcccaggggactgttccctgggaggccacatctcctccaccactgcccttcatttatcagcaaaataatttcaagaaaggagatttcttcccacatacgtggagcaccgcgtggagaagctgggaagctccttcccattgcctgatcagctgtggctgcccccttaggtctttccatctgtctgtcctgggtgcaggagcagggtggtccacctgggagtgaggggctccccaggttggtctgtcctgggtacaagagtggggtggtccacaagggggaagggctccccaggtctgtctgtcctgggtgcaggaacaaggtggtccacacagggcgaggggctcccctaggtcccttctgctgtaatgccctcctctctcgtgctcaggctgctccaggcatgtgggaagctgaagcggcagctctgcgccatctaccggctgaactttctgaccacagcccccagcaggggaggcccacacctgccccagcacctgcaggaccaagtgcagaggctcatgcggtaagtgcagtgcggccccctgggtggccagggcagggtctggggcccgtacttccttcacgcagcccgagcttccctcggcagggagaagctgacggactggaaggacttcttgctggtgaagagcaggaggaacatcaccatg

SEQ ID NO: 12420 - DNA, 971 bp, Homo sapiens
gctgcggcccccagacctggcgcagcgtgtccagctgtgggagcacttccagagcctgctgtggacctacagccgcctgcgggagcaggagcagtgcttcgccgtggaggtgactactgggcgcgggagtcctcaggacttgaagctgtcaggccctggagcgactgattcacccccagctctgtgagctgtgcatagaggcgctggagcggcacgtcatccaggctgtcaacaccagccccgagcggggaggcgaggaggccctgcatgccttcctgctcgtgcactccaagctgctggcattctactctagccacagtgccagctccctgcgcccggccgacctgcttgccctcatcctcctggttcaggacctctaccccagcgagagcacagcagaggacgacattcaggagacagacagcttctccctccctgaggagtacttcacaccagctccttcccctggcgatcagagctcaggtagcaccatctggctggaggggggcaccccccccatggatgcccttcagagccccagcgcgcccctggccctggttctgtcccagctgatggatggcttctccatgctggagaagaagctgaaggaagggccggagcccggggcctccctgcgctcccagcccctcgtgggagacctgcgccagaggatggacaagtttgtcaagaatcgaggggcacaggagattcagagcacctggctggagtttaaggccaaggctttctccaaaagtgagcccggatcctcctgggagctgctccaggcatgtgggaagctgaagcggcagctctgcgccatctaccggctgaactttctgaccacagcccccagcaggggaggcccacacctgccccagcacctgcaggaccaagtgcagaggctcatgcgggagaagctgacggactggaaggacttcttgctggtgaagagcaggaggaacatcaccatg

SEQ ID NO: 12421 - DNA, 16292 bp, Homo sapiens
ctctgggggcggcgatcctccctccggagccccccttcaaccctcccggaagtgaggtagggtccctaggggtcccggagcgggcccactcctagcctcacccactccgggcgtgtggccgtgggccggtcgcttcctcgctcggggccaaagttcctcagccgtgaagaggggtggatgtcacaagtcaagcctccttcccagggtggccgtgaggttcgggggtggggggaggtggggatttggggtgaaactggacagaaactggcgtgctaggcaaacgggagccccgcggcggcgaactgctgactcgctctctccagagactcaggggcagggccgggctccgaaggtgtgggaccccagaaggagctgctgaagacgggaccaagggccacagggaggtttgctggggtccagatggtgaaagtgggcgctgggggtcgccccaggttggccccccgccatctggagctcctttcgtcagtgagtcccctccgagttccctttctagggcaagatagcgaggtgaagcggaagtctcagtgtgacaccggcgaggttctcttcccagcagcctttgggaagcatccccctgtttcgggaatatggcattcgggccaatcatgtgggtgatggagcccgtctcagggttcggctgctaaaggccgaactcgtaacagcagtctctgtggcgggtagtcacttgcctcttactggctcacagtgcttgacttcctaattaagttttctgttgttcctgccctctattcaaatatgaatgattccggaaccagattgattaatcctgttatttgaagaagggaagctgggaaataggaataatgatccccacacctatgtaagaacgcagtttgctaaggttactttgcagcttgcctggtcactcccatgatctaaccctgtagggaggtagagtaggggatgttgctctgtttctccgcaggagtttgaggctcagagaggtttatgggacttggcaaagccaaaactagaacctggtcccagatgcctttcctgttagtttccttccattcatcgtatcatcccaggatccccactcccttcaccgggactgcatcctcaccacctgggatgtgctatgctgtctcccgtcagtcactcctagcaagctccctggggctgcttggggagctctgagtgacccgcagaagtgagagcacttcatgggaacaaaggaggaaggaacaaaagtgggcacctgctctgtgcaaagggctgtgctggccgggttcctattctccattatgggaggtgaggggcaggatcccagatatgttcttagcagactgcctcagggcctggagagaccagggaccacgcagcccttctccagcttgtcctttctcaacgggcagcagtcaagaccagggcatctgcctgccctcatattctctctgttttaagcatttgcaggaccagggatgctgtgctgctctcccatgagccagtcaccgagtcggtctgctgcagccctttctgaacctctggccgtctggatgctccactgtgcttgccaaggtagatgatcttgccccacctggggaggacagggaggcaggcagcatccaccctggggctttgggaggcagatggaatgaggtaggcagtggactgagtgctactgggctctgcacacctgctcatcccctccccagccctgcatcctgaggccacccccatcctgatgcctcatctctccttcacccctcgaatccaggcaggtcatcacagcctgctgcatctttaaagctcctcccagcccccaccaaggggtgagcactcattacctgacacccgcacctagatgaccgccttcatgaccttgacctgcccatctccagccagccggtcacttctccgctcacaaccacagcctccattccatagcccactgctccctaacccatacactctggtcagctttgtcacatgtacctgggagtcccagagcagcctcttcaggtccacccgcctctcccagcaacctccttttcacacctgttgcactctcagtgtctgccttggcattgagtaattctgtgggaataggctgcattccttcttcactgtgctgttatgtctcctggcatttgccataaataccttgggaccagttgcaccaagttagtttgggaggaattcagtaaggaccactaagctggacatggggatgacggaacacaagacctggagatgctgtgatcctcccaagaaaactggaaatccacttgtgtgagagttacagcagagcttcctaatcattgtcatggcttagcgcacataccacatgattatatctgcgtgacaccctgaggcacataagaggatttgaaaccactgcctgaggcctcttagctgcagcagccagcctggagcactgtcctcaccagcctggtcaggctgccccaagttttagaagatcgagggtttgccgcacgcagagggccatggcacacagtgtgggaagctgtattaaagatcttccagtgggtgaatagttaagacatttcttacataatcaagcacagagtgtgtggtgtgtgtgtgtgtggcgggggggtggggaaggagatttgggagggctgaagacactggtggctgtggccctagaagctgcagcctactaggtacaggggctttaggcagcctctgttctcaccatgaacagggagagcagcatttgaatgaaacttctgtggtgctgaagtaaattcaggggctttgaggctcatcttctggagctgttttttgtttgtttgtttgtttgtttgtttgttttttcagacagagtctcgctctgtcacccaggctggagtgcagtggtgtaatctcggctcactgcaacctctgcctcccgggttcaagcaattctcctgcctcagcagttatcccgagtagctgggataacaggcacttgccaccatgcctggctaatttttgtatttttagtagagacggggtttcaccatgttggccaggctggtctcgaactcctgacttcaggtgatccaccccccttggcctcccaaagtgctgggattacaggcgtgagccaccgcgcccagccctggaactgtttttatctgagggagagatatctctggactgcccagagatggaggtgcaccagtgccctccgatccacaccaggcactaactggctgccgtgagcatggcctccctgggcattcggctccatgtctaggccaagacctgggtcccttcctgtgccagtctggttccagtaggccccgtggtgggtctgttgctgtgctgagagggaccagataccacagaggaaagggccccagccttggcatcaaacaggtctgggtccagatcccagctttgccacttcaggctgtgcctgtgtcctgctctctaaaatgggggtacctgaagagttctactttgtccagttgtgagggtgcaacaaaaatggaagtcccttgtgatgcctggtgtgcagaaggggctcactgaatgtttgctgaggttggggtcctcttcgttactcagactgagctcatagatgttggggctggaggctgaccttgaccttgcctttccctggcagatgaagtgcgtcttggtggccactgagggcgcagaggtcctcttctactggacagatcaggagtttgaagagagtctccggctgaagttcgggcagtcagagaatgaggaagaagaggtgagtgcagggtaggcagtcccaggaggggtggataggaaggaaccatacaaaactcccagcaggcagagaggcaggaaaacctgtgttcaccctgtcctgggcagcatgagcagggtgctgggtggggtccagcatccttcacacctagacccttatcctcaaggttggcctcttgatgctctgagctcggtgaccccacccccacaccccaccagtcctctctggactaaatgagggcaagaagaagtcgaattttatcacgtaacagaagaacttggagccatcagtttctgtaacctaaaaagtttaacaaggctgggcgcggtggctcacgcctgtaatcacaacactttgggaagccaaggtgggccagttgcttgagctcagggatttgagaccagcctgggcagcatggcgaaaccctgtctctacaaaaaaaatacaaaaattagccaggtgtggtggtgcgtgcctatagtcccagctacttgggaggttgaggtgggaggatcacttgagtccaggtggtagaggctgcagtgagccgagactgtgcccatgcattccaacctgggcgacagagcaaaaaaaaaaaaaaaaagtttaacgtaagctgaacacgttaattttttaatagctgtattaaggtatgattaacataccataaattgcacatatttaaagtgcataatttgataagctttgatatgtatatacctatgattctatcacaatcaataaaaggaatatatctaccacctcaaacatttgtaatcccttctttcccatccccatcgcataggaactgctgatctgctttctgtcatgatagattagtttgtatcatatggccttatataaatggagtcatacagtatgtgcttggatttagtttggttttggtttgactgctttcactcagcataattattttgtgattcatctgtgttgtggcatgtatcaatcgttcattccttgtcattgagtagtaatctattgtatcaggatgccaccatttgttcattcatttacttgttgatggacatctgtgttattttcagtttttgactattacaaataaagcaactatgaacatgcacgtacaagtctatgtatacatggatgctttcatgtccaaggacagatacttaggatagactggctaggtcatgtaggtgtatgtgtaactttttaataaactgccaaacttttccaaagtggttgtgtaatttttgattccacctgtagtgtttgagagttcagttcctccatatcctcaccaacactatagtccgtctttttaattttagccattctaatagatgttcactagaatctcactgtgttttaaatttcatttccttaatgactaatgcttttgagcatcttttcatgtgcttatttgccatatcttttgcccagtttttatttgagttgattgtttcttcttcttattcttactgagttttgagagcttctaatatattttggatggaatcctttatcagatacatgttttacaaatattttctttcagtttgtggcttgtgtttgtattctcaatggtatctttcaaagagcagaagtattagaactcgagtttatccattttgcatttatggattatgcttttagtgttatatctaagaaatctttgcccaacttacaaagagttttctctacatattcttttgaaagttttatagttttaggttttatatcaggtctgatgatctactttgaatttttgtgtgtggtatgagctatggattgaagataattttttttttgcatgtggacatccagttcaacagtttaacattacaactcagaaatacttgtcattttcacttacataatttccactctacattttaaaggagtaatttattttgaaaatgttttccagattaattttgggttaaaaatatttttactggggatgcagtggaaggtgttcttacatttctgcagcatgggctgattgcctctctgtccctttctgctctaaggggtctcatcatccagccaatgagtgagctgactccacctcagggagtccatttaccatcaacatcactcgtgttctcatcacagtctttaggcaaacacaagatatcagagatcatagacattcaagtggttttatttaagctaactgttaggcttttttattttttaacagtcaatacatataatatttaaattaagaatttttaaatatttcagtttttaaactactgttacaactatgtcaacttaagaagcaaactatttggtggcctttctcttcctctttattgaaaacctggcaaaggaacgaactcctgaattttcagttcctaaaaatgagtagtgtaaaggaaaggtggtctttaaagttttttttttttgttaatgtgcaacacattcttttctcatcatataaataatgagttaattgtaggaaatttggaaatacaaagagatagtttttaaatgacctataattccatgacccagagctattagctttttaatatactttctttgggtctttattttttctatataattgggattataccacatttacagttttactgcctgtttttttttccacttgccattatatcaagatatttcttctatttttttaaatagtctcagaagcataattcttaatggaaacattgtactccagtacatgaatcagtgtatcatcctttatttaaccattttcctcatatggacataaatattgctcctaatttgctatatcactcttgctttaagaaacatttgtgcttaaattttatctcatgtcagataaattcctaggataaatttaggataaattcctaaaaataaaaatgttgagtcaaaagccattcaaagatattgtactactttataattccgccaagtaatatatgagtatgctcctttatatacaccaaatatttttatctcccctgtattagtccattttcttaccactataaagaaatgcccaagactgggtactctgtaaaggaaagaagtttaattgactcacagttcagaaggctgtggaggcctcaggaaacttacaatcatgtcaaaaggcaaaggggaagcaagacaccttcttcacaaggcagcaggaaggagaagtgctgagtgaaggggaaagagcctcttataaaaccattagatctcatgagaactcactgtcacaagaacagcatgggggaaactgctcccatgattcaattacctccacctggtttctccgttgacatatgaggattgtggggattatggggattacaattcaagatgagatttggatggggacacaaagcctaatcatatcattctgccccaggaccctcccaaatctcatgtcccttttacatttcaaaaccaatcatgccttcccaacagttccccaaagtcataattcattccagcattaaccaaaaagtccaagactgaagtctcacctgagacaaggcaagtcccttccacctatgaccctgtaaaataaaaaacaagttacttccaagacacaatgggggtataggcattgggtaaatgttcccattccaaatgggagaaattggaactatggggctacaggacccatgcaagtccaaaatccagtggggcagtcaaatcttaaagctttgaaatgatctcctttgactctatccacgtccaggtcacactgatacaagaggtgggctcccaaggccttgggcagccctacccctgtgcttctgcagggcacagtcctcttcccagctgttttcacaggctggtgttgagtgtctgcggcttttccaggtgcatggtgcaagctgtcggtggatctaccattctgggggctagaggatgatggccctattcttacagctccactaggcaatgccccagtggggactctgtgtggaggtgtctgaccccacattcccttaatcactctagcagaggttctccatgagggctctgcccctgtagcaaatttctgcctggacatcctgccatttccatacatcctctgaaatctaggtggaggttcccaaacctcagtttttgatttatgtgcacccgtgggcccaataccacatgtaggtcaccaaagcttggggcttgcactgtctgaaacaacagccagagctatatgttggcaccttttagccatggctaggacgcagggcaccatgtccccagagtgcacaaagcagcaaggccctgggcccaacccctgaaacagttttttcttcctaggcctccaggcctgtggcgagagggcctgctgtgaagacctctgacaggccctggagacatttttcccattgtcttggtgattaacgtttggctcttcattatttatgcaaatttctgcagccagggcttgaatttctcctcagaaaatgggcttttcttttctattgcatcatcaggctgcacattttccaaacttttatgttctgcttcccttttaaacataagtcccaattccaaaccatctattagtgaatgcataaaactgagtgctttttagagcacccaagtcactccctgaatgctttgctacctagaaatttcttccaccccaaatcatctctctcaagttcaaagttgcacagatctctagggcaggggcaaaatgctgccggtctctttgctaaagcataacaagagtcacctttgttccagttccaaataagttcctcatctccatctgagactacctcagcctggacttcattgtccatatcactatcagaattttgttcaaaagcattcaatgagtctctgggaagttccaaactttcccacatcttcctgttttcttctgagccctccatactgttccaacctctgcctgttacccagtttcaaagtcactttcacatttttgggtatctttatagtagcacctcactctctgtggtaccaatttactgtgtcagtccgttttcgtaccactataaagaactgcctgagactgggtaatttataaagaaaaaaggtttaattgactcacagttcagcatggctggggagaactcaggaaacttacagtcgtggtggaaggcaaaggggaaacaaggcaccttcttcgcaaggcagcaggaagaagtgtcaagaaaagtggggaagagccccttataaaaccatcagatctggtgaggactcactcattttcatgagaacaagttgagaacagcctgggggaaccacccccatgattcagttatctccaccaggtctcccttgacacgtggggattatggggattacaagtcaagatgagatttgatggggacacaaagcttaaccatgtcatcccctcaccaaaaaaaagttctattcctgcagaaaaagctatagtcatgccctgcttaatgatggtgatacattctgttaataacaaactcatcattaggtgatttccttgtcatgtgaacatcatagtgtgtgcttacacaaacctagatggtgtagccaactacacacctaggctgtacagtatggcctgttgctcctaggctgcaaacctacagcatgtgactgtactgaatactgcaggcagttgtaacacaatggaaatgtttgtgtatctgaatgaacatagagaaggtatagcaaaaataaagcagtataatcttatggggccactatcatgcgtggtctgttgctgaccaaaacattgctcttcagtatgtgactatactgcttttacgatgagtttctatcaacatctagattcataagtgacttctctattaataaaatttgttcaagaaaatcatggtatatgaataattcagcaaatatttgaattcttgcctgtttatggaattctcgcctatctgtggggtattcattaaccaaatattaattgggaacctaccatgtgccagtctctcggggtaaagcagtaaacgtagcaacatgatccttgctttcatggaacttagagtctaaagaaggacattgtacagtgaaccagatggcaaataagtaccatgagttcagatagtgacaaatagtctggagaagttaaatggggtatgggatggggagtgacagaggtggagggcggtagcctgaggtggccagaaaaaaaaaaatctgagctggaaccagaatgataagtaggagccactgtgaaagctggacagactaactgtgggagctgggtacagtccttggttcccgaatgttggcaggaaaacctactccatagtgctgtgtcccacttgtacttcaatgctgcaccttcccgctggccagttgcctgtctttcttttcaaggcaaggtcttactcagcttcttgtagacttccccagctccaagttaggactgtgccttccccatatttcattcacgtctcctgaaatcttcttgggaagtctgctgttttcttcctttctttttattccactacggagaatttgagttgtaactgttccactggctttatcccattttattcacacatttgcaacaaacttgtccagttcctttttgtttttgtttatttgttttgttccttcttttggagagctgagagaatggatggaggaagagcttatcaaagtcaatgcaggcttgttatggaaaataggaaaagtacagaaacatacttaaaaatagagggaaaaaaatcactcctaattcctctatccagaagtaactttaatagtgttggctttctcagtattttatcaatacttcgttttttctatgcattcacattcttgttttatttttagctacaacattgtatcagaggaattttccatgtcattgaaacactctaatattttaagtggctatagacccttccataattttgatgtgctgctatttatttaactatttccctgatactagatgttaacattttttttccagttgtttgctattataaattaggcagtagtgaacatctttgtgcatgtatctttgtcccaatctctgatcattttccttaggacaaattttccaaagtagacttattgcaaaaaacagcatagactttggtacatgctacaaacttccttccagctccccgttcagtgctccccacattccactgttgtaatgaggcccaattccttaatgtttccttctagattcagagcctaaacagcaccattacccagctggccctccccattcttcctaaccaccacccgaagtgttggggacagtctctttttgctcccctccctaccaggacagtgataccctcccaggagggtctaacactatggaacccttgatatcaaggcctgatcttgtcccttccttagttcttggtgtctggcccactctaagctgtgaaattttcccccatttttgcagctccctgccctggaggaccagctcagcaccctcctagccccggtcatcatctcctccatgacgatgctggagaagctctcggacacctacacctgcttctccacggaaaatggcaacttcctgtatgtccttcacctggtgagtctatagctctggggcccatgttcctcttccctcagcttgatggggagtccacaggcctctcttatttggaactttagactcctttagaaggcagaaacggcatcttatcaaacccgcctgggacccgagcctcccctggcttgtctgcagagaccagggcaggtgaagggagtgcccttggggctggctgacactggcctgcctgtgcctgcagtttggagaatgcctgttcattgccatcaatggtgaccacaccgagagcgagggggacctgcggcggaagctgtatgtgctcaagtacctgtttgaagtgcactttgggctggtgactgtggacggtcatcttatccgaaaggagtgagtcttcaaagctggtcccctctgtcctttgccgagcaccctcgctgggccaggcagcgtgtgcccagcccctgtgaagctgccatttttcacatactgcccccagctgggtccctaggtcagagaaacagctcaagtgaaccttggagaccatctggtctgaccctctgactttatatctggtgaaacagagcagagaatggaactcacttgcctggggtcatctagctggttggtggccacatccaaactggatatttgagctcaggactctcagtccagtgctctttccatcctcccaacatcatcacccgtcattacaaatctggtctgagctagtcctctctggcttctcaagcttcagactctctctccagaaaaacacaaacccatgcacattcatacagtctcgtgaaggttttctcaggagacagaccttaaaacctgtctctgggcccacagtaaagaacttggggaaagagaatcatggttcagagtatacactgaggtgggagggaccccagaaaaggcttgtagttgaaatgtagacctagaaaagagaagttcgtagtatcaccaccccctgattctctaagatggattgggaagctgcggagtgtgaagctctgggactttagttttgtggcgatatgagcaactacccatattgaggcatttctcaaatgcacaaacattgtttcatgagtcattttagcccagataggtcatggtgtcagtggcaaatgctgcaggtggcagatgcctgttacatgaatcacagtggccagtgcagacgttgccagcatccgagatggctgcgaccctgagtagggccctgatgatggaccagatctttctgtgttcagtggcctctgtgtgagaagcttaagcatcaccctggctctctctagctggctttgtatgacatgtgtttgtgtgacagaggctgaggagtgaggtgatttgctcagctgcctgccttccggctccgtgcctatcccaccccactccacagttagagctcggccggaaacctggccccctttcccagctgtgtgggcaggtcatatgggctcaccaagctctgatgctgagctgagactgtggtcctttggttgggtgtgggggagaccagctttcttgtgatctctcccgccctctctggctctgcccccaggctgcggcccccagacctggcgcagcgtgtccagctgtgggagcacttccagagcctgctgtggacctacagccgcctgcgggagcaggagcagtgcttcgccgtggaggtgactactgggcgcgggagtcctcaggacttgaagctgtcaggtcagagggggcgtccacctttaagaccatgttttaaccctaatgaatgaaggcacaagcagcccctgaaactcgtgtattcagagagagttgttctttctggccatatggagggttgggtaccctgatgggctttcccatggtaaaacagctcgatcctggataacacatacttttaatgcaatttttgggttcactgtaaattacaggaatctttgaagacagttccttcaaccctcccctccttttcccacaaaattatattgagctggaactggaggggaaagcagtggagaaaaacacagcgctaaaggcaagattccctgagtgcaaatgataccagcactacagccagtaaatagccttaggccagcagcagcataggagagctgagcctgcaactctaggttaagcccagccccaaaaagttaaagtggctactggtccttttataaagccctagtaaataaaaaactaaaaaattaaaaataaaaactaaagtggctgctggtcagtagcactccttgccttcctaaagaggtaaaccaaattctctttcaagcagtggttttcatactccagtgtgtgtcagaatcctctgtagggcttgttaaatacaggttactgggcctcactttcagcttttctcatttagcgagtctgggatgggggctctagaacttgcatttcttttttttttttttttttgagatggagtctcgctctgttgcccaggctggagtgcagtggagcaatcttggctcactgtgacctctgcttcccgggttcaagcaattctcctgcctcagcctcctgagtagctgggattacaggcacgtgccaccacgcctggctaatttttgtatttttagtagagacggggtttcactatgttggtcaggctggtctcgaactcctgacctcatgatctgcccactcggcctcccaaagtgctgggattacaggcatgagccacagtgcccggccctagaacttccatttctaaaaaattcccaggtgctgtttattgtgcttgtccaggaaccacactttgaaaaccactgctagagcaggaaaggtaaagatcaaacaaacgtgaactcacaactgaagaaaatcagatatggaagaaaataagccaccacgagtgagagtcaggaaaatcaatcaccaacagatttagatcccaaggcacttgatacattggaactattaggtatagaatataaaataactatgaaatatttaaaaatatgaaatgtagaatcacaaaatgagataagaagaaactctaaattgaccaggcaaatttgaaaaagaacacgtacagatattttagaaaagaaaacatagttgttaaaatgaaaaactcaagggatgtgttaaatagcagatgagacatagctagagggagaattaatgagctggaaaatagatctgaaggaattcattctcatacccccactcattcactcttccaataaacatatagtacctattatatgctaagaggtgtgccaggccatgggaataaagagatgaataaagacatattcactgcccttgaggggaaatcagccatgtatatactaaaagatataataaagaatcctggtgccatattaggtttttcatcaaaagctatggtggcacaagagatggagtggtaaactctttctgggacattaggaaagacttcttttaggaggtgacctaatgccattagcataaaatccaaactcttcccaagcctaccaggccctgtgtgatctatcgctgcctatttcactctagcttcatcttatgcctctcttgtccacgcttactgagtgctagtcacatgaaacttctttaagtttcaggaaaactctatatttagatctgtccaatatgatagtcattagctgcatgtggctgttgaacatttgaaatataactagtgcaaattgagttatgctatgcatgtgaaatatataccagattttggtaacttagcacaaaaaagaatgtaaaacattccattaataaggcttttatatcatatggtgataatattttggatatattcagtaaaatgaaatatatcattaaaattaatgtcaactgtttctttttacttttttaatgtggtcactggaaacatttaaattatgcatagggcctttcttttatttctgttggacagcaccattgcaaactctgtccccatctcatggcctctgaatatgcagtctccttgacttgcagtgttctctctctccctctttctctggtgggccatctggttgtttagatattagtttaaaggtgacctaattcagggacatttctttggacaccctacccaaggaggtctctgctatttctctctagcctagtgctgtgtattttgtacttggtgcttacttacaaatggcacttactttatttccttgtgtattgccttgcctcatccactggagtctagtgaccagacagtaagcctcaggaaggctgggacctggtgggtcttagtccccctgtttccaagtatctggtgcagagtccaagctcactgtggacagagtgaatgtccccactagcccagggcttggagtggggcaaggttgttggtgatatggcttcctctcccttcctgccctggctaggccctggagcgactgattcacccccagctctgtgagctgtgcatagaggcgctggagcggcacgtcatccaggctgtcaacaccagccccgagcggggaggcgaggaggccctgcatgccttcctgctcgtgcactccaagctgctggcattctactctaggtgagctcaaggtctggcatgtggtggctaaaggctccctggccttctcactcccctatggcctctgcctgaaaagcaccacctgcccagccaagaatcacctcctccatgaagcctgaaaccttcccagatttgattctccaacctttttcagctcacccatttctctgtatcattccttcctggaacactgtcttagagtctcaatctagaacttccttttatgttgttcttggtccctggtgctttcccactgctaaatcattttcttttctttgttctatacaaccaagttttattttgaaatttgacgagttaattaattgtatttgtgccttgcccatctccagaagtacattgctccttgagggcaggggccaggctccacactcctttaacctgcctgccccgtctcctgctgggcatgtgctgatgggtggccatgctcctgtgtctgcagccacagtgccagctccctgcgcccggccgacctgcttgccctcatcctcctggttcaggacctctaccccagcgagagcacagcagaggacgacattcag

SEQ ID NO: 12422 - DNA, 795 bp, Homo sapiens
ctctgggggcggcgatcctccctccggagccccccttcaaccctcccggaagtgagcatttgcaggaccagggatgctgtgctgctctcccatgagccagtcaccgagtcggtctgctgcagccctttctgaacctctggccgtctggatgctccactgtgcttgccaagatgaagtgcgtcttggtggccactgagggcgcagaggtcctcttctactggacagatcaggagtttgaagagagtctccggctgaagttcgggcagtcagagaatgaggaagaagagctccctgccctggaggaccagctcagcaccctcctagccccggtcatcatctcctccatgacgatgctggagaagctctcggacacctacacctgcttctccacggaaaatggcaacttcctgtatgtccttcacctggctgcggcccccagacctggcgcagcgtgtccagctgtgggagcacttccagagcctgctgtggacctacagccgcctgcgggagcaggagcagtgcttcgccgtggaggccctggagcgactgattcacccccagctctgtgagctgtgcatagaggcgctggagcggcacgtcatccaggctgtcaacaccagccccgagcggggaggcgaggaggccctgcatgccttcctgctcgtgcactccaagctgctggcattctactctagccacagtgccagctccctgcgcccggccgacctgcttgccctcatcctcctggttcaggacctctaccccagcgagagcacagcagaggacgacattcag

SEQ ID NO: 12423 - DNA, 2224 bp, Homo sapiens
aaaactggagtttcttggagctaaaaatgattatttcttgtggttcacagatagggccgcaatgggtgggtccaacttagggatcccacctctcactgcagctcttcttcctctgtagatagcagaggacaccctccaaacactggttccccactgccctgtgccttccggccccagaaggatcttcctggatgccaacgtgaaggaaagctactgccccctagtgccccacaccatgtactgcctgcccctgtggcagggcatcaacctggtgctcctgaccagggtaggagagcccctcaccctgccctgatgatgcttagggttggcacgtcttccccaggggcagccccgttcacccgcctctcggcccttaccctcagagccccagcgcgcccctggccctggttctgtcccagctgatggatggcttctccatgctggagaagaagctgaaggaagggccggagcccggggcctccctgcgctcccagcccctcgtgggagacctgcgccagaggatggacaagtttgtcaagaatcgaggggcacaggagattcaggtgagacccaagttccagtcctccccacctggggaagaggcagggctggcagcagggtacatccggtccacagcagctgaggggccaatgggcctgggttcctgtccgggctccacctcccccgggcctacgatccttgttttccctattatgaaatgatattgaaaacttagctgctttttggttttcagaatctttttatgtgtgtttggcagaatacgaattataattccccttttttaggtgtggaaactaaggcttagacaagttttaacttggccaagattatgcagctcatgagcagtggagccagagcccggatgcagtgagcaagtgcagtcgggatccgcccgtcacgggcttcctctctgcagcggggctgtgtccccgggctcacagggcaacacagggatgtgcaggtcacggctccaccccacccccagtgagcttagggcccaggtggggagctgagaccaggagacaggtgagaatgtgcaggcagtagaaacagtccatcaccccgtgctctgacaaagcccagatcagggcctggacggcagtggggctggtggggcttgactctggatttaagcagtggaggcgcctggtgtttgaggagctgggacccattgtggctggagtgcctgtcagtctgaaggctgcaggattggctggaggaggcagtgccacatcccgcagtgcctcagggtgtcctaaggagcactttcactagaacaccaagttcttctgctttatagagatcccgtgaggccgccccctgcatggctaccccatgcccaccccataccctcccagcttctgcagcagcacctcctccgcacaccccagccgctgccctgtgtgtgccccccaccccgaggggctggcctggttgctgtgacggtgctactatgtgtgcctgtgcccgtcagacagcgagcccctggaaactgccctttaaataaacgctgctgagtgactagaacatggcacactgaagtctgcagggggctggtggggcctgccagggtagcctgcattggccagaagggcagatttgtctgggggccctgtgccctctcagagcctgatctgagaaggactttggcctggacctcactggaaatatggtcgggatgcaaacctgccccctgtcttccttccagagcacctggctggagtttaaggccaaggctttctccaaaagtgagcccggatcctcctgggagtgagtggtgggcctcaggacaaggggtgggtcgtgtgcccaggggactgttccctgggaggccacatctcctccaccactgcccttcatttatcagcaaaataatttcaagaaaggagatttcttcccacatacgtggagcaccgcgtggagaagctgggaagctccttcccattgcctgatcagctgtggctgcccccttaggtctttccatctgtctgtcctgggtgcaggagcagggtggtccacctgggagtgaggggctccccaggttggtctgtcctgggtacaagagtggggtggtccacaagggggaagggctccccaggtctgtctgtcctgggtgcaggaacaaggtggtccacacagggcgaggggctcccctaggtcccttctgctgtaatgccctcctctctcgtgctcaggctgctcc

SEQ ID NO: 12424 - DNA, 536 bp, Homo sapiens
aaaactggagtttcttggagctaaaaatgattatttcttgtggttcacagatagggccgcaatgggtgggtccaacttagggatcccacctctcactgcagctcttcttcctctgtagatagcagaggacaccctccaaacactggttccccactgccctgtgccttccggccccagaaggatcttcctggatgccaacgtgaaggaaagctactgccccctagtgccccacaccatgtactgcctgcccctgtggcagggcatcaacctggtgctcctgaccaggagccccagcgcgcccctggccctggttctgtcccagctgatggatggcttctccatgctggagaagaagctgaaggaagggccggagcccggggcctccctgcgctcccagcccctcgtgggagacctgcgccagaggatggacaagtttgtcaagaatcgaggggcacaggagattcagagcacctggctggagtttaaggccaaggctttctccaaaagtgagcccggatcctcctgggagctgctcc

SEQ ID NO: 12425 - DNA, 20968 bp, Homo sapiens
cgggctgtcccctctgggggcggcgatcctccctccggagccccccttcaaccctcccggaagtgaggtagggtccctaggggtcccggagcgggcccactcctagcctcacccactccgggcgtgtggccgtgggccggtcgcttcctcgctcggggccaaagttcctcagccgtgaagaggggtggatgtcacaagtcaagcctccttcccagggtggccgtgaggttcgggggtggggggaggtggggatttggggtgaaactggacagaaactggcgtgctaggcaaacgggagccccgcggcggcgaactgctgactcgctctctccagagactcaggggcagggccgggctccgaaggtgtgggaccccagaaggagctgctgaagacgggaccaagggccacagggaggtttgctggggtccagatggtgaaagtgggcgctgggggtcgccccaggttggccccccgccatctggagctcctttcgtcagtgagtcccctccgagttccctttctagggcaagatagcgaggtgaagcggaagtctcagtgtgacaccggcgaggttctcttcccagcagcctttgggaagcatccccctgtttcgggaatatggcattcgggccaatcatgtgggtgatggagcccgtctcagggttcggctgctaaaggccgaactcgtaacagcagtctctgtggcgggtagtcacttgcctcttactggctcacagtgcttgacttcctaattaagttttctgttgttcctgccctctattcaaatatgaatgattccggaaccagattgattaatcctgttatttgaagaagggaagctgggaaataggaataatgatccccacacctatgtaagaacgcagtttgctaaggttactttgcagcttgcctggtcactcccatgatctaaccctgtagggaggtagagtaggggatgttgctctgtttctccgcaggagtttgaggctcagagaggtttatgggacttggcaaagccaaaactagaacctggtcccagatgcctttcctgttagtttccttccattcatcgtatcatcccaggatccccactcccttcaccgggactgcatcctcaccacctgggatgtgctatgctgtctcccgtcagtcactcctagcaagctccctggggctgcttggggagctctgagtgacccgcagaagtgagagcacttcatgggaacaaaggaggaaggaacaaaagtgggcacctgctctgtgcaaagggctgtgctggccgggttcctattctccattatgggaggtgaggggcaggatcccagatatgttcttagcagactgcctcagggcctggagagaccagggaccacgcagcccttctccagcttgtcctttctcaacgggcagcagtcaagaccagggcatctgcctgccctcatattctctctgttttaagcatttgcaggaccagggatgctgtgctgctctcccatgagccagtcaccgagtcggtctgctgcagccctttctgaacctctggccgtctggatgctccactgtgcttgccaaggtagatgatcttgccccacctggggaggacagggaggcaggcagcatccaccctggggctttgggaggcagatggaatgaggtaggcagtggactgagtgctactgggctctgcacacctgctcatcccctccccagccctgcatcctgaggccacccccatcctgatgcctcatctctccttcacccctcgaatccaggcaggtcatcacagcctgctgcatctttaaagctcctcccagcccccaccaaggggtgagcactcattacctgacacccgcacctagatgaccgccttcatgaccttgacctgcccatctccagccagccggtcacttctccgctcacaaccacagcctccattccatagcccactgctccctaacccatacactctggtcagctttgtcacatgtacctgggagtcccagagcagcctcttcaggtccacccgcctctcccagcaacctccttttcacacctgttgcactctcagtgtctgccttggcattgagtaattctgtgggaataggctgcattccttcttcactgtgctgttatgtctcctggcatttgccataaataccttgggaccagttgcaccaagttagtttgggaggaattcagtaaggaccactaagctggacatggggatgacggaacacaagacctggagatgctgtgatcctcccaagaaaactggaaatccacttgtgtgagagttacagcagagcttcctaatcattgtcatggcttagcgcacataccacatgattatatctgcgtgacaccctgaggcacataagaggatttgaaaccactgcctgaggcctcttagctgcagcagccagcctggagcactgtcctcaccagcctggtcaggctgccccaagttttagaagatcgagggtttgccgcacgcagagggccatggcacacagtgtgggaagctgtattaaagatcttccagtgggtgaatagttaagacatttcttacataatcaagcacagagtgtgtggtgtgtgtgtgtgtggcgggggggtggggaaggagatttgggagggctgaagacactggtggctgtggccctagaagctgcagcctactaggtacaggggctttaggcagcctctgttctcaccatgaacagggagagcagcatttgaatgaaacttctgtggtgctgaagtaaattcaggggctttgaggctcatcttctggagctgttttttgtttgtttgtttgtttgtttgtttgttttttcagacagagtctcgctctgtcacccaggctggagtgcagtggtgtaatctcggctcactgcaacctctgcctcccgggttcaagcaattctcctgcctcagcagttatcccgagtagctgggataacaggcacttgccaccatgcctggctaatttttgtatttttagtagagacggggtttcaccatgttggccaggctggtctcgaactcctgacttcaggtgatccaccccccttggcctcccaaagtgctgggattacaggcgtgagccaccgcgcccagccctggaactgtttttatctgagggagagatatctctggactgcccagagatggaggtgcaccagtgccctccgatccacaccaggcactaactggctgccgtgagcatggcctccctgggcattcggctccatgtctaggccaagacctgggtcccttcctgtgccagtctggttccagtaggccccgtggtgggtctgttgctgtgctgagagggaccagataccacagaggaaagggccccagccttggcatcaaacaggtctgggtccagatcccagctttgccacttcaggctgtgcctgtgtcctgctctctaaaatgggggtacctgaagagttctactttgtccagttgtgagggtgcaacaaaaatggaagtcccttgtgatgcctggtgtgcagaaggggctcactgaatgtttgctgaggttggggtcctcttcgttactcagactgagctcatagatgttggggctggaggctgaccttgaccttgcctttccctggcagatgaagtgcgtcttggtggccactgagggcgcagaggtcctcttctactggacagatcaggagtttgaagagagtctccggctgaagttcgggcagtcagagaatgaggaagaagaggtgagtgcagggtaggcagtcccaggaggggtggataggaaggaaccatacaaaactcccagcaggcagagaggcaggaaaacctgtgttcaccctgtcctgggcagcatgagcagggtgctgggtggggtccagcatccttcacacctagacccttatcctcaaggttggcctcttgatgctctgagctcggtgaccccacccccacaccccaccagtcctctctggactaaatgagggcaagaagaagtcgaattttatcacgtaacagaagaacttggagccatcagtttctgtaacctaaaaagtttaacaaggctgggcgcggtggctcacgcctgtaatcacaacactttgggaagccaaggtgggccagttgcttgagctcagggatttgagaccagcctgggcagcatggcgaaaccctgtctctacaaaaaaaatacaaaaattagccaggtgtggtggtgcgtgcctatagtcccagctacttgggaggttgaggtgggaggatcacttgagtccaggtggtagaggctgcagtgagccgagactgtgcccatgcattccaacctgggcgacagagcaaaaaaaaaaaaaaaaagtttaacgtaagctgaacacgttaattttttaatagctgtattaaggtatgattaacataccataaattgcacatatttaaagtgcataatttgataagctttgatatgtatatacctatgattctatcacaatcaataaaaggaatatatctaccacctcaaacatttgtaatcccttctttcccatccccatcgcataggaactgctgatctgctttctgtcatgatagattagtttgtatcatatggccttatataaatggagtcatacagtatgtgcttggatttagtttggttttggtttgactgctttcactcagcataattattttgtgattcatctgtgttgtggcatgtatcaatcgttcattccttgtcattgagtagtaatctattgtatcaggatgccaccatttgttcattcatttacttgttgatggacatctgtgttattttcagtttttgactattacaaataaagcaactatgaacatgcacgtacaagtctatgtatacatggatgctttcatgtccaaggacagatacttaggatagactggctaggtcatgtaggtgtatgtgtaactttttaataaactgccaaacttttccaaagtggttgtgtaatttttgattccacctgtagtgtttgagagttcagttcctccatatcctcaccaacactatagtccgtctttttaattttagccattctaatagatgttcactagaatctcactgtgttttaaatttcatttccttaatgactaatgcttttgagcatcttttcatgtgcttatttgccatatcttttgcccagtttttatttgagttgattgtttcttcttcttattcttactgagttttgagagcttctaatatattttggatggaatcctttatcagatacatgttttacaaatattttctttcagtttgtggcttgtgtttgtattctcaatggtatctttcaaagagcagaagtattagaactcgagtttatccattttgcatttatggattatgcttttagtgttatatctaagaaatctttgcccaacttacaaagagttttctctacatattcttttgaaagttttatagttttaggttttatatcaggtctgatgatctactttgaatttttgtgtgtggtatgagctatggattgaagataattttttttttgcatgtggacatccagttcaacagtttaacattacaactcagaaatacttgtcattttcacttacataatttccactctacattttaaaggagtaatttattttgaaaatgttttccagattaattttgggttaaaaatatttttactggggatgcagtggaaggtgttcttacatttctgcagcatgggctgattgcctctctgtccctttctgctctaaggggtctcatcatccagccaatgagtgagctgactccacctcagggagtccatttaccatcaacatcactcgtgttctcatcacagtctttaggcaaacacaagatatcagagatcatagacattcaagtggttttatttaagctaactgttaggcttttttattttttaacagtcaatacatataatatttaaattaagaatttttaaatatttcagtttttaaactactgttacaactatgtcaacttaagaagcaaactatttggtggcctttctcttcctctttattgaaaacctggcaaaggaacgaactcctgaattttcagttcctaaaaatgagtagtgtaaaggaaaggtggtctttaaagttttttttttttgttaatgtgcaacacattcttttctcatcatataaataatgagttaattgtaggaaatttggaaatacaaagagatagtttttaaatgacctataattccatgacccagagctattagctttttaatatactttctttgggtctttattttttctatataattgggattataccacatttacagttttactgcctgtttttttttccacttgccattatatcaagatatttcttctatttttttaaatagtctcagaagcataattcttaatggaaacattgtactccagtacatgaatcagtgtatcatcctttatttaaccattttcctcatatggacataaatattgctcctaatttgctatatcactcttgctttaagaaacatttgtgcttaaattttatctcatgtcagataaattcctaggataaatttaggataaattcctaaaaataaaaatgttgagtcaaaagccattcaaagatattgtactactttataattccgccaagtaatatatgagtatgctcctttatatacaccaaatatttttatctcccctgtattagtccattttcttaccactataaagaaatgcccaagactgggtactctgtaaaggaaagaagtttaattgactcacagttcagaaggctgtggaggcctcaggaaacttacaatcatgtcaaaaggcaaaggggaagcaagacaccttcttcacaaggcagcaggaaggagaagtgctgagtgaaggggaaagagcctcttataaaaccattagatctcatgagaactcactgtcacaagaacagcatgggggaaactgctcccatgattcaattacctccacctggtttctccgttgacatatgaggattgtggggattatggggattacaattcaagatgagatttggatggggacacaaagcctaatcatatcattctgccccaggaccctcccaaatctcatgtcccttttacatttcaaaaccaatcatgccttcccaacagttccccaaagtcataattcattccagcattaaccaaaaagtccaagactgaagtctcacctgagacaaggcaagtcccttccacctatgaccctgtaaaataaaaaacaagttacttccaagacacaatgggggtataggcattgggtaaatgttcccattccaaatgggagaaattggaactatggggctacaggacccatgcaagtccaaaatccagtggggcagtcaaatcttaaagctttgaaatgatctcctttgactctatccacgtccaggtcacactgatacaagaggtgggctcccaaggccttgggcagccctacccctgtgcttctgcagggcacagtcctcttcccagctgttttcacaggctggtgttgagtgtctgcggcttttccaggtgcatggtgcaagctgtcggtggatctaccattctgggggctagaggatgatggccctattcttacagctccactaggcaatgccccagtggggactctgtgtggaggtgtctgaccccacattcccttaatcactctagcagaggttctccatgagggctctgcccctgtagcaaatttctgcctggacatcctgccatttccatacatcctctgaaatctaggtggaggttcccaaacctcagtttttgatttatgtgcacccgtgggcccaataccacatgtaggtcaccaaagcttggggcttgcactgtctgaaacaacagccagagctatatgttggcaccttttagccatggctaggacgcagggcaccatgtccccagagtgcacaaagcagcaaggccctgggcccaacccctgaaacagttttttcttcctaggcctccaggcctgtggcgagagggcctgctgtgaagacctctgacaggccctggagacatttttcccattgtcttggtgattaacgtttggctcttcattatttatgcaaatttctgcagccagggcttgaatttctcctcagaaaatgggcttttcttttctattgcatcatcaggctgcacattttccaaacttttatgttctgcttcccttttaaacataagtcccaattccaaaccatctattagtgaatgcataaaactgagtgctttttagagcacccaagtcactccctgaatgctttgctacctagaaatttcttccaccccaaatcatctctctcaagttcaaagttgcacagatctctagggcaggggcaaaatgctgccggtctctttgctaaagcataacaagagtcacctttgttccagttccaaataagttcctcatctccatctgagactacctcagcctggacttcattgtccatatcactatcagaattttgttcaaaagcattcaatgagtctctgggaagttccaaactttcccacatcttcctgttttcttctgagccctccatactgttccaacctctgcctgttacccagtttcaaagtcactttcacatttttgggtatctttatagtagcacctcactctctgtggtaccaatttactgtgtcagtccgttttcgtaccactataaagaactgcctgagactgggtaatttataaagaaaaaaggtttaattgactcacagttcagcatggctggggagaactcaggaaacttacagtcgtggtggaaggcaaaggggaaacaaggcaccttcttcgcaaggcagcaggaagaagtgtcaagaaaagtggggaagagccccttataaaaccatcagatctggtgaggactcactcattttcatgagaacaagttgagaacagcctgggggaaccacccccatgattcagttatctccaccaggtctcccttgacacgtggggattatggggattacaagtcaagatgagatttgatggggacacaaagcttaaccatgtcatcccctcaccaaaaaaaagttctattcctgcagaaaaagctatagtcatgccctgcttaatgatggtgatacattctgttaataacaaactcatcattaggtgatttccttgtcatgtgaacatcatagtgtgtgcttacacaaacctagatggtgtagccaactacacacctaggctgtacagtatggcctgttgctcctaggctgcaaacctacagcatgtgactgtactgaatactgcaggcagttgtaacacaatggaaatgtttgtgtatctgaatgaacatagagaaggtatagcaaaaataaagcagtataatcttatggggccactatcatgcgtggtctgttgctgaccaaaacattgctcttcagtatgtgactatactgcttttacgatgagtttctatcaacatctagattcataagtgacttctctattaataaaatttgttcaagaaaatcatggtatatgaataattcagcaaatatttgaattcttgcctgtttatggaattctcgcctatctgtggggtattcattaaccaaatattaattgggaacctaccatgtgccagtctctcggggtaaagcagtaaacgtagcaacatgatccttgctttcatggaacttagagtctaaagaaggacattgtacagtgaaccagatggcaaataagtaccatgagttcagatagtgacaaatagtctggagaagttaaatggggtatgggatggggagtgacagaggtggagggcggtagcctgaggtggccagaaaaaaaaaaatctgagctggaaccagaatgataagtaggagccactgtgaaagctggacagactaactgtgggagctgggtacagtccttggttcccgaatgttggcaggaaaacctactccatagtgctgtgtcccacttgtacttcaatgctgcaccttcccgctggccagttgcctgtctttcttttcaaggcaaggtcttactcagcttcttgtagacttccccagctccaagttaggactgtgccttccccatatttcattcacgtctcctgaaatcttcttgggaagtctgctgttttcttcctttctttttattccactacggagaatttgagttgtaactgttccactggctttatcccattttattcacacatttgcaacaaacttgtccagttcctttttgtttttgtttatttgttttgttccttcttttggagagctgagagaatggatggaggaagagcttatcaaagtcaatgcaggcttgttatggaaaataggaaaagtacagaaacatacttaaaaatagagggaaaaaaatcactcctaattcctctatccagaagtaactttaatagtgttggctttctcagtattttatcaatacttcgttttttctatgcattcacattcttgttttatttttagctacaacattgtatcagaggaattttccatgtcattgaaacactctaatattttaagtggctatagacccttccataattttgatgtgctgctatttatttaactatttccctgatactagatgttaacattttttttccagttgtttgctattataaattaggcagtagtgaacatctttgtgcatgtatctttgtcccaatctctgatcattttccttaggacaaattttccaaagtagacttattgcaaaaaacagcatagactttggtacatgctacaaacttccttccagctccccgttcagtgctccccacattccactgttgtaatgaggcccaattccttaatgtttccttctagattcagagcctaaacagcaccattacccagctggccctccccattcttcctaaccaccacccgaagtgttggggacagtctctttttgctcccctccctaccaggacagtgataccctcccaggagggtctaacactatggaacccttgatatcaaggcctgatcttgtcccttccttagttcttggtgtctggcccactctaagctgtgaaattttcccccatttttgcagctccctgccctggaggaccagctcagcaccctcctagccccggtcatcatctcctccatgacgatgctggagaagctctcggacacctacacctgcttctccacggaaaatggcaacttcctgtatgtccttcacctggtgagtctatagctctggggcccatgttcctcttccctcagcttgatggggagtccacaggcctctcttatttggaactttagactcctttagaaggcagaaacggcatcttatcaaacccgcctgggacccgagcctcccctggcttgtctgcagagaccagggcaggtgaagggagtgcccttggggctggctgacactggcctgcctgtgcctgcagtttggagaatgcctgttcattgccatcaatggtgaccacaccgagagcgagggggacctgcggcggaagctgtatgtgctcaagtacctgtttgaagtgcactttgggctggtgactgtggacggtcatcttatccgaaaggagtgagtcttcaaagctggtcccctctgtcctttgccgagcaccctcgctgggccaggcagcgtgtgcccagcccctgtgaagctgccatttttcacatactgcccccagctgggtccctaggtcagagaaacagctcaagtgaaccttggagaccatctggtctgaccctctgactttatatctggtgaaacagagcagagaatggaactcacttgcctggggtcatctagctggttggtggccacatccaaactggatatttgagctcaggactctcagtccagtgctctttccatcctcccaacatcatcacccgtcattacaaatctggtctgagctagtcctctctggcttctcaagcttcagactctctctccagaaaaacacaaacccatgcacattcatacagtctcgtgaaggttttctcaggagacagaccttaaaacctgtctctgggcccacagtaaagaacttggggaaagagaatcatggttcagagtatacactgaggtgggagggaccccagaaaaggcttgtagttgaaatgtagacctagaaaagagaagttcgtagtatcaccaccccctgattctctaagatggattgggaagctgcggagtgtgaagctctgggactttagttttgtggcgatatgagcaactacccatattgaggcatttctcaaatgcacaaacattgtttcatgagtcattttagcccagataggtcatggtgtcagtggcaaatgctgcaggtggcagatgcctgttacatgaatcacagtggccagtgcagacgttgccagcatccgagatggctgcgaccctgagtagggccctgatgatggaccagatctttctgtgttcagtggcctctgtgtgagaagcttaagcatcaccctggctctctctagctggctttgtatgacatgtgtttgtgtgacagaggctgaggagtgaggtgatttgctcagctgcctgccttccggctccgtgcctatcccaccccactccacagttagagctcggccggaaacctggccccctttcccagctgtgtgggcaggtcatatgggctcaccaagctctgatgctgagctgagactgtggtcctttggttgggtgtgggggagaccagctttcttgtgatctctcccgccctctctggctctgcccccaggctgcggcccccagacctggcgcagcgtgtccagctgtgggagcacttccagagcctgctgtggacctacagccgcctgcgggagcaggagcagtgcttcgccgtggaggtgactactgggcgcgggagtcctcaggacttgaagctgtcaggtcagagggggcgtccacctttaagaccatgttttaaccctaatgaatgaaggcacaagcagcccctgaaactcgtgtattcagagagagttgttctttctggccatatggagggttgggtaccctgatgggctttcccatggtaaaacagctcgatcctggataacacatacttttaatgcaatttttgggttcactgtaaattacaggaatctttgaagacagttccttcaaccctcccctccttttcccacaaaattatattgagctggaactggaggggaaagcagtggagaaaaacacagcgctaaaggcaagattccctgagtgcaaatgataccagcactacagccagtaaatagccttaggccagcagcagcataggagagctgagcctgcaactctaggttaagcccagccccaaaaagttaaagtggctactggtccttttataaagccctagtaaataaaaaactaaaaaattaaaaataaaaactaaagtggctgctggtcagtagcactccttgccttcctaaagaggtaaaccaaattctctttcaagcagtggttttcatactccagtgtgtgtcagaatcctctgtagggcttgttaaatacaggttactgggcctcactttcagcttttctcatttagcgagtctgggatgggggctctagaacttgcatttcttttttttttttttttttgagatggagtctcgctctgttgcccaggctggagtgcagtggagcaatcttggctcactgtgacctctgcttcccgggttcaagcaattctcctgcctcagcctcctgagtagctgggattacaggcacgtgccaccacgcctggctaatttttgtatttttagtagagacggggtttcactatgttggtcaggctggtctcgaactcctgacctcatgatctgcccactcggcctcccaaagtgctgggattacaggcatgagccacagtgcccggccctagaacttccatttctaaaaaattcccaggtgctgtttattgtgcttgtccaggaaccacactttgaaaaccactgctagagcaggaaaggtaaagatcaaacaaacgtgaactcacaactgaagaaaatcagatatggaagaaaataagccaccacgagtgagagtcaggaaaatcaatcaccaacagatttagatcccaaggcacttgatacattggaactattaggtatagaatataaaataactatgaaatatttaaaaatatgaaatgtagaatcacaaaatgagataagaagaaactctaaattgaccaggcaaatttgaaaaagaacacgtacagatattttagaaaagaaaacatagttgttaaaatgaaaaactcaagggatgtgttaaatagcagatgagacatagctagagggagaattaatgagctggaaaatagatctgaaggaattcattctcatacccccactcattcactcttccaataaacatatagtacctattatatgctaagaggtgtgccaggccatgggaataaagagatgaataaagacatattcactgcccttgaggggaaatcagccatgtatatactaaaagatataataaagaatcctggtgccatattaggtttttcatcaaaagctatggtggcacaagagatggagtggtaaactctttctgggacattaggaaagacttcttttaggaggtgacctaatgccattagcataaaatccaaactcttcccaagcctaccaggccctgtgtgatctatcgctgcctatttcactctagcttcatcttatgcctctcttgtccacgcttactgagtgctagtcacatgaaacttctttaagtttcaggaaaactctatatttagatctgtccaatatgatagtcattagctgcatgtggctgttgaacatttgaaatataactagtgcaaattgagttatgctatgcatgtgaaatatataccagattttggtaacttagcacaaaaaagaatgtaaaacattccattaataaggcttttatatcatatggtgataatattttggatatattcagtaaaatgaaatatatcattaaaattaatgtcaactgtttctttttacttttttaatgtggtcactggaaacatttaaattatgcatagggcctttcttttatttctgttggacagcaccattgcaaactctgtccccatctcatggcctctgaatatgcagtctccttgacttgcagtgttctctctctccctctttctctggtgggccatctggttgtttagatattagtttaaaggtgacctaattcagggacatttctttggacaccctacccaaggaggtctctgctatttctctctagcctagtgctgtgtattttgtacttggtgcttacttacaaatggcacttactttatttccttgtgtattgccttgcctcatccactggagtctagtgaccagacagtaagcctcaggaaggctgggacctggtgggtcttagtccccctgtttccaagtatctggtgcagagtccaagctcactgtggacagagtgaatgtccccactagcccagggcttggagtggggcaaggttgttggtgatatggcttcctctcccttcctgccctggctaggccctggagcgactgattcacccccagctctgtgagctgtgcatagaggcgctggagcggcacgtcatccaggctgtcaacaccagccccgagcggggaggcgaggaggccctgcatgccttcctgctcgtgcactccaagctgctggcattctactctaggtgagctcaaggtctggcatgtggtggctaaaggctccctggccttctcactcccctatggcctctgcctgaaaagcaccacctgcccagccaagaatcacctcctccatgaagcctgaaaccttcccagatttgattctccaacctttttcagctcacccatttctctgtatcattccttcctggaacactgtcttagagtctcaatctagaacttccttttatgttgttcttggtccctggtgctttcccactgctaaatcattttcttttctttgttctatacaaccaagttttattttgaaatttgacgagttaattaattgtatttgtgccttgcccatctccagaagtacattgctccttgagggcaggggccaggctccacactcctttaacctgcctgccccgtctcctgctgggcatgtgctgatgggtggccatgctcctgtgtctgcagccacagtgccagctccctgcgcccggccgacctgcttgccctcatcctcctggttcaggacctctaccccagcgagagcacagcagaggacgacattcaggtctcagggcagctttctgggcagagggaggccattagggaggtagttcagaaaacctgcctgaagatggtgggcaggctccccctggggactccatgttttctaagtcacaattctgggtgtgtggttgggcgtgacttctttcccactgctttcagatgtaaggggaattctggagtgcacatggtccagtgggttaaaagtgcagatttttcaagtcagccatggttcgaaacccagcttcaacacctggctgtgtgagctgagcccgtacttgcacccccagagcctcagtgcccttatctgtgcaatgggaataacaaagcatctacttctcaggggtatttggagggacaaaaggggtggttcccacagaacctggcactgcctggggcatagtgaatgcttagtgagtgtcagccaccaccatcgctgttgacctcatcaccaggggtagtggtgggttggataccattgtgttggaatttctcgaatttccacagaacagaccgcctagaatcgaatccctgggaagtctgaggaccacacacccaggactgcacccggaacgggtggaggggtggaggggtggaggcttctctgtgaagcgctgggaggcagaaggggtggagggagccaggtcagataggagctaaccagcctctcccctgccctgcacagccttccccgcggagggcccggagcagccagaacatccccgtgcagcaggcctggagccctcactccacgggcccaactggggggagctctgcagagacggtgtgtgctgtgcacttcgtggagtcaggggcaggaggggatcggcctctgcaggcgaccaggcctttcccatccctcctgggagagcagggacagggttgagccagctgggagagcctctcaacctgagccaccttctccattccaggagacagacagcttctccctccctgaggagtacttcacaccagctccttcccctggcgatcagagctcaggtgaggaccggaggaaagcaggaggaaacaatagctagctgcgagcgacaggcagcccaggacatctgtcttaggctccagtggacccccgtgcctcctaaggcttgagtgcaggtacccgtgttcctagagcacaggacgctgtctgcggctccccatcttccctgccagctccagcctgaactcaaggattgttaagaccactccactgatccctaaagctgttgatgacaagttgattcatttaaaacttctgtacatgcattctcagactcatcttttttgtaattaaaattaaaaattaagttaaatttagtaataatcatctaatttctatacattctaaaatatattcagcatctgtagtttatactttgtttctccaaagtatgtgggtaaacaataaaaaaaaactataaatattcaaaatggttgaggtgtggtggctcacgcctgtaatcccagcactttgggaggccgaggcgggtagatcacctgaggtcaggagtttgagactagcctggccaacatggcgaaaccccatgtctactaaaaatacaaaaattagccaggtctggtggcaggcgcctgtaatcccagctactcgggaggctgaggcaggagaatcgcttgaacccgggaggtggaggttgcagtgagccaagatcatgccactgcactccagcctgggcgacagagcaagactctgtctcaaaaaaaaaaacaaaacaaaactacaaatattcaaaatgttaacaaaaaatggacaaccttgcttagagaagtagataaaccaaaatccagactgttgtggtcactatgaataaacattacatttatttctgaagttcttaggtaaaaaaaaaaaaaaaaaagggtcctgtggtccctccacatcatctgatggaagaaagaaggccagggtttcaggaggagaaacctactggggactaggatttgaaaggaatttattatgtggctgcttttaacccaaccctggcacattggaatcaccaggcagcttcagccagcccaattaagttacagtctgtgggcctgggacccaggtgtgaatacttctaggaaattttcccaggtgagttcagtgtgcctcgggtgcaaaccactgctgtgcacagatttaggttacagcatgctttgccccctggctgcatattgaactcacctggggatctttaacaattattgaagctgagcctgtacccggagatgctgactcagttggtctgagctatgccctgggcgtcaggattttgtaaaagtccccaaatgattttcgtgtgtagccaaggttgacaaccactgggttagatgcttttaactttaggtctggctagaagcctaggaccccctgagactgtgtgtgaactcactgatgcctgtgcattcctggggtgagggttcctagctatcttcagattccctgagctcttgatgagcctgagacctgttgagaagcagagttctgggtaatctccgaagttcctcttaccactcccttcctcattcatcaccatcttcctcccagtccctctctcttgatagtggttttttatgccttaaaactgtaaaaaataatgctgttccaccgtgcagagaactcacaacttacaaatggtttgggttgcactcatccatttgtaaatcaggtgtttaagatgtaggaacacacttcccccaaagaaacatgattataaatgagggttgtttgcaatgaaatataagaggtaacagtattattacagacacataatatttcagatatgtggtgggttcagtaggtttttgtgcgttatattaggaaggaaatccacctcaattcccagcacacagcaggtgctcagtaagagcttgccggttgaataaatgaatgggcaaacgtggactgtgtgtgctgactcctgaggggcgggttgaggcctgaaggaatacaggggacagaacaaggaggggattgggggcaagggaggggggaggaagatgcccctctaccccctgaccaccattaccaaacatgtcctcaggagcttgattctcagcagctggctctgggggcagcttctctgccaggcccaggccgccttagccctggtactgcagagttcaccttgtgcctgccaacttaggatgaaggggtgttgccccagccacattagcacccctgcgtggagctggcagccaagggctgaggttgtggggggcacctgggccccctaccccatgctgttgagccattgcttacatctcatggtacttacatcgttatgttattacctgtggcctgcaggtagcaccatctggctggaggggggcaccccccccatggatgcccttcaggtgagtttctcctgtgcctgcctgggcgccagctgatctgagatgccgcagtgagtattgggggctctgagggtttcgcctccagggtgactctacccgtgccagccctcctcctgcccaccccagggctggtcagtgcaggtgcctgtcctggtgccagagctcagcccagaggcagggtccaggaatgggctgtgaggggtggcgaacttgcccctcccctcccccaggtgctgtccctcagctccattgttcttgggagtgaaagtccaatagaattttttttttaagtgagcatgtatatttattgtagaaaaatcgggaaatacaaaagtaaactataaaaaagggaataaaaattactcttaatcccgtcctcaaaatgagattaacatcttggggtgtttccttctagtctttttttcctatgactttacacacacacacacacacacacacacacacacactacatatgtacacatgtgtatttttaaaatcagatttggatactaacgtgtttcattatacttttttatttaaacatttttccatttcctaagcactcccacagtgtggtttgtaatgattggtagtccatcacatgcatatgttatttatctagcaaatccccaggaaaatcgcgtcatgtgtccagtgtttgctgttaggtatgacactgaagaggaatttttgtggcatctctcatgatttccttaattctataattttttgcactaaaggctttcttgcttagatccctctgtaaggctggagccttgcccatttggtcactttatgcctcagtttccccaatttgagtggctgttgggatgttctgagggtgattgaaatgatacaatgttgaacattagatacctccatctgttgcaaatgtggggaggggacctctccccgtccactccccatccacgagtgtttccctgccttctcggtcctctgtgccaccacccagcccctctgcccctgcccactgccctgcttggcacccgggccagactctgggcagaaaggcccaggagcagctgagggagaggggcaacagcgaaactggagctgcgagggcaggttcagcagagtgcaggaatttaaaaactggagtttcttggagctaaaaatgattatttcttgtggttcacagatagggccgcaatgggtgggtccaacttagggatcccacctctcactgcagctcttcttcctctgtagatagcagaggacaccctccaaacactggttccccactgccctgtgccttccggccccagaaggatcttcctggatgccaa

SEQ ID NO: 12426 - DNA, 845 bp, Homo sapiens
cgggctgtcccctctgggggcggcgatcctccctccggagccccccttcaaccctcccggaagtgagcatttgcaggaccagggatgctgtgctgctctcccatgagccagtcaccgagtcggtctgctgcagccctttctgaacctctggccgtctggatgctccactgtgcttgccaagatgaagtgcgtcttggtggccactgagggcgcagaggtcctcttctactggacagatcaggagtttgaagagagtctccggctgaagttcgggcagtcagagaatgaggaagaagagctccctgccctggaggaccagctcagcaccctcctagccccggtcatcatctcctccatgacgatgctggagaagctctcggacacctacacctgcttctccacggaaaatggcaacttcctgtatgtccttcacctggctgcggcccccagacctggcgcagcgtgtccagctgtgggagcacttccagagcctgctgtggacctacagccgcctgcgggagcaggagcagtgcttcgccgtggagccacagtgccagctccctgcgcccggccgacctgcttgccctcatcctcctggttcaggacctctaccccagcgagagcacagcagaggacgacattcaggagacagacagcttctccctccctgaggagtacttcacaccagctccttcccctggcgatcagagctcaggtagcaccatctggctggaggggggcaccccccccatggatgcccttcagatagcagaggacaccctccaaacactggttccccactgccctgtgccttccggccccagaaggatcttcctggatgccaa

SEQ ID NO: 12427 - DNA, 3714 bp, Homo sapiens
ggtcctacccggaagcgcgcccgggctcctgcaggcggggcgctgtgcgcgccgcgatccggtacgtgggcctccgggctgtcccctctgggggcggcgatcctccctccggagccccccttcaaccctcccggaagtgaggaccagggatgctgtgctgctctcccatgagccagtcaccgagtcggtctgctgcagccctttctgaacctctggccgtctggatgctccactgtgcttgccaagatgaagtgcgtcttggtggccactgagggcgcagaggtcctcttctactggacagatcaggagtttgaagagagtctccggctgaagttcgggcagtcagagaatgaggaagaagagctccctgccctggaggaccagctcagcaccctcctagccccggtcatcatctcctccatgacgatgctggagaagctctcggacacctacacctgcttctccacggaaaatggcaacttcctgtatgtccttcacctgtttggagaatgcctgttcattgccatcaatggtgaccacaccgagagcgagggggacctgcggcggaagctgtatgtgctcaagtacctgtttgaagtgcactttgggctggtgactgtggacggtcatcttatccgaaaggagctgcggcccccagacctggcgcagcgtgtccagctgtgggagcacttccagagcctgctgtggacctacagccgcctgcgggagcaggagcagtgcttcgccgtggaggccctggagcgactgattcacccccagctctgtgagctgtgcatagaggcgctggagcggcacgtcatccaggctgtcaacaccagccccgagcggggaggcgaggaggccctgcatgccttcctgctcgtgcactccaagctgctggcattctactctagccacagtgccagctccctgcgcccggccgacctgcttgccctcatcctcctggttcaggacctctaccccagcgagagcacagcagaggacgacattcagccttccccgcggagggcccggagcagccagaacatccccgtgcagcaggcctggagccctcactccacgggcccaactggggggagctctgcagagacggagacagacagcttctccctccctgaggagtacttcacaccagctccttcccctggcgatcagagctcaggtagcaccatctggctggaggggggcaccccccccatggatgcccttcagatagcagaggacaccctccaaacactggttccccactgccctgtgccttccggccccagaaggatcttcctggatgccaacgtgaaggaaagctactgccccctagtgccccacaccatgtactgcctgcccctgtggcagggcatcaacctggtgctcctgaccaggagccccagcgcgcccctggccctggttctgtcccagctgatggatggcttctccatgctggagaagaagctgaaggaagggccggagcccggggcctccctgcgctcccagcccctcgtgggagacctgcgccagaggatggacaagtttgtcaagaatcgaggggcacaggagattcagagcacctggctggagtttaaggccaaggctttctccaaaagtgagcccggatcctcctgggagctgctccaggcatgtgggaagctgaagcggcagctctgcgccatctaccggctgaactttctgaccacagcccccagcaggggaggcccacacctgccccagcacctgcaggaccaagtgcagaggctcatgcgggagaagctgacggactggaaggacttcttgctggtgaagagcaggaggaacatcaccatggtgtcatatctagaagacttcccaggcttggtgcacttcatctatgtggaccgcaccactgggcagatggtggcgccttccctcaactgcagtcaaaagacctcgtcggagttgggcaaggggccgctggctgcctttgtcaaaactaaggtctggtctctgatccagctggcgcgcagatacctgcagaagggctacaccacgctgctgttccaggagggggatttctactgctcctacttcctgtggttcgagaatgacatggggtacaaactccagatgatcgaggtgcccgtcctctccgacgactcagtgcctatcggcatgctgggaggagactactacaggaagctcctgcgctactacagcaagaaccgcccaaccgaggctgtcaggtgctacgagctgctggccctgcacctgtctgtcatccccactgacctgctggtgcagcaggccggccagctggcccggcgcctctgggaggcctcccgtatccccctgctctaggccaaggtggccgcagtctgcctttgcatcctgtcctccagccacccttgcttgccactgttccccatgacgagagcctcctgtctgcagtggccatcctgaggatagggcagagtgcccagggtggccccagggcttctaaaaccccacctagaccaccctccatgtcaggtactgagcaaggccccagatccttctctctggaggaagagggaagcccaggggtcctgtttgtaaaacaacggtggcaacagctcctcttccagagctgcctctgcctttatcctgggagatggggaggaagccccatctctgctgttccctgcgtggaggaagcccacccagcaagctctctcctaccccaggtaaaaggtgctcctttgcctgggtttgaattccagcgctgccacttcctctctgcacctcctggcaagtttcttctattccccacgtttaaagcgatggcacctccgtcccagggtggtgtgaggattacccagtgtggtaggtgctcaataaatgttggtcattgttatcactgaagcccaacatgctagtgcttctagacccttctgtcagtgctgataagcccttgctaagtcccagccccttcatgcttggctggcgtctgccctagggctggggttctcaagcccctggccctggcccagagatttggattcccttggcggccgtggagcccagcctttgatgtctttcaaagcttctgtggtgcgccctggattgagaaccaccacccgaggggtacagcccctctcttccaaccgagaagttcctgtcccagaatggacccagggacaagagaccctgagagccctgggactgggagtgtctgctcctctgaggccaggaggccggtgctgggccagagaggacggcgtggcgaaagtcagcgtccactgcagcacaggatcagatggccgtgtgctgtgcatgcaggagcctcgccttctgtgtctttagtcttgagccaaaatttgctcaaagactgatctcttccttgcagggaacagctttggggctgggggaactagaacccacatgttggtctaaaccctgagaaggtggcagtgaggaagtatcccctcaggtgactggatctgtgttcctccttaacatcatctgatggaatggcaatgaaaagcgtggattgtggaaaatacagaaaaacataaaggaaaaaactccaatcccctgagcccaccactgttcaggacccctgcttttgtcacctactatttccctttagtttttagcagcggctggatgtgatatgtctagtttaaccagtccccttgatctttctatataataaataacacaggagtgaacatcctgaatcag

SEQ ID NO: 12428 - DNA, 3786 bp, Homo sapiens
gtgacctaaggcctctctgccgcgcgcgcagagccaaggcactgatgtttgaactggaaacttcaaaacgtttaataagagtcttcaggatgggtttgaactagacaagctagaaatttctttagaacaccagctctagcatgcatctcccacttttggctttcctggagaggagcttgaagaggtggttctgcagacagccacagtgatacttaggaaaccagaggaatggatttgacttttctgctaggattctctgttatagtttctccctgagttgtaagaggcatggaaatatacatgaaactgaagaacctgcaaggaagggaagtggaactttccatgctgagtgaaaactaaccaagtggcagttgtgactgaaaacactgaaacctaccacgtccagattcactggattgggggatagaggaacggtcacagctagggagaaagaagtgataccggaaaagaaaacctaaatgaagagaatgaggatgactgcacagtagatggccacctctacctccacagaggcaaagtcagcctcgtggtggaattatttttttctttatgatggttccaaggtaaaggaagaaggcgatccaacaagagctggcatttgttacttttatccttcccagaccctgctagaccaacaggagttgctttgtggacagattgctggagttgtccgctgtgtttctgacatttctgactctcctcctactcttgttcgtctgagaaaactgaagtttgccataaaagttgatggagattacctttgggtgctgggctgtgctgtggagctccctgatgtcagctgcaagcggtttctggatcagctagttggattctttaatttttacaatggacctgtttccctagcttatgagaactgttctcaggaagaactgagcacggagtgggacaccttcatcgagcaaattctgaaaaacaccagtgatctgcataagattttcaattccctctggaacttggaccaaactaaagtggagcccctgttgttgctgaaggcagcccgcattctgcagacctgccagcgctcgcctcacattctcgctggctgcatcctctataaaggactgattgtcagcacccaactcccgccctccctcaccgccaaggtcctgcttcaccgaacagcacctcaggagcagagactccctacgggagaggatgccccgcaggaacatggagcggcattgcccccgaatgtccagattatccctgtttttgtgaccaaagaggaagccattagtctccacgagttcccggtggaacagatgacaaggtctctagcatctccagcaggactccaggatggttcagcccagcaccatccaaagggtgggagcacatctgccctgaaagaaaacgccactggccatgtggaatccatggcctggaccaccccagatcccacatcccctgacgaagcttgtccagatggcaggaaggagaacggatgcttgtctggccatgatctggagagcatcaggcccgcaggactgcacaactctgccaggggtgaggttcttggcctcagctcctccctggggaaggaactagtctttctccaagaagaactcgacttgtctgaaatccacattccagaggctcaggaagtggaaatggcctcaggtcattttgccttcctacatgtgcctgttccagatggcagggctccttactgcaaggcatctctcagcgcctccagcagcctggaacccacgcctcctgaggacacagccatcagcagcttgcgccctccctctgctcctgagatgctgacccagcatggagcccaagagcagctcgaagaccatcctggccatagcagccaagcccccattcccagagcagaccctctccccagaaggacccgcaggcccttgttattgcctcgcttagatccaggacagagaggaaacaagcttcccacgggggaacaaggcctggatgaggatgttgatggggtctgtgaaagccacgcagcccctggtctggaatgcagttcaggctcagcaaactgtcagggtgctggcccctctgcagatggaatcagctccaggctgacaccagcagagtcctgcatggggctcgtgaggatgaatctctacactcactgcgtcaaagggctggtgctgtccctgctggctgaggagccgctgctgggagacagcgcagccatagaggaagtgtaccacagcagcctggcttcactgaatgggctggaagtccacctgaaagagacgctgcccagggatgaggcagcctccacgagcagcacctacaacttcacacattacgaccgcattcagagcttgctgatggcaaacctgccgcaggtggccaccccgcaggatcgccgcttcctccaggccgtcagcctgatgcatagcgaatttgcccagctgcccgcgctttatgaaatgactgtcagaaatgcctccacggctgtgtacgcctgttgcaaccccatccaggagacatatttccagcagctggcacctgcagcacggagctccggcttcccaaaccctcaggatggcgccttcagcctctccggcaaagcaaagcagaagctgctgaagcacggggtgaacttgctctgaactgcacccaggaggtgactgggaaggagaaaaccagcaaaggaagctctgccttttataattgaaaaggcccctctattttatttttcttgaaaacattcccttttttaggaaccaaatgatatttgagtttttgttattccttttgcagattgggatgtgttttgggggcaggggttagttcttcaggtcggcagacccagagcacttgataaagaactgtatttaatcggtagtgttggggccgggacgggcttggctccctctctgccatactgagcctgaggtatttcatatctcctgctgttccatcccagcttgaattggtgccacaagcttccaagttggcattttttctagaacctgatcgtccactagcccagagtgtgtgtgttcaacccccacaccaggtggtggtaggcggtgtgactgcacagcgaggtgccggatctgtgagcaggccgactccactcccacgccgcaggtaggtttctccagtgcgctcttgctgggaggtccggatcgttcctgcagggaagcggcagcacacggagaccacttggttgaattctgttggaactctactcaaatctaggggcgtcttctttggacccacaatgggggcaagccttaataatatggaagggagtttgggctttagagatccctttataaaagctctgggggctgagccctgagaattcagtgacaacaggaccaacctgcgctgcctttgactacaagtgggccgtgcagctggttcctctcgagcgagtgtccctaaataggagtttacaagatgtctgggggtaaaagcactgtgcttttcagtggtggctgcgtgaaagggagcgacactcagctgtgtgttcctgggcttgtgtggtacttagaacctcagttctattacgttatagtcagacatttttttgacagtatgagacagactgcaggatgaaaatatttgtcaaaatcttaactgaatgtttactggaagtacttgagattccatttgagagttgtattgttaataatttcatgtcagtgaactgatatctgatgtttatgatatggtgtctttttcttgaaacaagcttccaagggctagaaataaaatagccaaaaaatgctggagttctgagtaattaaa

SEQ ID NO: 12429 - DNA, 4497 bp, Homo sapiens
ggtaggcggggcggcgcgtgacctaaggcctctctgccgcgcgcgcaggtacggggcagaagtcgcaggtacccagctgctgcccacatttctggtccagagtcccgaaccccgagcactgggatgcctggctactccgagccaaggcactgatgtttgaactggaaacttcaaaacgtttaataagagtcttcaggatgggtttgaactagacaagctagaaatttctttagaacaccagctctagcatgcatctcccacttttggctttcctggagaggagcttgaagaggtggttctgcagacagccacagtgatacttaggaaaccagaggaatggatttgacttttctgctaggattctctgttatagtttctccctgagttgtaagaggcatggaaatatacatgaaactgaagaacctgcaaggaagggaagtggaactttccatgctgagtgaaaactaaccaagtggcagttgtgactgaaaacactgaaacctaccacgtccagattcactggattgggggatagaggaacggtcacagctagggagaaagaagtgataccggaaaagaaaacctaaatgaagagaatgaggatgactgcacagtagatggccacctctacctccacagaggcaaagtcagcctcgtggtggaattatttttttctttatgatggttccaaggtaaaggaagaaggcgatccaacaagagctggcatttgttacttttatccttcccagaccctgctagaccaacaggagttgctttgtggacagattgctggagttgtccgctgtgtttctgacatttctgactctcctcctactcttgttcgtctgagaaaactgaagtttgccataaaagttgatggagattacctttgggtgctgggctgtgctgtggagctccctgatgtcagctgcaagcggtttctggatcagctagttggattctttaatttttacaatggacctgtttccctagcttatgagaactgttctcaggaagaactgagcacggagtgggacaccttcatcgagcaaattctgaaaaacaccagtgatctgcataagattttcaattccctctggaacttggaccaaactaaagtggagcccctgttgttgctgaaggcagcccgcattctgcagacctgccagcgctcgcctcacattctcgctggctgcatcctctataaaggactgattgtcagcacccaactcccgccctccctcaccgccaaggtcctgcttcaccgaacagcacctcaggagcagagactccctacgggagaggatgccccgcaggaacatggagcggcattgcccccgaatgtccagattatccctgtttttgtgaccaaagaggaagccattagtctccacgagttcccggtggaacagatgacaaggtctctagcatctccagcaggactccaggatggttcagcccagcaccatccaaagggtgggagcacatctgccctgaaagaaaacgccactggccatgtggaatccatggcctggaccaccccagatcccacatcccctgacgaagcttgtccagatggcaggaaggagaacggatgcttgtctggccatgatctggagagcatcaggcccgcaggactgcacaactctgccaggggtgaggttcttggcctcagctcctccctggggaaggaactagtctttctccaagaagaactcgacttgtctgaaatccacattccagaggctcaggaagtggaaatggcctcaggtcattttgccttcctacatgtgcctgttccagatggcagggctccttactgcaaggcatctctcagcgcctccagcagcctggaacccacgcctcctgaggacacagccatcagcagcttgcgccctccctctgctcctgagatgctgacccagcatggagcccaagagcagctcgaagaccatcctggccatagcagccaagcccccattcccagagcagaccctctccccagaaggacccgcaggcccttgttattgcctcgcttagatccaggacagagaggaaacaagcttcccacgggggaacaaggcctggatgaggatgttgatggggtctgtgaaagccacgcagcccctggtctggaatgcagttcaggctcagcaaactgtcagggtgctggcccctctgcagatggaatcagctccaggctgacaccagcagagtcctgcatggggctcgtgaggatgaatctctacactcactgcgtcaaagggctggtgctgtccctgctggctgaggagccgctgctgggagacagcgcagccatagaggaagtgtaccacagcagcctggcttcactgaatgggctggaagtccacctgaaagagacgctgcccagggatgaggcagcctccacgagcagcacctacaacttcacacattacgaccgcattcagagcttgctgatggcaaacctgccgcaggtggccaccccgcaggatcgccgcttcctccaggccgtcagcctgatgcatagcgaatttgcccagctgcccgcgctttatgaaatgactgtcagaaatgcctccacggctgtgtacgcctgttgcaaccccatccaggagacatatttccagcagctggcacctgcagcacggagctccggcttcccaaaccctcaggatggcgccttcagcctctccggcaaagcaaagcagaagctgctgaagcacggggtgaacttgctctgaactgcacccaggaggtgactgggaaggagaaaaccagcaaaggaagctctgccttttataattgaaaaggcccctctattttatttttcttgaaaacattcccttttttaggaaccaaatgatatttgagtttttgttattccttttgcagattgggatgtgttttgggggcaggggttagttcttcaggtcggcagacccagagcacttgataaagaactgtatttaatcggtagtgttggggccgggacgggcttggctccctctctgccatactgagcctgaggtatttcatatctcctgctgttccatcccagcttgaattggtgccacaagcttccaagttggcattttttctagaacctgatcgtccactagcccagagtgtgtgtgttcaacccccacaccaggtggtggtaggcggtgtgactgcacagcgaggtgccggatctgtgagcaggccgactccactcccacgccgcaggtaggtttctccagtgcgctcttgctgggaggtccggatcgttcctgcagggaagcggcagcacacggagaccacttggttgaattctgttggaactctactcaaatctaggggcgtcttctttggacccacaatgggggcaagccttaataatatggaagggagtttgggctttagagatccctttataaaagctctgggggctgagccctgagaattcagtgacaacaggaccaacctgcgctgcctttgactacaagtgggccgtgcagctggttcctctcgagcgagtgtccctaaataggagtttacaagatgtctgggggtaaaagcactgtgcttttcagtggtggctgcgtgaaagggagcgacactcagctgtgtgttcctgggcttgtgtggtacttagaacctcagttctattacgttatagtcagacatttttttgacagtatgagacagactgcaggatgaaaatatttgtcaaaatcttaactgaatgtttactggaagtacttgagattccatttgagagttgtattgttaataatttcatgtcagtgaactgatatctgatgtttatgatatggtgtctttttcttgaaacaagcttccaagggctagaaataaaatagccaaaaaatgctggagttctgagtaattaaatggcagcatttttttgtgacaaaggtaagggttaagacagtgtgtgtgtgtgtgtgtgtgtgtgtgtgtgtgtgtgtgcgcgcgcgcgcgcgcgcgtaacgtgggcgcatccctcttttccttccctgggttcagtgtggctgggtaaggaccgtctgtttgtagggctgccaggctgcagcctgctgctccagggagcaccagctgcagctgatccaatacaccaagcctgtgtctccctcttctatcacctctctccaggatctctgctgtctcttggatcccatctgcctagatggaagaggatcctatccgaagctaggataaatgttgtcttactcctctgctatgttctcccagaaaaaattgattacaagttctctgctgtggttgctgcagctccaggaagtccccgcaatgtctcacgttgtctttgaccagtggtccccagtaccaggccagcgaagacaactttataatgtcatttgtgttgtgaaaattcttccactgacccaaaatggaaccgtacaaagcctatccgtgtatatggaaaagtctcatgcacctggattaactcagaaaaagtaaagtcctgaaacttca

SEQ ID NO: 12430 - DNA, 27599 bp, Homo sapiens
agaccatgtggttgtatagttaaggttcagtgtttcaaataagagcagtcattgtgggcgcctcgtttttttttctagctactcgtgtcttctccggcagatggtctaacggctggatagaggcatatttttagtttgaatttcctgcgcttacagaatggttttatctaatttgtagctactggggttctttattctctggggccacctgaaggctttcaaacacagtaataagccctcctcgggctgggaaacaggaagctgtgttttaaatgccgtgatcactggattaaaggaaacatggctccactctgttctcttgccaggtggaattatttttttctttatgatggttccaaggtaaaggaagaaggcgatccaacaagagctggcatttgttacttttatccttcccaggtaagccacacagcattttattgttcagtgaggatcccagtgcctccaagtggtgacttttcaaaagtatggggtttacattaggacagtttggctaatccagacaatgacatttctactgtcttattcttagttgtactatttcttgttgttctggtcttaaaatttccaggcagctcggcactttcatcgtctttagctttctatttccatcatgatttttgtctgcctccctctacccccaattttttgatcagcttggtttttaaaagttattattctgctgggcacggtagtttatgcctgcagtcccagctctttggcaggctgaggtggatggatcacctgaggtcaggagtttgagaccagcctggccagcatgatgaaaccctgtctctactaaaaatcccaaaattagctgggcgtggtggcacgctcctgtaatcccagctacttgggaggctgaggcacgagaatcgcttgaatccaggaggcagagttgcagtgagcagagactgcgccattgcacaccagcctgggcaataagagtgaaactccatctcaaaaaaaataaataaataagtttgtattcaaacatatacaaaaacagagaggcaagtatcatgaaccctcatatgccatcagtagcttcaacaattatcaatactttgccgatttttttttttttttttttgtgatggaggctcactctgtcacccagggtggagtgcagtggcatgatctctgctcactgcatgctccacctcccgggttcatgccattctcctgcctcaacctcccgagtagttgggactacagtcgcccgctaccacgcccggctaatttttgtatttttagtagggacggggttttaccatgttagccaggatggtctcgatctcctgacctcgtgatccacccacctcagcctcccaaagtgcagggattacaggcgtgagccaccacgcccggcaatactttgccaattttatgtgacctatctgaacctcttcttctctctcttttttttttcctggagcaaattctagatgttgcgtcatctcaccagtatcaagcaacatctctaactgaaaagggcattattttgaacattaccacacctaacgaaagttacagtaattagtaacagtaattccttaatattacctgatacccagactgtattcaaattttgccttattgtcttggatattacttattctgctcttccttccttccatgcacccatacttccatccttccatttctttttctttttcctaataaggatccaaacagcatccacatattctatttggttattttgtattttaagtccttttaataacagtcctcacccagccactcatctttttccccctcctctatgccattgaattattgaagaaaccaggtcatatgtgtagtagagtgttagaatgtcccacactctagatttggctgatttgttcctcatggtggtgtcatttaatgtctcctatccactgtatttcctttacattagtagtaagatctagagtcttggtgaggttcaagctcagttttctaggtaagaattcttcatgggtggtgtatacatttcctgtgtatcccatactgtctggctgtcctgtgcgttagttaaggctaaggttgattaggagattctgtacattccctcctgtgactgtgctctgacatggatagttggggttaatctgcatccctctggccactccgtatgggggatttgagtaggagtgaaaggctcatgcttctgctaagcatatgcctataatcctagcaacagaaatgcggttctgtgcagtcatcgcatgtgttcctgctgggtgttctcttagggttcagtcatctcaggtaggggttggcaaactttgtaaagggccagaaagtaaatattttaggctttgcaaggcacataaggtttcaatcacatgttcttctttgttgtaacctttaaaaagtataagaaccattcttagcttacaggccataggaaaacgggtaacagactggatttggcttgcaggctttagtatgctgtaagaaatgacttaagagttcaagaatttcagcttcctatctggaatgtgctcctttcccacagaccctgctagaccaacaggagttgctttgtggacagattgctggagttgtccgctgtgtttctgacatttctgactctcctcctactcttgttcgtctgagaaaactgaagtttgccataaaagttgatggagattacctttgggtaagttgaatggcagaatcagtgctgaagtgttgcaatgataagtttaggaagttatgttgtttctgagtcttgaatttagaattatctgcccccaccaacctcatccatgtactgtgtttagtaatcaccctcgcttcctgtggtactctctgcaggttttcatcatcaagtgctttccaaaacatttctaacatattctgcattgcacacagctggtttctcctttcctttcaaagacttaggccaacttgtggaaattctgtttactctgtgttgtaaattgagtttttatcatcatcttttcttctccatgctctctacacttactgggtaagtgacccagaaaaaaatgatagatatatgttaggttttagagaacccattaaaaaaaaaaaaagaatattgcttgagtccaggagttcgatatcagcctgggcaacatagtaagacccccgtctctataaaaaatttaaaaattaaccgggtgtggtggctcatgtctgtggtcttagctactggggaggctgaggggaggattgcttgagcttaggagtttcaggctgcagtgagccatgattgccactgcacgctagcctaggcaacagagtgacaccctgtcttaaaaaaaaaaaaagaataaaaatcattcctttacattctaatagtagcatataatctaaagtgctgtttcccatggctacatttattttaaggcttcctgaggtaaagggatgcttaagtgtgggatgctatattcaactttgtaggtattatttccaacattttattacgaaaattttttaaagtactgaacagttgaattttacagtgaatactcatatacctcctcaattctacagttagcattttattatagttgttttattacctatctattcattcctttatcctcccattaattcaaattatttttattttattttattgagacagggtctcaatctgttgctcaggctggagtgctgaggtgtgaccttggtttactgcaacctccgcctcccaggctcaaacgatcctcccatctcagcctcctgagttgctaggaccacaggcatgcaccaccatgcccggctaattttttaaactttttctagaggcagggtttcaccatgttgctcaggctggtcttgaactcctcagctcaaggaatcctcccgccttggcctcccaaagtgctgggattacaggcgcgagacactgtaacccagccccaaattattttgttacagttttcaaagtaagttgcacacattagtgtactctccacacagatactctctctatcatgcatatcatcaactaaaatttaatgtttggggctgagcgctgtggctcaggcctgtaatcccagcactttgggaggccaagacagtcggatcacctgaggtcaggaattcaagaccagcctgaccaacatggagaaaccctgtctgtactaaaaatacaaaattagccaggtgtggtggcacatgcctgtaatcccagctactcgggaggctgaggcaggagactctcttgaacctgggaggcagaggttacagtgagctgagatcgcgccattgcactccagcctgggcaacaaaagcgaaactccatctcaaaaaaaaaaaaaaaaaaaaaagaaatttaatgcttgtttgtggttacatgctttacaggcgtctgtcttgccacttaacacttgtgaaattcgttcatgttgttgcatctatcagcgttcgttccattttattatcaaacagtattccgttgtctgaatatatcacaatctgttcttcttttgatggacatctgaactgtgtccagttggggatattaaggataaggcttctgggaacattcctatacaagtattttggtgaacacgtgttttcatctctcctgggtaaatatccagtcctggaattgctgggtcatagagtaggtgtatgttggattttataggaaactgttagaacttttccttcagtggttgtaccattttacattcctaccaagaatgtatgagaattccagttactccacctgctcatcagcattgagattgacagtctgttcatcttagccattctgctggatgtgcagtggtgtgttattgtggttttagtcttcacttccctgatgactaatgatagtgaggccttttcatgtgcttaatgaccacttgaatatcttcctttgtgaagtgtccattcaaagccctgcccattttttaaattgggttttatttttttaattgaattgtagttctttttatatcctagataccagttctttgtcagatacatctttttaaaataatttctcccagtttgtggcatgcctgttaattttcttgttgtcttttgatgagcagaagtttttcattttaatgaagtctaacttataaattttatctttttatggttattgctttctgtgtcttgcctgaaaaaaaccactgcctactccattggaggagatagtctcccttttttattttttgtaagaatttgatagttttagcttttaaatttagatctgtaatccactttgggttaatatttgtgaatggtgtgaatagaggtcaaggatctttttttttttttccacctggataaccagttcttccagcatcattgttgaaaacattttcctttccctattggatttccctttggttcctttgccaaagatcagatgaccatttaagcgtgggtctatttctggactcttttcggcttttccacagatctgtttgaagattctgtgtgagtaccacactgtcttgatttctatagctttatagtaagtcttgaaaccagatagtataagttctccaaccttattctttctcaagatagctttggatatttcaggttctttgtgttttcattgtacaatcagtttgtggtttctgaagaaaagctggtgggattatgattgcaattgcattcagtctgttcatcaattggaagaattgaacacttcttacatgccagactgttgtaagctcttggattacatctgggaacaaagcaaagatccttgtgctactgtagcttacattcagagggaatttttgtttatttgttttctgtcagggtttattagtttaaatatctgatgattcccttaggacagattcctagaggtagaattactacatcaagtaataggaactttttcaggctctttaaacatatgaccagataactttctaactcagcaagtacttttttttttttgagacggtgtctcgctctgttgccaggctggagtgcagtagcgcaatctcggctcgctgcaacctctgcctcccaggttcaagcgattcccctgcctcagcctcctgagtagctgggactacaggcacacaccaccacgcccagtatttttagtagagacggggtttcaccatgttggtcaggatggtctcgatctcttgacctcgtgatccactcaaagtgctgggattacaggcatgagccaccgtgcccggccaagtatttatcttctgtggaactaaccactacgctcagcattttggagatctaggactgggaagattgcggtcagttcttgctcttaaagcactctatccagctggagaaacatgatggccattcatgaaggagtttgagtcctgtccattgtttgtaatggaatccagattaaacatctactgtccaaataacagtcctaacaatgcaagggtcagaaaaaaggtcagcattattggctcgaggtaatagaacagacctcatggagatactgaaattggtggtgggcactgaaggttgtaagttctggggaaatgaacaataaggaaaaggacatttgagattggaaaacatgaattgaggtacagaacttacttgtccatggagattaacttggccagaatgaagggtgtggactcagggacaatagaagatcaatttcgatgggccagtgaagtcaggtaattgagagccctggatgccaggattctgggcttggactcaaagagaaggaagatgcttgtcttcctggtttctctctttacaggtgctgggctgtgctgtggagctccctgatgtcagctgcaagcggtttctggatcagctagttggattctttaatttttacaatggacctgtttccctagcttatgaggtacaagtatggggttgaggagtcttacattgggcctctttataaaaaccggtattgccagaatgcagcacttactctggggtcttgtatacttcatataaacacattgtgtctggggacaaggtcaggagctcttggaggcccctcatatgcctttgggcctagtggcataggtcacatttattccaaatgtttatccccatctcctccctgggatgtttagaaagcgcaggccctgcttgccacccccacgcggcaggcgccgtggatctgtgatgggataggtttaaaacaggtcctcccttccggtcagtttcctgtgtgaggaacaatttttgaggtagttgggactctggccaaagaatctgtccctcaaaatctcagatattgacctgaggctctttctgttttagaactgttctcaggaagaactgagcacggagtgggacaccttcatcgagcaaattctgaaaaacaccagtgatctgcataagattttcaattccctctggaacttggaccaaactaaagtaacattttcatcctccttattcattttatatgtaagactagggcttctggatacttttttaatattcctgaagtgaactatatctggaaaagtgagtagaatgtcacttctcaggcagggccatgacacggcaggtcacctctcagcctcatttcccttatccaaagaatggtgtcagcatacctgccttcttgaactgttttgatgatcaagtgaagcagtacctcaaatgacaccaagtaaatgctcagtaaagggaattagtattttgttcatgcctcagaagtgttgaactcagtaatctgaaggccgcctctcttgatattcatatcatatgatctagttattctcagcatcaaaaatgcccagcatgaacatttcaaaaacaaggttgctgtctttgagagagaatggttgggaactgtttttgtatctctgagccgctccgtttgcggttggcactcagtgaaacctaggctgcttgtgtggctggcctgaccacctgtgctgccccattaagagccagctacctgagccctgactcacagccctctcctgtgtctcactgcgatagtaaataatgtccctgtagcaggggtgtagcactgtggctcagccttcacagagcatgactccaccagacatggggaagggttttccctgctccagtctggaaaacttcctgtagctggccccagagctttatagaatggctggctgggatggcacagtcttgaggctatgaagaataaacttcttaatgtgtcagcagctccggaggctccattaacactagttctaacagctggtggatacttgctggttctagctggcaggtggaagtctgaggaggctgctggttattgctggctcttcctgaccaggtccagatgcttttcttgtatttttagggacttctaggcccctgactccatacaaggaatgtggaactgaggcatatttccccgagtgaaagagcatgatgttttcattttatgtgatggaatagagtcatggaacctggtcagacatcaagccacctgtatcaccatggggattgtgcttcagaaggaaagtggaggatagggtaggtgggtttcacctggtaccatgacatgtatttataggatacaccctcctcttctgctgccgtgaggtcttagcattgtcagggtagacagtcggtctcccaggccatctactttgacccctttgaatagccatatgccatatttgctgcaccttctagcttctggacaggcctccttgttctaagaatttggcatttagtggtgtcagcagttctgagtatagagaggtagaatagtcccaagccatggcacagctttcactgtgtgacacattctccttttccaggctttgagctacaccctgtccagctgttctgtacaaccctttccccttttctcccttcctgattgtgagcatgctgatgggtgggcatgatgcctcttgccctgcacaggtggagcccctgttgttgctgaaggcagcccgcattctgcagacctgccagcgctcgcctcacattctcgctggctgcatcctctataaaggactgtgagtaactccagacccctttcttccagccccattcccttgctgcacaactgaccatcagccacctccagatcacagtggggagcccagtctctggccagttccaagtgggctggttcggcaaatatcaggtagtttagatttgactcagtttagaaagacaggtgtgtacctgtctttgagcaaagctgagaaattggaaatagttgtgttcagaaaagagttaagaatgtccctataattctcagtatggggcatgctggaatagttgtcagtctgcaaaatgctaatgcagagtcccgagcgttgccagcagccagcactgtagtcaagaggcatggaaggggcctgctgtgaccctcctcctgctgcccagagaccctggtgtgcttgcctcagctcagctctgcaaagcagccttacaggcccttatccagctgccttcaagcctcttggctgggccagtgtcttggttggcctctgagaattcacttcacttcttcatgtagttggagggcttcttggtgaatctgagtgcccaagagccactctaggtcatctaaggcctctctcctcatggagggtttgctgtcacagcccagggcaggcagggccattgcgctgtgcccggagcttcctgaggagcaggcaactactgtgtaaatggagaagcactgaggctctcgcaggggcccttgggccagacaggctcggccccagatcctcccttctttcgccagccatgcggccttgggcaagttgcttagcctcaattttctcttctgggaaatagacatcccttgtgaagaatgaaatgagatgacagatgcggaagaaccgagcatagaccctggtgggctttgcactcttcttccttgccccggttcttatcatgatggttctgaatcagctgtgggatttccaagttcgtcagtgacatacccaccaaagacagtattttttttccccttttctcattttgcatttcttaaatgtatatatatatatttttttttcttttttttttttttgtagggacgaggtcttgctatgttgcccaggctggtctcaaacacctggcttcaagcgatcctcagcttcccaaactgcttggattatagacataagccactgcacccagcctgtatttacattatacggctaatacatgaatacattttcactgtaaacaaatcaatcaatagaggaacacacagagcacaatttaaaagccccccttctttcttcaccatttttgtttgtttgtttttgagacacagtcttgctttgttgcccaggctgtagtgtagtggcataaacacagcttactacagcctcgacctcttggactcaagtgatcctcccacgtagctggaacaacaagcacttgctaccacacctggccaagcttttgattttttttttttttttttttgtagagatgggatctcactatgttgctcatggaggtctcaaactcctaagctcaagttattctcccacctcagcctcccaaagtgctgtgattgcaggagtaagccactgtgcccagcctctccctcactcttaacctgtcctcaccattggcagtttggtgggcatcttgctctttctgtgtgtttgtccccactggtacatgtatgcatatattgcttttgtttatttttgctatctccttaaataggatcacatggtttctcaacgcatacagtgaagatttccttaccggttcatatgggtctacctcattcttatgaggactgcatactttttgggattctggctgtgttgtgctttactgtcttgttgatgaacattttggtggtttactcattttttaattgtttttaccattctccctgtaatgaatattcttacgcatacatcttggtacaagctgagtcaaagggtttggatattttaaatgttggtaggaactgccagagtgccctctgtaagggttttaccagttgaaactcccaccagccaagtccccaagatcctcgtcaacacgggctgttaggcatctttaaaatttggagtgttttggtgtatttcgtctcatggtgttcttgttctgtgtgtgacctcctaggattgtcagcacccaactcccgccctccctcaccgccaaggtcctgcttcaccgaacagcacctcaggagcaggtattgtaaagtccacccacctggctggacagcatcccccagagcactggtcactgagcctgaggctggagggatcaggagcagaggccgtggagcagttgtttcacttggtcttgtcaggaccccaagtcctccaatgtcattctcctcagtagtgaagccattggtgaggctgaaagaaaatgttttcttccacgagctaggcctggatagttgttttttcttcaaaccaaggaaatcttggttgaattcgacttcccataagaatttgatgtctctttatgtcaaagagatgttagacttttcagagacagactgtaaaggatgtgtctttagaaagatttagggggttgggcacggtggttcacacctgtaatcccagcactttgggtggctgaggtgggcagatcacttgaggtgaggagttcaagaccagcctggccaacatgatgaaacccatctctatttaaaatacaaaaattagctgggtgtggtggtgcacacctgtaaatcccagctacttgggaggctgaggcaggagaatcgcttgaacctggcaggcagaggttgaggtgagctgagatcgcgccactgcactccagcctgggtagcaagagtgagactctgtctcaaaaaataaaaataaaaataaaaaaataaggaaaacaaactcttctaaaatacttccattttatatttatttaattgtttttatattgaaaaaaaagccatgcatgctcattgagaataaaattgcccatctttgaactgtacagggatagccactgccagcatctggcatatctccttccagtcctttttttgttttgtgtatgaagctgtggtttccagcgtatcatgaggctgtctttttacatgtattagtgaacaggcatgtaaaatgctggtagggctctattcagcctcctcagccactgtggctatgggtgtcaattcaagtagcctttctgggaaacactttgataatgagaacgttaaggatgccctttatttttttcctaataatttgacttctaggaatatatcttaaggaaataatgtaactgctgaaaaaaatttatactcaaaacttgatcacaacaagctttatgaaagtgaaaaatcagacaaaacttgaatgcttaaagtaggaggtggcaaattatggcctgtgggccacctgcctacaaatgaagttttatttggctgcttttgagctataatagcagaaccaagtaggtgggacagagaccatatgccctgcaaagccaaaaatatttactgtcttgtcttttgcacagaaagtttactaattactggtctaaggtaggtaaatgattaatttactcatatcacttaaaccttcataaaattttaatcagccgtttaaaatggccaaagatgttttagtggcaggaaatgcgtgttactgttttaagcagaaatatgaaattttatatagtgtggcctcaaaagtataaaaactgcataggcttaaggaaaaaatacccaatattaatagtactagcttggggatgagggattgtatgtgattttttttttcaacgctttgtctagagtaaattgaggttaggcttagtaatctaaaacatagttttttaaaaatcaccaaaaaaggaagaacaccatatcattctaagattgaaagtcattttggctagaagagcagttcttgtttggtttggttttgttttggtgggttcttttggaaccctcagattgaaacgagagatgttttcatttttgagaaaatcatcaggttttaggccctgattgtgaaccagaacaaacgagagattgggtatagcattttgtttaagtcaaatcctttatcgtgagagtcacagtattttgacatttttattataatggaatttatgtgaattctacatcagggctgtggcagatgtgactgtattctagaatatgagttccccaaaggtgtaaaagagaacaggaatcctcaattttattcccagaagggagagagactgagaaaatcagaacgtagagtgtgatgtgagtttgggtggagctgctgccttgcagcctgtgtgggcccaggttcttgcttcatcccagccatagtgggagccagcagcttgggggagcttctgttccatctgcttggctcttagcatgtggttgggacaagctttctgggcctggctaagttttatgaacagatggcacagcaaattcctgatggttaggtcaagaggagaatgtggtgcccagcgccaacttctgtgtgtgtttgttttcagagactccctacgggagaggatgccccgcaggaacatggtaagtagtgaggcgcatggttgcctcttgagaacggcggtcttttatgctacctacccctgtacaagttatgcgaaggaaaccaagccatctgcatgtttatttcctctgctcataataggaaaatggatgttatggagcttcaagaatcgagttacccaccagaaccctaatggtaaagctatgattttaggcatgctgtcaaatccctgctttcagaccctccttaacttcatattgtgagactgctcggtcaagtgccaggagattgtgattgggagagggtaaggcaaacagcgactgccagaaagaccttttgcaggatgtggaggcgtcctcaggagagttatttcgatttattctgaagcctgagttggagcagatccctttcttagcttatatcttcttcttgtaaaagtgcttttcaacctttctctcccgaacatcttccttctccaaagctgggagtcatgttgcctgcagggactctttccttactgggcccaggagttcgaggtgcagtttggcaacctgtgtcctggctgaggaatgcactcacagcacccctttccgagcccacgtgtgggttggatgcatcacgccagtgcagctattgccccgctgccctctctggctcaggggaaagtcctgttcatattgctttgcaattccaggagcggcattgcccccgaatgtccagattatccctgtttttgtgaccaaagaggaagccattagtctccacgagttcccggtggaacagatgacaaggtaatggagtgcacagagagttaaccttgcaccacacctgagggaccccatcgcgtgattggttaaaaaacaaacctctgatacatcccatcgttccttaattccatcttccccatgccctgtcttgtaaaggagcatctgaatcttgagtttgttaagaaacagagtggcatagagagatgacattggctttcatatcccagctctcttacttataccagctatgggaccttgggcaagtccattccctgcctgagcctcagttttttcatctgaaaagtagacaaaatagtatccctttcatgagttcattgtgacacttgaaaatagtataggtacagcacctagtatagggcctgatgcgtaggagaccttccagatgtgggtcagtcttattcagtgggctctgccattttcagtaggtgagtctggtgtcactacgtaaagccccaagggccagatgttggtgtatttttactcttgtgatttaactctggtggcctcttaggctctgtggcctcaggcacccccttgtccttgatgcctgtgctttagtcttcactgtggaagggcacttgccctgcagtctgtcaacgtgccccttccttacatctctcttgtttgccaggtctctagcatctccagcaggactccaggatggttcagcccagcaccatccaaagggtgggagcacatctgccctgaaagaaaacgccactggccatgtggaatccatggcctggaccaccccagatcccacatcccctgacgaagcttgtccagatggcaggaaggagaacggatgcttgtctggccatgatctggagagcatcaggcccgcaggactgcacaactctgccaggggtgaggttcttggcctcagctcctccctggggaaggaactagtctttctccaagaagaactcgacttgtctgaaatccacattccagaggctcaggaagtggaaatggcctcaggtcattttgccttcctacatgtgcctgttccagatggcagggctccttactgcaaggcatctctcagcgcctccagcagcctggaacccacgcctcctgaggacacagccatcagcagcttgcgccctccctctgctcctgagatgctgacccagcatggagcccaagagcagctcgaagaccatcctggccatagcagccaagcccccattcccagagcagaccctctccccagaaggacccgcaggcccttgttattgcctcgcttagatccaggacagagaggaaacaagcttcccacgggggaacaaggcctggatgaggatgttgatggggtctgtgaaagccacgcagcccctggtctggaatgcagttcaggctcagcaaactgtcagggtgctggcccctctgcagatggaatcagctccaggctgacaccagcagagtcctgcatggggctcgtgaggatgaatctctacactcactgcgtcaaagggctggtgctgtccctgctggctgaggagccgctgctgggagacagcgcagccatagaggaagtggtgagtgtcctcagaccttctcctgcccctctgcggcctctgccgatctcctgtgcttccctcacagcactgtgccaacacccagggaagagataaaggctcagccctcagttgtgtgaccctgggcaagacgttcttgtttagacgatggaggtattacctgcctctgtgggtttttgtggggggtaagagtgagtcaagcgcatagcactggtggtgcattggcatccaacaagtgttggttctcttcttccgctgtttctagttttgcagagcgcaggccttggagaaagggaaggcctgagatggaatcctggcccttgtcctctagctgtgtgaacttgcccacagacctttgtccccttgagccttggctaactcctcagtcacgtagggatggtggtagaccttcctgttccagatgcagtgagataatgcaggcagagactgcacacgtacgtgcatgtgttgtgccgcccctgctcatggcctcatttcctagcctggacagctctaggttctgtgtcagctggaaactcctccgcagtgtgtcacagcctgggttgggagttccctagaaacccagtgtttccctccatagccccagcatcgtacctgatctgaagctccttcctagaaggctgggatgtctgaaatcctgcctggctctggagggctcttaaactattgcagccccttccccgcttagaggcttagagtggtaaactgaccttccctggggcccacgctggagattcgttgctatagtaacagccttgctttagtaggcagggaaagtggtagcagtaagaacagcaggttgaaattgctgcagggcaaatggtgtcttggggctttccttgtttttattcttaaatgtgtattattctaagctgatcttactatcatgcagggcttgtgaccctccataaatgagctagtcaccttgaaatacagaagaagagataagactgcacagcagcttccttgcacagagctcctagcaagagaatgctctctggagctgtcaggcttctctgtgccctttccacagacgctggatcactgagttatggctcatttgcttcctgtatccccattcaccatagctaggagtgactatccatctccttcttatagcagtgcggggagttgtggctgcagtgttaaatgcctcatctccctgccaatgccttggttttcatggtctgttctgcacagtgtcgagccttggaagtgtcattttgaagggcccagtgtttgaatgcaataaagtggatataatacctctctttttaccttcccccacaaaaaggaaaaaatagcccaggctgctctttgagatgtattctgcaccaactatatgtgaaatacttcgcatctctcgttttagccaagccttagaacagttctgggaaggaggcattgtaactcccattttaccagtaagaaaacagcctcattgagatgaaaagacttcctgcaagtggcaggtccagaattcttgcttgtttctggttccccaccccagcctctctgtccccccactgccctgcccttgcagtgatagctgggaagctgaagaaagggggtcagtgtcctgccttctgtggctcgtgctctatggccatatcccctggtttgtcaaggtctatccatgctgttacgacatcagcctccatgggcttctgtggaaagcagggtttgatgctggctaggccccgggaaatagactgcagttttatggaagagaaaaagctaatcttttcttcttttttttttttttttttgagatggagttccgctcttgttgcccaggctggagtacaatggtgtgatctgagctcactgcaacctccgcctccccggttcaagcggttctcctacctcaacctcctgagtagctgggattacaggcatgtgccaccaggcccggctaattttgtatttttagtagagacggggtttctccatgttggtcaggctggtctcgaactcctgacctcaggtaatctgcccgcctcggcctcccaaagtgctgggattacaggcatgattgcacccatccctgaaaagctaatcttttctagtatggagtgactaactttgatcagcccactggtttgagagtgggtttgttaatcagacccaaaggatttctgttttataatcaggaagaggtgtttgattgcctttttgtcccagactagccttgaaaatactttatctgatttccctgcagcccctctgctactgtctagaaaaaccaaatacccccagttacggtgagcacaccccttttgcaagggctccttaatgatgttacatactgccaagctgcccttgtgtcatttggctgtcttgtctttgggtggatcagcttccacagggagtaggggtagggtgaggggcagcaggggttgggattggtgaaaggagccctgggtggagcagccaggagggttgggattggggctggaattccctcagagggagtggaataggctcacaccagggggcagcatagagccgctgatagtccattactcagaccccaagataatctccttgaccttcaaacacagtgatcagattaattatttatcactacaataggacatggagcttctgtgtacagtacatgaggcttgaagttagtgtgagagtgttgccataaaacattttatgaaaaaacaccttcccccaactgggaaaccggtatctctaagtgaatgtgtgttccatgcattgctcctgctgcacgctgtgtcacacactgacatttgtgccacttgctttcgtgtgcactagaagtcagaggacccgggaattagcctcagctctgtgttgcctagggctgttgtgaggatcacattatgtagcagtatatatcggtggctggcaaacattttatgtaaaggaccagaaagcaaatattttcagctttgcacagcttttcagctctgctgttgcagtacaaaaacagccatagacagtatataaatggtatgactgtattccagtaattatttatggacatggaattggaacttcatataatttgcacatgttacaatattattcttttgacttttttccccaaccaagtaaaaaaatataaaaaccattcttaggtctcagactgtacaaagataggcaacaggctggatttagtttataggctagagtttgctgacccctggtatgtatgaaagcacttggttatcagtaaaaattatccacatgtcatctgacatagcatcttgtgattaactgtgtttttatggttaagtgatcctatcttgagtgcaagttaggcagaagattttggaagcaaagctccgtgcctgtggggaaacagtttttggcatggctcactctctgttcttattgtttcttcctctggacaccagctcagcatggaagggatgactgttagcacgttcttgaggtccaaaaactttcagtgaggctgtggtttgacttcatcaggtgaatgcttatgtgtgcccgtgtgcgtgtcggcacatgcacacacacacatctgttcaaataagaggctcagtgttaaacgcagtgttggtcaggctctctcagtgatctgaacatgagatattatgattgtctttcctgagcacatatctttttacatagctctgcaaccttggtttaaaccaaatagctcataaattggcagtgcttggcattggatgtgttcatttattcattcatttagtggattcatttattgagcacctactaggagtcagacactctactaagcattgaggatacaaaactgagcgcatagaaaataactttgtatgtcacacctattgacttgaaatatcatttctgagactttcatacaggaaaactgatttaacaccaatatactcccaaaataacatgtaagcttcatgacatttacttcagaagcattctgtttgcatctctgtactttttatatgcacttatttttcttacatagctgttgaaaaatagtccacaaattatctgtgatctctaaagagacaccatttcttttatatgattattttcatttccttgactttataaaaagactctgcctcaggatagcactttagagtttacaaaggacttttggatgtgtcatttcatttaagtcactcaatagtcccgtactgttcccattttgcagttgactagaaaaatgaggcacagaaaacttggtaacttgctcctggtcatttgactaaaaagaggctgaacttgggatgttttttacctgggaactgcaaatgtttggggacagtgaccttctttcttgtggctgaagcaggcccaggaaaccccatttcagaccaagcctattatgacaggcctggcctactgagtcaagccctcagtggagcttgaggaacactgcacagccattaaagaattatatgatagaatatttaaagacgagaaaagcagttcatgctgtgttgttaggttaaaaaactatcagtcattatttatgatttgatctcatttttattttacagaaaaagagttacacaaaacagtttagtccagtcttttcaattgtacttaaactttatctccttggaggtttgtaaaaatacaggtacttgaacccatctccttgacagtcgtcctcaactgtattcctcttctgaaccatcaagtgcagaaagctgtttgactgacactcagtccttccaagaaagccaggaccgtgctaggtgtagcagagagaagttaccgtgttacatccagtgagggacttctgtacccagggccagtgagaaacaatgcgggatggtcccaggctgtttgtattgtgaaatcatgcagcctgggtaggaaagccatggttaaaataagatacaccacagtggtgacagtggctattactggatggtgaaatgatgggttgttttcttgttatttttttgctcatctcttttctaaatctcctacaatataatcattatttttaaaaacattagaacataagggtgaaagaaaaatgttggtgagagtccattttgctggatcaagtaggcagtaagatactccatgaatgatttttttttttttttttcgagacagagtctcactctatcacccaggctggagtgtggtggtgcggtctcggctcactgcagccttaaactcctggcttaagtgatcctcctgcctcggtctcacaaagcactgggattacaggtgtgagccaccgtgcctggctggaggattttttttttaactaagtctgtggttaactagccctcagaaggcttgctgaggtcagccctacaagcccatgaccctctccccctttgcagtaccacagcagcctggcttcactgaatgggctggaagtccacctgaaagagacgctgcccagggatgaggcagcctccacgagcagcacctacaacttcacacattacgaccgcattcagagcttgctgatgggtaagaaccagccaaggggcctggggcgacggggatgccagattctagatgggtggagatgagaacttgagccccagcatcatgatgacacggctgtgcacagagttgtctgacctgcgttcagggctctcttctcaccgggagcccagtcccactgagtgtggcgttcactgggcagacgcttctctgctcatgtgtctgtttttggcgtttcccagtgttttgagagaagttcatgttcacatatctgtgatagggtttgtctcagaatgttgagatccacacgcagaaaccgggtgctgcatcgcacagcggcggcagccgaagcccaatgccccgggcctttgtctctgccccgggcagccaactcatggccttgagccgtgctcagtccccgtgttcagtactgggcttcatggggtgggagggcagaaggtaactgtctgctcttcacaactctgtgtcctcttctggaagcaaacctgccgcaggtggccaccccgcaggatcgccgcttcctccaggccgtcagcctgatgcatagcgaatttgcccagctgcccgcgctttatgaaatgactgtcaggtgagcctccctgagtcgctccccaacctactctccacggtcctgctcatgggaaccacctgtggggcccaggcagcgccttattcctaagtagatgaaaaacattctagttactctccttaaggccttcctttgtcggttcctattgccgccatcatccactgttgtgcagtcacgtgccatggactttctggttcccttcctactttagacgcttggggtccagcagtgaaggaacctgaggtcctcaccatcatggagctacatccattactagggacggtggctccgtctccttgctagaaacagtgttgaaatattgttgtctttctaattacaaagtaatatggctgggcacagtggctcacacctgtaatctcagcactttgcgaggcagggggatcacttgaggtcagggttcaagaccagcctggccaacctggtgaaaccctgtctctactaaaaatacaaaaaattagctgggcagggtggtgggtgcctgtagtcccagctactcaggaggctgaggcaggagaatcacttgaacccgggtggcagaggttatagtgagctgagatcacaccattgcactccagcctgggcaacagagtgagactgcgtctcagaaaaaaaaaaaaaaaaaaaaaagtaatacgtgctgatcatacagtcatgcagaatgcttggaaatgtatcaagtaaaacattttcctctctcatctccatcacacaccaggaaataaccacattttacagtttggtatatattgctccaggttttattggtttttggtttttattttttgcacatataaattgtatttttaattattttaagtcttctagaaaataggattctactaatgtacaattttacagttgtcttttttcacattatgtcatagcttgaacacctccatgccagaagaaatattatgattattgtaatttacagtatttaaccaaccgaatttgtttttttctttctatatgcttctcttatgaaaccagaaagggagtttgggctttaaagatcactttataaaagcccgaggagactgggacctgagaatttggttgacaactggtaacagaaaataaagcaagttagcaggtcaagggcagtgctggcaatgtgtatattagtccacgtagtccttggaaccatctggtcaagggcattattttttatttatttattttgagatggagtctcactctcgccaggctggagtgcaggggctcagtctcggctcattgcaacctctgtctcctggtttcaagcaattcttctgcctcagcctcctgagtagctgggactacaggcacctgccaccatgcccagctaatttttgtatttttagtagagatagggtttcaccatgttggccaggatagtctcaatgttttgacctagtgatctgcccaccttggccttccaaagtgctgggattacaggcgtgagccaccacgcccggcttcaagggcattttttaaatcctcattttacagatgagaaaattgaagcacaaataggataagcagcttgcccagggttatattcttcttaagtggcagggccaggatttgaagcattttctccaactgttaagcacatgtatgacctttccacacacatttcagtgtcggggcagtgtggtccagtgtgaggggcatgggtggtggactgacagggagcctgggtgggtgattaggatggttctgattccctgtcacccgccacacttgagcgccaggtgttctgctgcctctcagcgtctccagccaatattccaatagatctttctgtcagaaatgtgtcttctctggctttaattcacagctgccccaggctggcaacccagaggcaacttgcatctacagtcactggtttgggaactggctgtgttgggggtgtgtgtgtctgttttgtgggaggtggaaacaagtaaaatgtcagcatctgctccaccaaccaccttgtggccctgcagtatgtcaccttccttagagctgagaggggtttagtgttgagacacatagctcaaggcatttgttgagagattatttcaataacagtaatagaaacaacagctaccatttctttttttttttaattttattattattataagttttagggtacatgtgctgtgcacaacgtgaggtgtgttacatatgtatacatttgccatgttggtgtgctgcacccattaactcgtcatttagcattaggtatatctcctaatgctatccctcccccctccccccaccctacaacaggccccagtgtgtgatgttccccttcctgtgtccatgtattctcattgttcaattcccacctatgagtgagaacatgtggtgtttggttttttgtccttgcaatagtttgctgagaatgatggtttccagtttcatccatgtccctacaaaggacatgaactcatcattttttatggctgcatagtattccatggtgtatatgtgccacattttcttaatccagtctatcgttgttggacatttaggttggttccaaatctttgctattgtgaatagtgccgctataaacatacgtgtgcatgtgtctttatagcagcatgatttataatcctttgggtatatacccagtaatgggttggctgggtcaaatggtatttctagttctagatccctgaggaatcgccacactgacttccacaatggttgaactagtttacagtcccaccaacagtgtaaaagtgttcctatttctccacatcctctccagcacctgttgtttcctgactttttaatgatcgccattctaactgatgtgagatggtatctcattgtggttttgatttgcattgctctgatggccagtgatgatgagcattttttcatgtgttttttggctgcataaatgtcttcttttgagaagtgtctgttcatatccttcgcccactttttgatggggttgtttgtttttttcttgtaaatttgtttgagttcattgtagattctggatattagccctttgtcagatgagtaggttgcgaaaattttctcccgttctgtaggttgcctgttcactctgatggtagtttcttttgctgtgcagaagctctttagtttaattagatcccatttgtcaattttggcttttgttgccattgcttttggtgttttagatgtgaagtccttggccatgcctatgtcctgaatggtattgcctaggttttcttctagggtttttatggttttaggtctaacatgtaagtctttaatccatcttgaattaatttttgtgtaaggtgtaaggaagggatccagtttcagctttctacatatgaacagctaccatttcttaaccactcacaatgtgttaagcactcacttaatctcattctttaaaacaaaacaaaacaaaaacaccaatgaggacacatactgttgcaacaaacactgtacagatgaaaaagctgggactcagaaatgttgaatagcagcccaggacacacactaggaagtaatagggctgggattagcacctgagtgtgtgtgactccagatccatgctcataaccatctggcctcggagccctcccacagggctgtgagaagagattgtcttgctgggccagtgggtgcaggagacactgaagcttggaatagggtgggatttttctcccttacagggaaggagagaattgagtgaggggagccttagcagtccctgactccaccctttctcactagatttgggggaaactgaggcccataatagttggagaggcaggatccagaaaccaggggggtttgtttaccttggcctggagttggctcctcccaggtggctccgcctctgtgtagtgccctcatccctccctctctgtgtccacaggcttcctgtcacttcgtgtcacatcccactcctgtccttcactccctctcagtctatccagccacccccagtgtggagagcagactagactcctttctcggacactgccattgcctcgtcatagaggcagggcagccccagctactcactctgagcctcagggtccttgtctgtgaaatgggaccataccaccactgcagagcttatgtgaggggcaaagcagagactgtatgcagagcacattgcatagctgccagtatgtcaaaaaagccagcactccacagttcctttatgcaatacttataactccaggatctgtggctgctgccactgtggatggtcccgccacggactcttccagcatctagtgagctgaaaggaaggaaagatggtattggcactgaagcctgaaactcagctgaagaaatagaattccgtgccatgacagctgcacatgccacattgggtgtcctgggtcctctgtgacaagaaccttactgaggtctctgtgtggtctgagattagcaccagcagcattggaccgttgccttctttcttcctccaacagaaatgcctccacggctgtgtacgcctgttgcaaccccatccaggagacatatttccagcagctggcacctgcagcacggagctccggcttcccaaaccctcaggatggcgccttcagcctctccggcaaagcaaagcagaagctgctgaagcacggggtgaacttgctctgaactgcacccaggaggtgactgggaaggagaaaaccagcaaaggaagctctgccttttataattgaaaaggcccctctattttatttttcttgaaaacattcccttttttaggaaccaaatgatatttgagtttttgttattccttttgcagattgggatgtgttttgggggcaggggttagttcttcaggtcggcagacccagagcacttgataaagaactgtatttaatcggtagtgttggggccgggacgggcttggctccctctctgccatactgagcctgaggtatttcatatctcctgctgttccatcccagcttgaattggtgccacaagcttccaagttggcattttttctagaacctgatcgtccactagcccagagtgtgtgtgttcaacccccacaccaggtggtggtaggcggtgtgactgcacagcgaggtgccggatctgtgagcaggccgactccactcccacgccgcaggtaggtttctccagtgcgctcttgctgggaggtccggatcgttcctgcagggaagcggcagcacacggagaccacttggttgaattctgttggaactctactcaaatctaggggcgtcttctttggacccacaatgggggcaagccttaataatatggaagggagtttgggctttagagatccctttataaaagctctgggggctgagccctgagaattcagtgacaacaggaccaacctgcgctgcctttgactacaagtgggccgtgcagctggttcctctcgagcgagtgtccctaaataggagtttacaagatgtctgggggtaaaagcactgtgcttttcagtggtggctgcgtgaaagggagcgacactcagctgtgtgttcctgggcttgtgtggtacttagaacctcagttctattacgttatagtcagacatttttttgacagtatgagacagactgcaggatgaaaatatttgtcaaaatcttaactgaatgtttactggaagtacttgagattccatttgagagttgtattgttaataatttcatgtcagtgaactgatatctgatgtttatgatatggtgtctttttcttgaaacaagcttccaagggctagaaataaaatagccaaaaaatgctggagttctgagtaattaaa

SEQ ID NO: 12431 - DNA, 3562 bp, Homo sapiens
agaccatgtggttgtatagttaaggttcagtgtttcaaataagagcagtcattgtgggcgcctcgtttttttttctagctactcgtgtcttctccggcagatggtctaacggctggatagaggcatatttttagtttgaatttcctgcgcttacagaatggttttatctaatttgtagctactggggttctttattctctggggccacctgaaggctttcaaacacagtaataagccctcctcgggctgggaaacaggaagctgtgttttaaatgccgtgatcactggattaaaggaaacatggctccactctgttctcttgccaggtggaattatttttttctttatgatggttccaaggtaaaggaagaaggcgatccaacaagagctggcatttgttacttttatccttcccagaccctgctagaccaacaggagttgctttgtggacagattgctggagttgtccgctgtgtttctgacatttctgactctcctcctactcttgttcgtctgagaaaactgaagtttgccataaaagttgatggagattacctttgggtgctgggctgtgctgtggagctccctgatgtcagctgcaagcggtttctggatcagctagttggattctttaatttttacaatggacctgtttccctagcttatgagaactgttctcaggaagaactgagcacggagtgggacaccttcatcgagcaaattctgaaaaacaccagtgatctgcataagattttcaattccctctggaacttggaccaaactaaagtggagcccctgttgttgctgaaggcagcccgcattctgcagacctgccagcgctcgcctcacattctcgctggctgcatcctctataaaggactgattgtcagcacccaactcccgccctccctcaccgccaaggtcctgcttcaccgaacagcacctcaggagcagagactccctacgggagaggatgccccgcaggaacatggagcggcattgcccccgaatgtccagattatccctgtttttgtgaccaaagaggaagccattagtctccacgagttcccggtggaacagatgacaaggtctctagcatctccagcaggactccaggatggttcagcccagcaccatccaaagggtgggagcacatctgccctgaaagaaaacgccactggccatgtggaatccatggcctggaccaccccagatcccacatcccctgacgaagcttgtccagatggcaggaaggagaacggatgcttgtctggccatgatctggagagcatcaggcccgcaggactgcacaactctgccaggggtgaggttcttggcctcagctcctccctggggaaggaactagtctttctccaagaagaactcgacttgtctgaaatccacattccagaggctcaggaagtggaaatggcctcaggtcattttgccttcctacatgtgcctgttccagatggcagggctccttactgcaaggcatctctcagcgcctccagcagcctggaacccacgcctcctgaggacacagccatcagcagcttgcgccctccctctgctcctgagatgctgacccagcatggagcccaagagcagctcgaagaccatcctggccatagcagccaagcccccattcccagagcagaccctctccccagaaggacccgcaggcccttgttattgcctcgcttagatccaggacagagaggaaacaagcttcccacgggggaacaaggcctggatgaggatgttgatggggtctgtgaaagccacgcagcccctggtctggaatgcagttcaggctcagcaaactgtcagggtgctggcccctctgcagatggaatcagctccaggctgacaccagcagagtcctgcatggggctcgtgaggatgaatctctacactcactgcgtcaaagggctggtgctgtccctgctggctgaggagccgctgctgggagacagcgcagccatagaggaagtgtaccacagcagcctggcttcactgaatgggctggaagtccacctgaaagagacgctgcccagggatgaggcagcctccacgagcagcacctacaacttcacacattacgaccgcattcagagcttgctgatggcaaacctgccgcaggtggccaccccgcaggatcgccgcttcctccaggccgtcagcctgatgcatagcgaatttgcccagctgcccgcgctttatgaaatgactgtcagaaatgcctccacggctgtgtacgcctgttgcaaccccatccaggagacatatttccagcagctggcacctgcagcacggagctccggcttcccaaaccctcaggatggcgccttcagcctctccggcaaagcaaagcagaagctgctgaagcacggggtgaacttgctctgaactgcacccaggaggtgactgggaaggagaaaaccagcaaaggaagctctgccttttataattgaaaaggcccctctattttatttttcttgaaaacattcccttttttaggaaccaaatgatatttgagtttttgttattccttttgcagattgggatgtgttttgggggcaggggttagttcttcaggtcggcagacccagagcacttgataaagaactgtatttaatcggtagtgttggggccgggacgggcttggctccctctctgccatactgagcctgaggtatttcatatctcctgctgttccatcccagcttgaattggtgccacaagcttccaagttggcattttttctagaacctgatcgtccactagcccagagtgtgtgtgttcaacccccacaccaggtggtggtaggcggtgtgactgcacagcgaggtgccggatctgtgagcaggccgactccactcccacgccgcaggtaggtttctccagtgcgctcttgctgggaggtccggatcgttcctgcagggaagcggcagcacacggagaccacttggttgaattctgttggaactctactcaaatctaggggcgtcttctttggacccacaatgggggcaagccttaataatatggaagggagtttgggctttagagatccctttataaaagctctgggggctgagccctgagaattcagtgacaacaggaccaacctgcgctgcctttgactacaagtgggccgtgcagctggttcctctcgagcgagtgtccctaaataggagtttacaagatgtctgggggtaaaagcactgtgcttttcagtggtggctgcgtgaaagggagcgacactcagctgtgtgttcctgggcttgtgtggtacttagaacctcagttctattacgttatagtcagacatttttttgacagtatgagacagactgcaggatgaaaatatttgtcaaaatcttaactgaatgtttactggaagtacttgagattccatttgagagttgtattgttaataatttcatgtcagtgaactgatatctgatgtttatgatatggtgtctttttcttgaaacaagcttccaagggctagaaataaaatagccaaaaaatgctggagttctgagtaattaaa

SEQ ID NO: 12432 - DNA, 19545 bp, Homo sapiens
ctctctgccgcgcgcgcaggtacggggcagaagtcgcaggtacccagctgctgcccacatttctggtccagagtcccgaaccccgagcactgggatgcctggctactccggtgggtgggcggcgctcggagcgcggggataccgaggggcgggcccccagcttagagcgtgacccgaccccgcctaatccttaggcgttcgcccaccatttcccagtcccgtagagctggggccagacaccgcacagccctagtgctgttaccagtcgctgcctgcgccccgggggctgcgcccagcagcttcctggcccttttccagccattagcgtccgttttccagccctgctgccccactgaggccccttcccacagcagtatcaccagccccagccccgcgttgttactattacttcccaggctaccagatccttttctgctcatgttccgacgtctcttcctactccagggccattattggtctcttctggacctttcagagataagagaggacctcggtagtgtagggcccagtcctctgggaacaagggatggggagttttaggctgctgtccttggttccagtaacagagataccccctccacaggcacccaaatatgctccatagaatacaatgagtgtggtcctgtggaggcccaatccaaaatatctagagctgagaagagatagagattttacaggccgtcaaatattcaatgggggtcgtctctagagacttttaacaaactgtattgtgtacccacagattgcagaatggtgagcaaacatttgagaccatgttgctaaagcattaagcttggagaaagtgacagtaagaattagacaatagttttgaagtgaccaagaggttgtcacatggaagaattagaccttgttttgtgttttcctgcagagcgttatccagactagcgagtgggaggcagatgtaaaatctggaacgcagattttagtttgttggaaggagaaatgtaacatagtgaaccacgcatctctggagggtgtaaagcagagacagccaaggtaatttttggaaaagagtgcaggagagtagagtaaacgatgccagggttccttccgactctgaaattccgtgatacactgagctgtctttctcttgtggaagtttgaaagccatttgataaagttctcttcattttttagaaatttgccctgctctggaattctgcatgttcaggttacttttggactgtcaagatgacagttccttaatttgggttccattattaccacagcaactggtttatttgtatagctgtccacacctagagcattttcaccctgtcatttgattttatcttccgtgaagcttgtggtgtgtttcccttaactgttcgagaaactaaagcccttactctgaagtctctgcaagcctccctctttgattttgaagcatgattgtcaccctcacagaaagctcttttgaaatataccattcgtttaatcctgctgggtcacatgctctctcacgagttgctgaaatatctattccttgtgtttatttcagagccaaggcactgatgtttgaactggaaacttcaaaacgtttaataagagtcttcaggatgggtttgaactagacaagctagaaatttctttagaacaccagctctagcatgcatctcccacttttggctttcctggagaggagcttgaagaggtggttctgcagacagccacagtgatacttaggaaaccagaggaatggatttgacttttctgctaggattctctgttatagtttctccctgagttgtaagaggcatggaaatatacatgaaactgaagaacctgcaaggaagggaagtggaactttccatgctgagtgaaaactaaccaagtggcagttgtgactgaaaacactgaaacctaccacgtccagattcactggattgggggatagaggaacggtcacagctagggagaaagaagtgataccggaaaagaaaacctaaatgaagagaatgaggatgactgcacagtagatggccacctctacctccacagaggcaaagtcagcctcgtggtgagtaacaaggcctgccatggcatagcttttgctgggctgttggttagagttttggggttaattgaaaatccccagccagattgtgttaattttattaacataacaataaaaatgccattttcctcagagcagctgaatcaagcacgtgagccatcgctctccaaagctaacatgttttaaccttgcaagcctctcccaatgtttgaatgagtctggcattgctgggagattgtagaaaagatagccacagcctgatcatgcagcgagctttgatgataatgtgaatattgtagtcttcaatttgcagagatgaggtatggttgcatttgagaattacagcatgaggagaggtctggccagactgggtatcaaggggtattactcaatgtctgtctgaaacccagttcccttctcaaccctaaatgcgttaatcctttcccataattaggtttagcaaacatcagtcatagaggagatgaaggtgaaaagcaggtttagctagaattagcaggatttagtgactgattatttatgtggaagtcaaaaagatggagcagttcaaaatgacacccaagttttctttcgtgtgcccgcacaagcagggatgctttcatcaagagaacgtggggacaggggaggatggggtgcacatggagtttctgagttggctttgaaacttttttgaggctttttgatctgagcttaccctgcagccagttgtacatccagccttaggtattgggaaagaggacagtgccaagagaccaagttggtgctttatttatttgtttgtttgtttttgagacagggtcttgctctatcctccaggccagagtgcagtggcatgatctcaggtcactgtagcctcaatcccccaggctcaagtgatcctcctacctcagcatcccaagtaactggaaccagaggcacaccccaccatgcctggctaattttgtctgttttttgtggagatggggtttcacggtgttgcccaggctaatctcgaactcctaagctcaagcagtcctcctacctaggcctctcaaagtgctgggattataggtgtgagccactgtgcccagccaagttggtgctttttcatcaggaaggcagggtgggagccatggagggaggcttcagagagggcatagatccagggaagagagcagatgacacattggtcccattgcttgtttatgctatagcctcataaatgtgttctcagagacttagaagtaaaacaggtccagccaggctcagtagctcacacctgtaattccagcactttgggaggccagggcaggattatttgagtccaggaatttgagaccagcctgggcaatatagtgagactcgtttctataaaaaatttaaaaaaaaatagccgagcatgatggcacactcctgtagtcccatctacttgggaggctgaggcgggaggatggcttgagcctgggagattgagtttgcactgaaccgcaatcgcaccactgcactccagcctacagggctacaaagtgagaccctgtaaaaacaaaacaaaattgaggcctggcctttgaggtgtttgttttatggtcttaaagaggtaatcagataataacattacgtaatatagttatactgcagtgtagtctgtaagagtctttgaggaagaacagagggtcatggaaattcagaacaaagagatatctctgggccgagggaatcaggagacggttaatgaggaagtgtgcttgaatgatacttggtgaggtttggcatggtagagaggagttcagagtttctctgtaaattctcataggcccctgttttttccctgttacgaacttttggactcactatcctgcattgaaactgcgtgtttgctcagcaaccgcggagcacactgtgggccctcagtaaatgtttaagtgaatgcatgaattcctggtagaagggctgtttctggaaatctttgtgctcagcacttatgaggagtgcatctaatacatccctaacttattttgttatcagagccttaaaagacagcgtatcagaccatgtggttgtatagttaaggttcagtgtttcaaataagagcagtcattgtgggcgcctcgtttttttttctagctactcgtgtcttctccggcagatggtctaacggctggatagaggcatatttttagtttgaatttcctgcgcttacagaatggttttatctaatttgtagctactggggttctttattctctggggccacctgaaggctttcaaacacagtaataagccctcctcgggctgggaaacaggaagctgtgttttaaatgccgtgatcactggattaaaggaaacatggctccactctgttctcttgccaggtggaattatttttttctttatgatggttccaaggtaaaggaagaaggcgatccaacaagagctggcatttgttacttttatccttcccaggtaagccacacagcattttattgttcagtgaggatcccagtgcctccaagtggtgacttttcaaaagtatggggtttacattaggacagtttggctaatccagacaatgacatttctactgtcttattcttagttgtactatttcttgttgttctggtcttaaaatttccaggcagctcggcactttcatcgtctttagctttctatttccatcatgatttttgtctgcctccctctacccccaattttttgatcagcttggtttttaaaagttattattctgctgggcacggtagtttatgcctgcagtcccagctctttggcaggctgaggtggatggatcacctgaggtcaggagtttgagaccagcctggccagcatgatgaaaccctgtctctactaaaaatcccaaaattagctgggcgtggtggcacgctcctgtaatcccagctacttgggaggctgaggcacgagaatcgcttgaatccaggaggcagagttgcagtgagcagagactgcgccattgcacaccagcctgggcaataagagtgaaactccatctcaaaaaaaataaataaataagtttgtattcaaacatatacaaaaacagagaggcaagtatcatgaaccctcatatgccatcagtagcttcaacaattatcaatactttgccgatttttttttttttttttttgtgatggaggctcactctgtcacccagggtggagtgcagtggcatgatctctgctcactgcatgctccacctcccgggttcatgccattctcctgcctcaacctcccgagtagttgggactacagtcgcccgctaccacgcccggctaatttttgtatttttagtagggacggggttttaccatgttagccaggatggtctcgatctcctgacctcgtgatccacccacctcagcctcccaaagtgcagggattacaggcgtgagccaccacgcccggcaatactttgccaattttatgtgacctatctgaacctcttcttctctctcttttttttttcctggagcaaattctagatgttgcgtcatctcaccagtatcaagcaacatctctaactgaaaagggcattattttgaacattaccacacctaacgaaagttacagtaattagtaacagtaattccttaatattacctgatacccagactgtattcaaattttgccttattgtcttggatattacttattctgctcttccttccttccatgcacccatacttccatccttccatttctttttctttttcctaataaggatccaaacagcatccacatattctatttggttattttgtattttaagtccttttaataacagtcctcacccagccactcatctttttccccctcctctatgccattgaattattgaagaaaccaggtcatatgtgtagtagagtgttagaatgtcccacactctagatttggctgatttgttcctcatggtggtgtcatttaatgtctcctatccactgtatttcctttacattagtagtaagatctagagtcttggtgaggttcaagctcagttttctaggtaagaattcttcatgggtggtgtatacatttcctgtgtatcccatactgtctggctgtcctgtgcgttagttaaggctaaggttgattaggagattctgtacattccctcctgtgactgtgctctgacatggatagttggggttaatctgcatccctctggccactccgtatgggggatttgagtaggagtgaaaggctcatgcttctgctaagcatatgcctataatcctagcaacagaaatgcggttctgtgcagtcatcgcatgtgttcctgctgggtgttctcttagggttcagtcatctcaggtaggggttggcaaactttgtaaagggccagaaagtaaatattttaggctttgcaaggcacataaggtttcaatcacatgttcttctttgttgtaacctttaaaaagtataagaaccattcttagcttacaggccataggaaaacgggtaacagactggatttggcttgcaggctttagtatgctgtaagaaatgacttaagagttcaagaatttcagcttcctatctggaatgtgctcctttcccacagaccctgctagaccaacaggagttgctttgtggacagattgctggagttgtccgctgtgtttctgacatttctgactctcctcctactcttgttcgtctgagaaaactgaagtttgccataaaagttgatggagattacctttgggtaagttgaatggcagaatcagtgctgaagtgttgcaatgataagtttaggaagttatgttgtttctgagtcttgaatttagaattatctgcccccaccaacctcatccatgtactgtgtttagtaatcaccctcgcttcctgtggtactctctgcaggttttcatcatcaagtgctttccaaaacatttctaacatattctgcattgcacacagctggtttctcctttcctttcaaagacttaggccaacttgtggaaattctgtttactctgtgttgtaaattgagtttttatcatcatcttttcttctccatgctctctacacttactgggtaagtgacccagaaaaaaatgatagatatatgttaggttttagagaacccattaaaaaaaaaaaaagaatattgcttgagtccaggagttcgatatcagcctgggcaacatagtaagacccccgtctctataaaaaatttaaaaattaaccgggtgtggtggctcatgtctgtggtcttagctactggggaggctgaggggaggattgcttgagcttaggagtttcaggctgcagtgagccatgattgccactgcacgctagcctaggcaacagagtgacaccctgtcttaaaaaaaaaaaaagaataaaaatcattcctttacattctaatagtagcatataatctaaagtgctgtttcccatggctacatttattttaaggcttcctgaggtaaagggatgcttaagtgtgggatgctatattcaactttgtaggtattatttccaacattttattacgaaaattttttaaagtactgaacagttgaattttacagtgaatactcatatacctcctcaattctacagttagcattttattatagttgttttattacctatctattcattcctttatcctcccattaattcaaattatttttattttattttattgagacagggtctcaatctgttgctcaggctggagtgctgaggtgtgaccttggtttactgcaacctccgcctcccaggctcaaacgatcctcccatctcagcctcctgagttgctaggaccacaggcatgcaccaccatgcccggctaattttttaaactttttctagaggcagggtttcaccatgttgctcaggctggtcttgaactcctcagctcaaggaatcctcccgccttggcctcccaaagtgctgggattacaggcgcgagacactgtaacccagccccaaattattttgttacagttttcaaagtaagttgcacacattagtgtactctccacacagatactctctctatcatgcatatcatcaactaaaatttaatgtttggggctgagcgctgtggctcaggcctgtaatcccagcactttgggaggccaagacagtcggatcacctgaggtcaggaattcaagaccagcctgaccaacatggagaaaccctgtctgtactaaaaatacaaaattagccaggtgtggtggcacatgcctgtaatcccagctactcgggaggctgaggcaggagactctcttgaacctgggaggcagaggttacagtgagctgagatcgcgccattgcactccagcctgggcaacaaaagcgaaactccatctcaaaaaaaaaaaaaaaaaaaaaagaaatttaatgcttgtttgtggttacatgctttacaggcgtctgtcttgccacttaacacttgtgaaattcgttcatgttgttgcatctatcagcgttcgttccattttattatcaaacagtattccgttgtctgaatatatcacaatctgttcttcttttgatggacatctgaactgtgtccagttggggatattaaggataaggcttctgggaacattcctatacaagtattttggtgaacacgtgttttcatctctcctgggtaaatatccagtcctggaattgctgggtcatagagtaggtgtatgttggattttataggaaactgttagaacttttccttcagtggttgtaccattttacattcctaccaagaatgtatgagaattccagttactccacctgctcatcagcattgagattgacagtctgttcatcttagccattctgctggatgtgcagtggtgtgttattgtggttttagtcttcacttccctgatgactaatgatagtgaggccttttcatgtgcttaatgaccacttgaatatcttcctttgtgaagtgtccattcaaagccctgcccattttttaaattgggttttatttttttaattgaattgtagttctttttatatcctagataccagttctttgtcagatacatctttttaaaataatttctcccagtttgtggcatgcctgttaattttcttgttgtcttttgatgagcagaagtttttcattttaatgaagtctaacttataaattttatctttttatggttattgctttctgtgtcttgcctgaaaaaaaccactgcctactccattggaggagatagtctcccttttttattttttgtaagaatttgatagttttagcttttaaatttagatctgtaatccactttgggttaatatttgtgaatggtgtgaatagaggtcaaggatctttttttttttttccacctggataaccagttcttccagcatcattgttgaaaacattttcctttccctattggatttccctttggttcctttgccaaagatcagatgaccatttaagcgtgggtctatttctggactcttttcggcttttccacagatctgtttgaagattctgtgtgagtaccacactgtcttgatttctatagctttatagtaagtcttgaaaccagatagtataagttctccaaccttattctttctcaagatagctttggatatttcaggttctttgtgttttcattgtacaatcagtttgtggtttctgaagaaaagctggtgggattatgattgcaattgcattcagtctgttcatcaattggaagaattgaacacttcttacatgccagactgttgtaagctcttggattacatctgggaacaaagcaaagatccttgtgctactgtagcttacattcagagggaatttttgtttatttgttttctgtcagggtttattagtttaaatatctgatgattcccttaggacagattcctagaggtagaattactacatcaagtaataggaactttttcaggctctttaaacatatgaccagataactttctaactcagcaagtacttttttttttttgagacggtgtctcgctctgttgccaggctggagtgcagtagcgcaatctcggctcgctgcaacctctgcctcccaggttcaagcgattcccctgcctcagcctcctgagtagctgggactacaggcacacaccaccacgcccagtatttttagtagagacggggtttcaccatgttggtcaggatggtctcgatctcttgacctcgtgatccactcaaagtgctgggattacaggcatgagccaccgtgcccggccaagtatttatcttctgtggaactaaccactacgctcagcattttggagatctaggactgggaagattgcggtcagttcttgctcttaaagcactctatccagctggagaaacatgatggccattcatgaaggagtttgagtcctgtccattgtttgtaatggaatccagattaaacatctactgtccaaataacagtcctaacaatgcaagggtcagaaaaaaggtcagcattattggctcgaggtaatagaacagacctcatggagatactgaaattggtggtgggcactgaaggttgtaagttctggggaaatgaacaataaggaaaaggacatttgagattggaaaacatgaattgaggtacagaacttacttgtccatggagattaacttggccagaatgaagggtgtggactcagggacaatagaagatcaatttcgatgggccagtgaagtcaggtaattgagagccctggatgccaggattctgggcttggactcaaagagaaggaagatgcttgtcttcctggtttctctctttacaggtgctgggctgtgctgtggagctccctgatgtcagctgcaagcggtttctggatcagctagttggattctttaatttttacaatggacctgtttccctagcttatgaggtacaagtatggggttgaggagtcttacattgggcctctttataaaaaccggtattgccagaatgcagcacttactctggggtcttgtatacttcatataaacacattgtgtctggggacaaggtcaggagctcttggaggcccctcatatgcctttgggcctagtggcataggtcacatttattccaaatgtttatccccatctcctccctgggatgtttagaaagcgcaggccctgcttgccacccccacgcggcaggcgccgtggatctgtgatgggataggtttaaaacaggtcctcccttccggtcagtttcctgtgtgaggaacaatttttgaggtagttgggactctggccaaagaatctgtccctcaaaatctcagatattgacctgaggctctttctgttttagaactgttctcaggaagaactgagcacggagtgggacaccttcatcgagcaaattctgaaaaacaccagtgatctgcataagattttcaattccctctggaacttggaccaaactaaagtaacattttcatcctccttattcattttatatgtaagactagggcttctggatacttttttaatattcctgaagtgaactatatctggaaaagtgagtagaatgtcacttctcaggcagggccatgacacggcaggtcacctctcagcctcatttcccttatccaaagaatggtgtcagcatacctgccttcttgaactgttttgatgatcaagtgaagcagtacctcaaatgacaccaagtaaatgctcagtaaagggaattagtattttgttcatgcctcagaagtgttgaactcagtaatctgaaggccgcctctcttgatattcatatcatatgatctagttattctcagcatcaaaaatgcccagcatgaacatttcaaaaacaaggttgctgtctttgagagagaatggttgggaactgtttttgtatctctgagccgctccgtttgcggttggcactcagtgaaacctaggctgcttgtgtggctggcctgaccacctgtgctgccccattaagagccagctacctgagccctgactcacagccctctcctgtgtctcactgcgatagtaaataatgtccctgtagcaggggtgtagcactgtggctcagccttcacagagcatgactccaccagacatggggaagggttttccctgctccagtctggaaaacttcctgtagctggccccagagctttatagaatggctggctgggatggcacagtcttgaggctatgaagaataaacttcttaatgtgtcagcagctccggaggctccattaacactagttctaacagctggtggatacttgctggttctagctggcaggtggaagtctgaggaggctgctggttattgctggctcttcctgaccaggtccagatgcttttcttgtatttttagggacttctaggcccctgactccatacaaggaatgtggaactgaggcatatttccccgagtgaaagagcatgatgttttcattttatgtgatggaatagagtcatggaacctggtcagacatcaagccacctgtatcaccatggggattgtgcttcagaaggaaagtggaggatagggtaggtgggtttcacctggtaccatgacatgtatttataggatacaccctcctcttctgctgccgtgaggtcttagcattgtcagggtagacagtcggtctcccaggccatctactttgacccctttgaatagccatatgccatatttgctgcaccttctagcttctggacaggcctccttgttctaagaatttggcatttagtggtgtcagcagttctgagtatagagaggtagaatagtcccaagccatggcacagctttcactgtgtgacacattctccttttccaggctttgagctacaccctgtccagctgttctgtacaaccctttccccttttctcccttcctgattgtgagcatgctgatgggtgggcatgatgcctcttgccctgcacaggtggagcccctgttgttgctgaaggcagcccgcattctgcagacctgccagcgctcgcctcacattctcgctggctgcatcctctataaaggactgtgagtaactccagacccctttcttccagccccattcccttgctgcacaactgaccatcagccacctccagatcacagtggggagcccagtctctggccagttccaagtgggctggttcggcaaatatcaggtagtttagatttgactcagtttagaaagacaggtgtgtacctgtctttgagcaaagctgagaaattggaaatagttgtgttcagaaaagagttaagaatgtccctataattctcagtatggggcatgctggaatagttgtcagtctgcaaaatgctaatgcagagtcccgagcgttgccagcagccagcactgtagtcaagaggcatggaaggggcctgctgtgaccctcctcctgctgcccagagaccctggtgtgcttgcctcagctcagctctgcaaagcagccttacaggcccttatccagctgccttcaagcctcttggctgggccagtgtcttggttggcctctgagaattcacttcacttcttcatgtagttggagggcttcttggtgaatctgagtgcccaagagccactctaggtcatctaaggcctctctcctcatggagggtttgctgtcacagcccagggcaggcagggccattgcgctgtgcccggagcttcctgaggagcaggcaactactgtgtaaatggagaagcactgaggctctcgcaggggcccttgggccagacaggctcggccccagatcctcccttctttcgccagccatgcggccttgggcaagttgcttagcctcaattttctcttctgggaaatagacatcccttgtgaagaatgaaatgagatgacagatgcggaagaaccgagcatagaccctggtgggctttgcactcttcttccttgccccggttcttatcatgatggttctgaatcagctgtgggatttccaagttcgtcagtgacatacccaccaaagacagtattttttttccccttttctcattttgcatttcttaaatgtatatatatatatttttttttcttttttttttttttgtagggacgaggtcttgctatgttgcccaggctggtctcaaacacctggcttcaagcgatcctcagcttcccaaactgcttggattatagacataagccactgcacccagcctgtatttacattatacggctaatacatgaatacattttcactgtaaacaaatcaatcaatagaggaacacacagagcacaatttaaaagccccccttctttcttcaccatttttgtttgtttgtttttgagacacagtcttgctttgttgcccaggctgtagtgtagtggcataaacacagcttactacagcctcgacctcttggactcaagtgatcctcccacgtagctggaacaacaagcacttgctaccacacctggccaagcttttgattttttttttttttttttttgtagagatgggatctcactatgttgctcatggaggtctcaaactcctaagctcaagttattctcccacctcagcctcccaaagtgctgtgattgcaggagtaagccactgtgcccagcctctccctcactcttaacctgtcctcaccattggcagtttggtgggcatcttgctctttctgtgtgtttgtccccactggtacatgtatgcatatattgcttttgtttatttttgctatctccttaaataggatcacatggtttctcaacgcatacagtgaagatttccttaccggttcatatgggtctacctcattcttatgaggactgcatactttttgggattctggctgtgttgtgctttactgtcttgttgatgaacattttggtggtttactcattttttaattgtttttaccattctccctgtaatgaatattcttacgcatacatcttggtacaagctgagtcaaagggtttggatattttaaatgttggtaggaactgccagagtgccctctgtaagggttttaccagttgaaactcccaccagccaagtccccaagatcctcgtcaacacgggctgttaggcatctttaaaatttggagtgttttggtgtatttcgtctcatggtgttcttgttctgtgtgtgacctcctaggattgtcagcacccaactcccgccctccctcaccgccaaggtcctgcttcaccgaacagcacctcaggagcaggtattgtaaagtccacccacctggctggacagcatcccccagagcactggtcactgagcctgaggctggagggatcaggagcagaggccgtggagcagttgtttcacttggtcttgtcaggaccccaagtcctccaatgtcattctcctcagtagtgaagccattggtgaggctgaaagaaaatgttttcttccacgagctaggcctggatagttgttttttcttcaaaccaaggaaatcttggttgaattcgacttcccataagaatttgatgtctctttatgtcaaagagatgttagacttttcagagacagactgtaaaggatgtgtctttagaaagatttagggggttgggcacggtggttcacacctgtaatcccagcactttgggtggctgaggtgggcagatcacttgaggtgaggagttcaagaccagcctggccaacatgatgaaacccatctctatttaaaatacaaaaattagctgggtgtggtggtgcacacctgtaaatcccagctacttgggaggctgaggcaggagaatcgcttgaacctggcaggcagaggttgaggtgagctgagatcgcgccactgcactccagcctgggtagcaagagtgagactctgtctcaaaaaataaaaataaaaataaaaaaataaggaaaacaaactcttctaaaatacttccattttatatttatttaattgtttttatattgaaaaaaaagccatgcatgctcattgagaataaaattgcccatctttgaactgtacagggatagccactgccagcatctggcatatctccttccagtcctttttttgttttgtgtatgaagctgtggtttccagcgtatcatgaggctgtctttttacatgtattagtgaacaggcatgtaaaatgctggtagggctctattcagcctcctcagccactgtggctatgggtgtcaattcaagtagcctttctgggaaacactttgataatgagaacgttaaggatgccctttatttttttcctaataatttgacttctaggaatatatcttaaggaaataatgtaactgctgaaaaaaatttatactcaaaacttgatcacaacaagctttatgaaagtgaaaaatcagacaaaacttgaatgcttaaagtaggaggtggcaaattatggcctgtgggccacctgcctacaaatgaagttttatttggctgcttttgagctataatagcagaaccaagtaggtgggacagagaccatatgccctgcaaagccaaaaatatttactgtcttgtcttttgcacagaaagtttactaattactggtctaaggtaggtaaatgattaatttactcatatcacttaaaccttcataaaattttaatcagccgtttaaaatggccaaagatgttttagtggcaggaaatgcgtgttactgttttaagcagaaatatgaaattttatatagtgtggcctcaaaagtataaaaactgcataggcttaaggaaaaaatacccaatattaatagtactagcttggggatgagggattgtatgtgattttttttttcaacgctttgtctagagtaaattgaggttaggcttagtaatctaaaacatagttttttaaaaatcaccaaaaaaggaagaacaccatatcattctaagattgaaagtcattttggctagaagagcagttcttgtttggtttggttttgttttggtgggttcttttggaaccctcagattgaaacgagagatgttttcatttttgagaaaatcatcaggttttaggccctgattgtgaaccagaacaaacgagagattgggtatagcattttgtttaagtcaaatcctttatcgtgagagtcacagtattttgacatttttattataatggaatttatgtgaattctacatcagggctgtggcagatgtgactgtattctagaatatgagttccccaaaggtgtaaaagagaacaggaatcctcaattttattcccagaagggagagagactgagaaaatcagaacgtagagtgtgatgtgagtttgggtggagctgctgccttgcagcctgtgtgggcccaggttcttgcttcatcccagccatagtgggagccagcagcttgggggagcttctgttccatctgcttggctcttagcatgtggttgggacaagctttctgggcctggctaagttttatgaacagatggcacagcaaattcctgatggttaggtcaagaggagaatgtggtgcccagcgccaacttctgtgtgtgtttgttttcagagactccctacgggagaggatgccccgcaggaacatggtaagtagtgaggcgcatggttgcctcttgagaacggcggtcttttatgctacctacccctgtacaagttatgcgaaggaaaccaagccatctgcatgtttatttcctctgctcataataggaaaatggatgttatggagcttcaagaatcgagttacccaccagaaccctaatggtaaagctatgattttaggcatgctgtcaaatccctgctttcagaccctccttaacttcatattgtgagactgctcggtcaagtgccaggagattgtgattgggagagggtaaggcaaacagcgactgccagaaagaccttttgcaggatgtggaggcgtcctcaggagagttatttcgatttattctgaagcctgagttggagcagatccctttcttagcttatatcttcttcttgtaaaagtgcttttcaacctttctctcccgaacatcttccttctccaaagctgggagtcatgttgcctgcagggactctttccttactgggcccaggagttcgaggtgcagtttggcaacctgtgtcctggctgaggaatgcactcacagcacccctttccgagcccacgtgtgggttggatgcatcacgccagtgcagctattgccccgctgccctctctggctcaggggaaagtcctgttcatattgctttgcaattccaggagcggcattgcccccgaatgtccagattatccctgtttttgtgaccaaagaggaagccattagtctccacgagttcccggtggaacagatgacaaggtaatggagtgcacagagagttaaccttgcaccacacctgagggaccccatcgcgtgattggttaaaaaacaaacctctgatacatcccatcgttccttaattccatcttccccatgccctgtcttgtaaaggagcatctgaatcttgagtttgttaagaaacagagtggcatagagagatgacattggctttcatatcccagctctcttacttataccagctatgggaccttgggcaagtccattccctgcctgagcctcagttttttcatctgaaaagtagacaaaatagtatccctttcatgagttcattgtgacacttgaaaatagtataggtacagcacctagtatagggcctgatgcgtaggagaccttccagatgtgggtcagtcttattcagtgggctctgccattttcagtaggtgagtctggtgtcactacgtaaagccccaagggccagatgttggtgtatttttactcttgtgatttaactctggtggcctcttaggctctgtggcctcaggcacccccttgtccttgatgcctgtgctttagtcttcactgtggaagggcacttgccctgcagtctgtcaacgtgccccttccttacatctctcttgtttgccaggtctctagcatctccagcaggactccaggatggttcagcccagcaccatccaaagggtgggagcacatctgccctgaaagaaaacgccactggccatgtggaatccatggcctggaccaccccagatcccacatcccctgacgaagcttgtccagatggcaggaaggagaacggatgcttgtctggccatgatctggagagcatcaggcccgcaggactgcacaactctgccaggggtgaggttcttggcctcagctcctccctggggaaggaactagtctttctccaagaagaactcgacttgtctgaaatccacattccagaggctcaggaagtggaaatggcctcaggtcattttgccttcctacatgtgcctgttccagatggcagggctccttactgcaaggcatctctcagcgcctccagcagcctggaacccacgcctcctgaggacacagccatcagcagcttgcgccctccctctgctcctgagatgctgacccagcatggagcccaagagcagctcgaagaccatcctggccatagcagccaagcccccattcccagagcagaccctctccccagaag

SEQ ID NO: 12433 - DNA, 1942 bp, Homo sapiens
ctctctgccgcgcgcgcagagccaaggcactgatgtttgaactggaaacttcaaaacgtttaataagagtcttcaggatgggtttgaactagacaagctagaaatttctttagaacaccagctctagcatgcatctcccacttttggctttcctggagaggagcttgaagaggtggttctgcagacagccacagtgatacttaggaaaccagaggaatggatttgacttttctgctaggattctctgttatagtttctccctgagttgtaagaggcatggaaatatacatgaaactgaagaacctgcaaggaagggaagtggaactttccatgctgagtgaaaactaaccaagtggcagttgtgactgaaaacactgaaacctaccacgtccagattcactggattgggggatagaggaacggtcacagctagggagaaagaagtgataccggaaaagaaaacctaaatgaagagaatgaggatgactgcacagtagatggccacctctacctccacagaggcaaagtcagcctcgtggtggaattatttttttctttatgatggttccaaggtaaaggaagaaggcgatccaacaagagctggcatttgttacttttatccttcccagaccctgctagaccaacaggagttgctttgtggacagattgctggagttgtccgctgtgtttctgacatttctgactctcctcctactcttgttcgtctgagaaaactgaagtttgccataaaagttgatggagattacctttgggtgctgggctgtgctgtggagctccctgatgtcagctgcaagcggtttctggatcagctagttggattctttaatttttacaatggacctgtttccctagcttatgagaactgttctcaggaagaactgagcacggagtgggacaccttcatcgagcaaattctgaaaaacaccagtgatctgcataagattttcaattccctctggaacttggaccaaactaaagtggagcccctgttgttgctgaaggcagcccgcattctgcagacctgccagcgctcgcctcacattctcgctggctgcatcctctataaaggactgattgtcagcacccaactcccgccctccctcaccgccaaggtcctgcttcaccgaacagcacctcaggagcagagactccctacgggagaggatgccccgcaggaacatggaaaatggatgttatggagcttcaagaatcgagttacccaccagaaccctaatggagcggcattgcccccgaatgtccagattatccctgtttttgtgaccaaagaggaagccattagtctccacgagttcccggtggaacagatgacaaggtctctagcatctccagcaggactccaggatggttcagcccagcaccatccaaagggtgggagcacatctgccctgaaagaaaacgccactggccatgtggaatccatggcctggaccaccccagatcccacatcccctgacgaagcttgtccagatggcaggaaggagaacggatgcttgtctggccatgatctggagagcatcaggcccgcaggactgcacaactctgccaggggtgaggttcttggcctcagctcctccctggggaaggaactagtctttctccaagaagaactcgacttgtctgaaatccacattccagaggctcaggaagtggaaatggcctcaggtcattttgccttcctacatgtgcctgttccagatggcagggctccttactgcaaggcatctctcagcgcctccagcagcctggaacccacgcctcctgaggacacagccatcagcagcttgcgccctccctctgctcctgagatgctgacccagcatggagcccaagagcagctcgaagaccatcctggccatagcagccaagcccccattcccagagcagaccctctccccagaag

SEQ ID NO: 12434 - DNA, 27366 bp, Homo sapiens
agccctcctcgggctgggaaacaggaagctgtgttttaaatgccgtgatcactggattaaaggaaacatggctccactctgttctcttgccaggtggaattatttttttctttatgatggttccaaggtaaaggaagaaggcgatccaacaagagctggcatttgttacttttatccttcccaggtaagccacacagcattttattgttcagtgaggatcccagtgcctccaagtggtgacttttcaaaagtatggggtttacattaggacagtttggctaatccagacaatgacatttctactgtcttattcttagttgtactatttcttgttgttctggtcttaaaatttccaggcagctcggcactttcatcgtctttagctttctatttccatcatgatttttgtctgcctccctctacccccaattttttgatcagcttggtttttaaaagttattattctgctgggcacggtagtttatgcctgcagtcccagctctttggcaggctgaggtggatggatcacctgaggtcaggagtttgagaccagcctggccagcatgatgaaaccctgtctctactaaaaatcccaaaattagctgggcgtggtggcacgctcctgtaatcccagctacttgggaggctgaggcacgagaatcgcttgaatccaggaggcagagttgcagtgagcagagactgcgccattgcacaccagcctgggcaataagagtgaaactccatctcaaaaaaaataaataaataagtttgtattcaaacatatacaaaaacagagaggcaagtatcatgaaccctcatatgccatcagtagcttcaacaattatcaatactttgccgatttttttttttttttttttgtgatggaggctcactctgtcacccagggtggagtgcagtggcatgatctctgctcactgcatgctccacctcccgggttcatgccattctcctgcctcaacctcccgagtagttgggactacagtcgcccgctaccacgcccggctaatttttgtatttttagtagggacggggttttaccatgttagccaggatggtctcgatctcctgacctcgtgatccacccacctcagcctcccaaagtgcagggattacaggcgtgagccaccacgcccggcaatactttgccaattttatgtgacctatctgaacctcttcttctctctcttttttttttcctggagcaaattctagatgttgcgtcatctcaccagtatcaagcaacatctctaactgaaaagggcattattttgaacattaccacacctaacgaaagttacagtaattagtaacagtaattccttaatattacctgatacccagactgtattcaaattttgccttattgtcttggatattacttattctgctcttccttccttccatgcacccatacttccatccttccatttctttttctttttcctaataaggatccaaacagcatccacatattctatttggttattttgtattttaagtccttttaataacagtcctcacccagccactcatctttttccccctcctctatgccattgaattattgaagaaaccaggtcatatgtgtagtagagtgttagaatgtcccacactctagatttggctgatttgttcctcatggtggtgtcatttaatgtctcctatccactgtatttcctttacattagtagtaagatctagagtcttggtgaggttcaagctcagttttctaggtaagaattcttcatgggtggtgtatacatttcctgtgtatcccatactgtctggctgtcctgtgcgttagttaaggctaaggttgattaggagattctgtacattccctcctgtgactgtgctctgacatggatagttggggttaatctgcatccctctggccactccgtatgggggatttgagtaggagtgaaaggctcatgcttctgctaagcatatgcctataatcctagcaacagaaatgcggttctgtgcagtcatcgcatgtgttcctgctgggtgttctcttagggttcagtcatctcaggtaggggttggcaaactttgtaaagggccagaaagtaaatattttaggctttgcaaggcacataaggtttcaatcacatgttcttctttgttgtaacctttaaaaagtataagaaccattcttagcttacaggccataggaaaacgggtaacagactggatttggcttgcaggctttagtatgctgtaagaaatgacttaagagttcaagaatttcagcttcctatctggaatgtgctcctttcccacagaccctgctagaccaacaggagttgctttgtggacagattgctggagttgtccgctgtgtttctgacatttctgactctcctcctactcttgttcgtctgagaaaactgaagtttgccataaaagttgatggagattacctttgggtaagttgaatggcagaatcagtgctgaagtgttgcaatgataagtttaggaagttatgttgtttctgagtcttgaatttagaattatctgcccccaccaacctcatccatgtactgtgtttagtaatcaccctcgcttcctgtggtactctctgcaggttttcatcatcaagtgctttccaaaacatttctaacatattctgcattgcacacagctggtttctcctttcctttcaaagacttaggccaacttgtggaaattctgtttactctgtgttgtaaattgagtttttatcatcatcttttcttctccatgctctctacacttactgggtaagtgacccagaaaaaaatgatagatatatgttaggttttagagaacccattaaaaaaaaaaaaagaatattgcttgagtccaggagttcgatatcagcctgggcaacatagtaagacccccgtctctataaaaaatttaaaaattaaccgggtgtggtggctcatgtctgtggtcttagctactggggaggctgaggggaggattgcttgagcttaggagtttcaggctgcagtgagccatgattgccactgcacgctagcctaggcaacagagtgacaccctgtcttaaaaaaaaaaaaagaataaaaatcattcctttacattctaatagtagcatataatctaaagtgctgtttcccatggctacatttattttaaggcttcctgaggtaaagggatgcttaagtgtgggatgctatattcaactttgtaggtattatttccaacattttattacgaaaattttttaaagtactgaacagttgaattttacagtgaatactcatatacctcctcaattctacagttagcattttattatagttgttttattacctatctattcattcctttatcctcccattaattcaaattatttttattttattttattgagacagggtctcaatctgttgctcaggctggagtgctgaggtgtgaccttggtttactgcaacctccgcctcccaggctcaaacgatcctcccatctcagcctcctgagttgctaggaccacaggcatgcaccaccatgcccggctaattttttaaactttttctagaggcagggtttcaccatgttgctcaggctggtcttgaactcctcagctcaaggaatcctcccgccttggcctcccaaagtgctgggattacaggcgcgagacactgtaacccagccccaaattattttgttacagttttcaaagtaagttgcacacattagtgtactctccacacagatactctctctatcatgcatatcatcaactaaaatttaatgtttggggctgagcgctgtggctcaggcctgtaatcccagcactttgggaggccaagacagtcggatcacctgaggtcaggaattcaagaccagcctgaccaacatggagaaaccctgtctgtactaaaaatacaaaattagccaggtgtggtggcacatgcctgtaatcccagctactcgggaggctgaggcaggagactctcttgaacctgggaggcagaggttacagtgagctgagatcgcgccattgcactccagcctgggcaacaaaagcgaaactccatctcaaaaaaaaaaaaaaaaaaaaaagaaatttaatgcttgtttgtggttacatgctttacaggcgtctgtcttgccacttaacacttgtgaaattcgttcatgttgttgcatctatcagcgttcgttccattttattatcaaacagtattccgttgtctgaatatatcacaatctgttcttcttttgatggacatctgaactgtgtccagttggggatattaaggataaggcttctgggaacattcctatacaagtattttggtgaacacgtgttttcatctctcctgggtaaatatccagtcctggaattgctgggtcatagagtaggtgtatgttggattttataggaaactgttagaacttttccttcagtggttgtaccattttacattcctaccaagaatgtatgagaattccagttactccacctgctcatcagcattgagattgacagtctgttcatcttagccattctgctggatgtgcagtggtgtgttattgtggttttagtcttcacttccctgatgactaatgatagtgaggccttttcatgtgcttaatgaccacttgaatatcttcctttgtgaagtgtccattcaaagccctgcccattttttaaattgggttttatttttttaattgaattgtagttctttttatatcctagataccagttctttgtcagatacatctttttaaaataatttctcccagtttgtggcatgcctgttaattttcttgttgtcttttgatgagcagaagtttttcattttaatgaagtctaacttataaattttatctttttatggttattgctttctgtgtcttgcctgaaaaaaaccactgcctactccattggaggagatagtctcccttttttattttttgtaagaatttgatagttttagcttttaaatttagatctgtaatccactttgggttaatatttgtgaatggtgtgaatagaggtcaaggatctttttttttttttccacctggataaccagttcttccagcatcattgttgaaaacattttcctttccctattggatttccctttggttcctttgccaaagatcagatgaccatttaagcgtgggtctatttctggactcttttcggcttttccacagatctgtttgaagattctgtgtgagtaccacactgtcttgatttctatagctttatagtaagtcttgaaaccagatagtataagttctccaaccttattctttctcaagatagctttggatatttcaggttctttgtgttttcattgtacaatcagtttgtggtttctgaagaaaagctggtgggattatgattgcaattgcattcagtctgttcatcaattggaagaattgaacacttcttacatgccagactgttgtaagctcttggattacatctgggaacaaagcaaagatccttgtgctactgtagcttacattcagagggaatttttgtttatttgttttctgtcagggtttattagtttaaatatctgatgattcccttaggacagattcctagaggtagaattactacatcaagtaataggaactttttcaggctctttaaacatatgaccagataactttctaactcagcaagtacttttttttttttgagacggtgtctcgctctgttgccaggctggagtgcagtagcgcaatctcggctcgctgcaacctctgcctcccaggttcaagcgattcccctgcctcagcctcctgagtagctgggactacaggcacacaccaccacgcccagtatttttagtagagacggggtttcaccatgttggtcaggatggtctcgatctcttgacctcgtgatccactcaaagtgctgggattacaggcatgagccaccgtgcccggccaagtatttatcttctgtggaactaaccactacgctcagcattttggagatctaggactgggaagattgcggtcagttcttgctcttaaagcactctatccagctggagaaacatgatggccattcatgaaggagtttgagtcctgtccattgtttgtaatggaatccagattaaacatctactgtccaaataacagtcctaacaatgcaagggtcagaaaaaaggtcagcattattggctcgaggtaatagaacagacctcatggagatactgaaattggtggtgggcactgaaggttgtaagttctggggaaatgaacaataaggaaaaggacatttgagattggaaaacatgaattgaggtacagaacttacttgtccatggagattaacttggccagaatgaagggtgtggactcagggacaatagaagatcaatttcgatgggccagtgaagtcaggtaattgagagccctggatgccaggattctgggcttggactcaaagagaaggaagatgcttgtcttcctggtttctctctttacaggtgctgggctgtgctgtggagctccctgatgtcagctgcaagcggtttctggatcagctagttggattctttaatttttacaatggacctgtttccctagcttatgaggtacaagtatggggttgaggagtcttacattgggcctctttataaaaaccggtattgccagaatgcagcacttactctggggtcttgtatacttcatataaacacattgtgtctggggacaaggtcaggagctcttggaggcccctcatatgcctttgggcctagtggcataggtcacatttattccaaatgtttatccccatctcctccctgggatgtttagaaagcgcaggccctgcttgccacccccacgcggcaggcgccgtggatctgtgatgggataggtttaaaacaggtcctcccttccggtcagtttcctgtgtgaggaacaatttttgaggtagttgggactctggccaaagaatctgtccctcaaaatctcagatattgacctgaggctctttctgttttagaactgttctcaggaagaactgagcacggagtgggacaccttcatcgagcaaattctgaaaaacaccagtgatctgcataagattttcaattccctctggaacttggaccaaactaaagtaacattttcatcctccttattcattttatatgtaagactagggcttctggatacttttttaatattcctgaagtgaactatatctggaaaagtgagtagaatgtcacttctcaggcagggccatgacacggcaggtcacctctcagcctcatttcccttatccaaagaatggtgtcagcatacctgccttcttgaactgttttgatgatcaagtgaagcagtacctcaaatgacaccaagtaaatgctcagtaaagggaattagtattttgttcatgcctcagaagtgttgaactcagtaatctgaaggccgcctctcttgatattcatatcatatgatctagttattctcagcatcaaaaatgcccagcatgaacatttcaaaaacaaggttgctgtctttgagagagaatggttgggaactgtttttgtatctctgagccgctccgtttgcggttggcactcagtgaaacctaggctgcttgtgtggctggcctgaccacctgtgctgccccattaagagccagctacctgagccctgactcacagccctctcctgtgtctcactgcgatagtaaataatgtccctgtagcaggggtgtagcactgtggctcagccttcacagagcatgactccaccagacatggggaagggttttccctgctccagtctggaaaacttcctgtagctggccccagagctttatagaatggctggctgggatggcacagtcttgaggctatgaagaataaacttcttaatgtgtcagcagctccggaggctccattaacactagttctaacagctggtggatacttgctggttctagctggcaggtggaagtctgaggaggctgctggttattgctggctcttcctgaccaggtccagatgcttttcttgtatttttagggacttctaggcccctgactccatacaaggaatgtggaactgaggcatatttccccgagtgaaagagcatgatgttttcattttatgtgatggaatagagtcatggaacctggtcagacatcaagccacctgtatcaccatggggattgtgcttcagaaggaaagtggaggatagggtaggtgggtttcacctggtaccatgacatgtatttataggatacaccctcctcttctgctgccgtgaggtcttagcattgtcagggtagacagtcggtctcccaggccatctactttgacccctttgaatagccatatgccatatttgctgcaccttctagcttctggacaggcctccttgttctaagaatttggcatttagtggtgtcagcagttctgagtatagagaggtagaatagtcccaagccatggcacagctttcactgtgtgacacattctccttttccaggctttgagctacaccctgtccagctgttctgtacaaccctttccccttttctcccttcctgattgtgagcatgctgatgggtgggcatgatgcctcttgccctgcacaggtggagcccctgttgttgctgaaggcagcccgcattctgcagacctgccagcgctcgcctcacattctcgctggctgcatcctctataaaggactgtgagtaactccagacccctttcttccagccccattcccttgctgcacaactgaccatcagccacctccagatcacagtggggagcccagtctctggccagttccaagtgggctggttcggcaaatatcaggtagtttagatttgactcagtttagaaagacaggtgtgtacctgtctttgagcaaagctgagaaattggaaatagttgtgttcagaaaagagttaagaatgtccctataattctcagtatggggcatgctggaatagttgtcagtctgcaaaatgctaatgcagagtcccgagcgttgccagcagccagcactgtagtcaagaggcatggaaggggcctgctgtgaccctcctcctgctgcccagagaccctggtgtgcttgcctcagctcagctctgcaaagcagccttacaggcccttatccagctgccttcaagcctcttggctgggccagtgtcttggttggcctctgagaattcacttcacttcttcatgtagttggagggcttcttggtgaatctgagtgcccaagagccactctaggtcatctaaggcctctctcctcatggagggtttgctgtcacagcccagggcaggcagggccattgcgctgtgcccggagcttcctgaggagcaggcaactactgtgtaaatggagaagcactgaggctctcgcaggggcccttgggccagacaggctcggccccagatcctcccttctttcgccagccatgcggccttgggcaagttgcttagcctcaattttctcttctgggaaatagacatcccttgtgaagaatgaaatgagatgacagatgcggaagaaccgagcatagaccctggtgggctttgcactcttcttccttgccccggttcttatcatgatggttctgaatcagctgtgggatttccaagttcgtcagtgacatacccaccaaagacagtattttttttccccttttctcattttgcatttcttaaatgtatatatatatatttttttttcttttttttttttttgtagggacgaggtcttgctatgttgcccaggctggtctcaaacacctggcttcaagcgatcctcagcttcccaaactgcttggattatagacataagccactgcacccagcctgtatttacattatacggctaatacatgaatacattttcactgtaaacaaatcaatcaatagaggaacacacagagcacaatttaaaagccccccttctttcttcaccatttttgtttgtttgtttttgagacacagtcttgctttgttgcccaggctgtagtgtagtggcataaacacagcttactacagcctcgacctcttggactcaagtgatcctcccacgtagctggaacaacaagcacttgctaccacacctggccaagcttttgattttttttttttttttttttgtagagatgggatctcactatgttgctcatggaggtctcaaactcctaagctcaagttattctcccacctcagcctcccaaagtgctgtgattgcaggagtaagccactgtgcccagcctctccctcactcttaacctgtcctcaccattggcagtttggtgggcatcttgctctttctgtgtgtttgtccccactggtacatgtatgcatatattgcttttgtttatttttgctatctccttaaataggatcacatggtttctcaacgcatacagtgaagatttccttaccggttcatatgggtctacctcattcttatgaggactgcatactttttgggattctggctgtgttgtgctttactgtcttgttgatgaacattttggtggtttactcattttttaattgtttttaccattctccctgtaatgaatattcttacgcatacatcttggtacaagctgagtcaaagggtttggatattttaaatgttggtaggaactgccagagtgccctctgtaagggttttaccagttgaaactcccaccagccaagtccccaagatcctcgtcaacacgggctgttaggcatctttaaaatttggagtgttttggtgtatttcgtctcatggtgttcttgttctgtgtgtgacctcctaggattgtcagcacccaactcccgccctccctcaccgccaaggtcctgcttcaccgaacagcacctcaggagcaggtattgtaaagtccacccacctggctggacagcatcccccagagcactggtcactgagcctgaggctggagggatcaggagcagaggccgtggagcagttgtttcacttggtcttgtcaggaccccaagtcctccaatgtcattctcctcagtagtgaagccattggtgaggctgaaagaaaatgttttcttccacgagctaggcctggatagttgttttttcttcaaaccaaggaaatcttggttgaattcgacttcccataagaatttgatgtctctttatgtcaaagagatgttagacttttcagagacagactgtaaaggatgtgtctttagaaagatttagggggttgggcacggtggttcacacctgtaatcccagcactttgggtggctgaggtgggcagatcacttgaggtgaggagttcaagaccagcctggccaacatgatgaaacccatctctatttaaaatacaaaaattagctgggtgtggtggtgcacacctgtaaatcccagctacttgggaggctgaggcaggagaatcgcttgaacctggcaggcagaggttgaggtgagctgagatcgcgccactgcactccagcctgggtagcaagagtgagactctgtctcaaaaaataaaaataaaaataaaaaaataaggaaaacaaactcttctaaaatacttccattttatatttatttaattgtttttatattgaaaaaaaagccatgcatgctcattgagaataaaattgcccatctttgaactgtacagggatagccactgccagcatctggcatatctccttccagtcctttttttgttttgtgtatgaagctgtggtttccagcgtatcatgaggctgtctttttacatgtattagtgaacaggcatgtaaaatgctggtagggctctattcagcctcctcagccactgtggctatgggtgtcaattcaagtagcctttctgggaaacactttgataatgagaacgttaaggatgccctttatttttttcctaataatttgacttctaggaatatatcttaaggaaataatgtaactgctgaaaaaaatttatactcaaaacttgatcacaacaagctttatgaaagtgaaaaatcagacaaaacttgaatgcttaaagtaggaggtggcaaattatggcctgtgggccacctgcctacaaatgaagttttatttggctgcttttgagctataatagcagaaccaagtaggtgggacagagaccatatgccctgcaaagccaaaaatatttactgtcttgtcttttgcacagaaagtttactaattactggtctaaggtaggtaaatgattaatttactcatatcacttaaaccttcataaaattttaatcagccgtttaaaatggccaaagatgttttagtggcaggaaatgcgtgttactgttttaagcagaaatatgaaattttatatagtgtggcctcaaaagtataaaaactgcataggcttaaggaaaaaatacccaatattaatagtactagcttggggatgagggattgtatgtgattttttttttcaacgctttgtctagagtaaattgaggttaggcttagtaatctaaaacatagttttttaaaaatcaccaaaaaaggaagaacaccatatcattctaagattgaaagtcattttggctagaagagcagttcttgtttggtttggttttgttttggtgggttcttttggaaccctcagattgaaacgagagatgttttcatttttgagaaaatcatcaggttttaggccctgattgtgaaccagaacaaacgagagattgggtatagcattttgtttaagtcaaatcctttatcgtgagagtcacagtattttgacatttttattataatggaatttatgtgaattctacatcagggctgtggcagatgtgactgtattctagaatatgagttccccaaaggtgtaaaagagaacaggaatcctcaattttattcccagaagggagagagactgagaaaatcagaacgtagagtgtgatgtgagtttgggtggagctgctgccttgcagcctgtgtgggcccaggttcttgcttcatcccagccatagtgggagccagcagcttgggggagcttctgttccatctgcttggctcttagcatgtggttgggacaagctttctgggcctggctaagttttatgaacagatggcacagcaaattcctgatggttaggtcaagaggagaatgtggtgcccagcgccaacttctgtgtgtgtttgttttcagagactccctacgggagaggatgccccgcaggaacatggtaagtagtgaggcgcatggttgcctcttgagaacggcggtcttttatgctacctacccctgtacaagttatgcgaaggaaaccaagccatctgcatgtttatttcctctgctcataataggaaaatggatgttatggagcttcaagaatcgagttacccaccagaaccctaatggtaaagctatgattttaggcatgctgtcaaatccctgctttcagaccctccttaacttcatattgtgagactgctcggtcaagtgccaggagattgtgattgggagagggtaaggcaaacagcgactgccagaaagaccttttgcaggatgtggaggcgtcctcaggagagttatttcgatttattctgaagcctgagttggagcagatccctttcttagcttatatcttcttcttgtaaaagtgcttttcaacctttctctcccgaacatcttccttctccaaagctgggagtcatgttgcctgcagggactctttccttactgggcccaggagttcgaggtgcagtttggcaacctgtgtcctggctgaggaatgcactcacagcacccctttccgagcccacgtgtgggttggatgcatcacgccagtgcagctattgccccgctgccctctctggctcaggggaaagtcctgttcatattgctttgcaattccaggagcggcattgcccccgaatgtccagattatccctgtttttgtgaccaaagaggaagccattagtctccacgagttcccggtggaacagatgacaaggtaatggagtgcacagagagttaaccttgcaccacacctgagggaccccatcgcgtgattggttaaaaaacaaacctctgatacatcccatcgttccttaattccatcttccccatgccctgtcttgtaaaggagcatctgaatcttgagtttgttaagaaacagagtggcatagagagatgacattggctttcatatcccagctctcttacttataccagctatgggaccttgggcaagtccattccctgcctgagcctcagttttttcatctgaaaagtagacaaaatagtatccctttcatgagttcattgtgacacttgaaaatagtataggtacagcacctagtatagggcctgatgcgtaggagaccttccagatgtgggtcagtcttattcagtgggctctgccattttcagtaggtgagtctggtgtcactacgtaaagccccaagggccagatgttggtgtatttttactcttgtgatttaactctggtggcctcttaggctctgtggcctcaggcacccccttgtccttgatgcctgtgctttagtcttcactgtggaagggcacttgccctgcagtctgtcaacgtgccccttccttacatctctcttgtttgccaggtctctagcatctccagcaggactccaggatggttcagcccagcaccatccaaagggtgggagcacatctgccctgaaagaaaacgccactggccatgtggaatccatggcctggaccaccccagatcccacatcccctgacgaagcttgtccagatggcaggaaggagaacggatgcttgtctggccatgatctggagagcatcaggcccgcaggactgcacaactctgccaggggtgaggttcttggcctcagctcctccctggggaaggaactagtctttctccaagaagaactcgacttgtctgaaatccacattccagaggctcaggaagtggaaatggcctcaggtcattttgccttcctacatgtgcctgttccagatggcagggctccttactgcaaggcatctctcagcgcctccagcagcctggaacccacgcctcctgaggacacagccatcagcagcttgcgccctccctctgctcctgagatgctgacccagcatggagcccaagagcagctcgaagaccatcctggccatagcagccaagcccccattcccagagcagaccctctccccagaaggacccgcaggcccttgttattgcctcgcttagatccaggacagagaggaaacaagcttcccacgggggaacaaggcctggatgaggatgttgatggggtctgtgaaagccacgcagcccctggtctggaatgcagttcaggctcagcaaactgtcagggtgctggcccctctgcagatggaatcagctccaggctgacaccagcagagtcctgcatggggctcgtgaggatgaatctctacactcactgcgtcaaagggctggtgctgtccctgctggctgaggagccgctgctgggagacagcgcagccatagaggaagtggtgagtgtcctcagaccttctcctgcccctctgcggcctctgccgatctcctgtgcttccctcacagcactgtgccaacacccagggaagagataaaggctcagccctcagttgtgtgaccctgggcaagacgttcttgtttagacgatggaggtattacctgcctctgtgggtttttgtggggggtaagagtgagtcaagcgcatagcactggtggtgcattggcatccaacaagtgttggttctcttcttccgctgtttctagttttgcagagcgcaggccttggagaaagggaaggcctgagatggaatcctggcccttgtcctctagctgtgtgaacttgcccacagacctttgtccccttgagccttggctaactcctcagtcacgtagggatggtggtagaccttcctgttccagatgcagtgagataatgcaggcagagactgcacacgtacgtgcatgtgttgtgccgcccctgctcatggcctcatttcctagcctggacagctctaggttctgtgtcagctggaaactcctccgcagtgtgtcacagcctgggttgggagttccctagaaacccagtgtttccctccatagccccagcatcgtacctgatctgaagctccttcctagaaggctgggatgtctgaaatcctgcctggctctggagggctcttaaactattgcagccccttccccgcttagaggcttagagtggtaaactgaccttccctggggcccacgctggagattcgttgctatagtaacagccttgctttagtaggcagggaaagtggtagcagtaagaacagcaggttgaaattgctgcagggcaaatggtgtcttggggctttccttgtttttattcttaaatgtgtattattctaagctgatcttactatcatgcagggcttgtgaccctccataaatgagctagtcaccttgaaatacagaagaagagataagactgcacagcagcttccttgcacagagctcctagcaagagaatgctctctggagctgtcaggcttctctgtgccctttccacagacgctggatcactgagttatggctcatttgcttcctgtatccccattcaccatagctaggagtgactatccatctccttcttatagcagtgcggggagttgtggctgcagtgttaaatgcctcatctccctgccaatgccttggttttcatggtctgttctgcacagtgtcgagccttggaagtgtcattttgaagggcccagtgtttgaatgcaataaagtggatataatacctctctttttaccttcccccacaaaaaggaaaaaatagcccaggctgctctttgagatgtattctgcaccaactatatgtgaaatacttcgcatctctcgttttagccaagccttagaacagttctgggaaggaggcattgtaactcccattttaccagtaagaaaacagcctcattgagatgaaaagacttcctgcaagtggcaggtccagaattcttgcttgtttctggttccccaccccagcctctctgtccccccactgccctgcccttgcagtgatagctgggaagctgaagaaagggggtcagtgtcctgccttctgtggctcgtgctctatggccatatcccctggtttgtcaaggtctatccatgctgttacgacatcagcctccatgggcttctgtggaaagcagggtttgatgctggctaggccccgggaaatagactgcagttttatggaagagaaaaagctaatcttttcttcttttttttttttttttttgagatggagttccgctcttgttgcccaggctggagtacaatggtgtgatctgagctcactgcaacctccgcctccccggttcaagcggttctcctacctcaacctcctgagtagctgggattacaggcatgtgccaccaggcccggctaattttgtatttttagtagagacggggtttctccatgttggtcaggctggtctcgaactcctgacctcaggtaatctgcccgcctcggcctcccaaagtgctgggattacaggcatgattgcacccatccctgaaaagctaatcttttctagtatggagtgactaactttgatcagcccactggtttgagagtgggtttgttaatcagacccaaaggatttctgttttataatcaggaagaggtgtttgattgcctttttgtcccagactagccttgaaaatactttatctgatttccctgcagcccctctgctactgtctagaaaaaccaaatacccccagttacggtgagcacaccccttttgcaagggctccttaatgatgttacatactgccaagctgcccttgtgtcatttggctgtcttgtctttgggtggatcagcttccacagggagtaggggtagggtgaggggcagcaggggttgggattggtgaaaggagccctgggtggagcagccaggagggttgggattggggctggaattccctcagagggagtggaataggctcacaccagggggcagcatagagccgctgatagtccattactcagaccccaagataatctccttgaccttcaaacacagtgatcagattaattatttatcactacaataggacatggagcttctgtgtacagtacatgaggcttgaagttagtgtgagagtgttgccataaaacattttatgaaaaaacaccttcccccaactgggaaaccggtatctctaagtgaatgtgtgttccatgcattgctcctgctgcacgctgtgtcacacactgacatttgtgccacttgctttcgtgtgcactagaagtcagaggacccgggaattagcctcagctctgtgttgcctagggctgttgtgaggatcacattatgtagcagtatatatcggtggctggcaaacattttatgtaaaggaccagaaagcaaatattttcagctttgcacagcttttcagctctgctgttgcagtacaaaaacagccatagacagtatataaatggtatgactgtattccagtaattatttatggacatggaattggaacttcatataatttgcacatgttacaatattattcttttgacttttttccccaaccaagtaaaaaaatataaaaaccattcttaggtctcagactgtacaaagataggcaacaggctggatttagtttataggctagagtttgctgacccctggtatgtatgaaagcacttggttatcagtaaaaattatccacatgtcatctgacatagcatcttgtgattaactgtgtttttatggttaagtgatcctatcttgagtgcaagttaggcagaagattttggaagcaaagctccgtgcctgtggggaaacagtttttggcatggctcactctctgttcttattgtttcttcctctggacaccagctcagcatggaagggatgactgttagcacgttcttgaggtccaaaaactttcagtgaggctgtggtttgacttcatcaggtgaatgcttatgtgtgcccgtgtgcgtgtcggcacatgcacacacacacatctgttcaaataagaggctcagtgttaaacgcagtgttggtcaggctctctcagtgatctgaacatgagatattatgattgtctttcctgagcacatatctttttacatagctctgcaaccttggtttaaaccaaatagctcataaattggcagtgcttggcattggatgtgttcatttattcattcatttagtggattcatttattgagcacctactaggagtcagacactctactaagcattgaggatacaaaactgagcgcatagaaaataactttgtatgtcacacctattgacttgaaatatcatttctgagactttcatacaggaaaactgatttaacaccaatatactcccaaaataacatgtaagcttcatgacatttacttcagaagcattctgtttgcatctctgtactttttatatgcacttatttttcttacatagctgttgaaaaatagtccacaaattatctgtgatctctaaagagacaccatttcttttatatgattattttcatttccttgactttataaaaagactctgcctcaggatagcactttagagtttacaaaggacttttggatgtgtcatttcatttaagtcactcaatagtcccgtactgttcccattttgcagttgactagaaaaatgaggcacagaaaacttggtaacttgctcctggtcatttgactaaaaagaggctgaacttgggatgttttttacctgggaactgcaaatgtttggggacagtgaccttctttcttgtggctgaagcaggcccaggaaaccccatttcagaccaagcctattatgacaggcctggcctactgagtcaagccctcagtggagcttgaggaacactgcacagccattaaagaattatatgatagaatatttaaagacgagaaaagcagttcatgctgtgttgttaggttaaaaaactatcagtcattatttatgatttgatctcatttttattttacagaaaaagagttacacaaaacagtttagtccagtcttttcaattgtacttaaactttatctccttggaggtttgtaaaaatacaggtacttgaacccatctccttgacagtcgtcctcaactgtattcctcttctgaaccatcaagtgcagaaagctgtttgactgacactcagtccttccaagaaagccaggaccgtgctaggtgtagcagagagaagttaccgtgttacatccagtgagggacttctgtacccagggccagtgagaaacaatgcgggatggtcccaggctgtttgtattgtgaaatcatgcagcctgggtaggaaagccatggttaaaataagatacaccacagtggtgacagtggctattactggatggtgaaatgatgggttgttttcttgttatttttttgctcatctcttttctaaatctcctacaatataatcattatttttaaaaacattagaacataagggtgaaagaaaaatgttggtgagagtccattttgctggatcaagtaggcagtaagatactccatgaatgatttttttttttttttttcgagacagagtctcactctatcacccaggctggagtgtggtggtgcggtctcggctcactgcagccttaaactcctggcttaagtgatcctcctgcctcggtctcacaaagcactgggattacaggtgtgagccaccgtgcctggctggaggattttttttttaactaagtctgtggttaactagccctcagaaggcttgctgaggtcagccctacaagcccatgaccctctccccctttgcagtaccacagcagcctggcttcactgaatgggctggaagtccacctgaaagagacgctgcccagggatgaggcagcctccacgagcagcacctacaacttcacacattacgaccgcattcagagcttgctgatgggtaagaaccagccaaggggcctggggcgacggggatgccagattctagatgggtggagatgagaacttgagccccagcatcatgatgacacggctgtgcacagagttgtctgacctgcgttcagggctctcttctcaccgggagcccagtcccactgagtgtggcgttcactgggcagacgcttctctgctcatgtgtctgtttttggcgtttcccagtgttttgagagaagttcatgttcacatatctgtgatagggtttgtctcagaatgttgagatccacacgcagaaaccgggtgctgcatcgcacagcggcggcagccgaagcccaatgccccgggcctttgtctctgccccgggcagccaactcatggccttgagccgtgctcagtccccgtgttcagtactgggcttcatggggtgggagggcagaaggtaactgtctgctcttcacaactctgtgtcctcttctggaagcaaacctgccgcaggtggccaccccgcaggatcgccgcttcctccaggccgtcagcctgatgcatagcgaatttgcccagctgcccgcgctttatgaaatgactgtcaggtgagcctccctgagtcgctccccaacctactctccacggtcctgctcatgggaaccacctgtggggcccaggcagcgccttattcctaagtagatgaaaaacattctagttactctccttaaggccttcctttgtcggttcctattgccgccatcatccactgttgtgcagtcacgtgccatggactttctggttcccttcctactttagacgcttggggtccagcagtgaaggaacctgaggtcctcaccatcatggagctacatccattactagggacggtggctccgtctccttgctagaaacagtgttgaaatattgttgtctttctaattacaaagtaatatggctgggcacagtggctcacacctgtaatctcagcactttgcgaggcagggggatcacttgaggtcagggttcaagaccagcctggccaacctggtgaaaccctgtctctactaaaaatacaaaaaattagctgggcagggtggtgggtgcctgtagtcccagctactcaggaggctgaggcaggagaatcacttgaacccgggtggcagaggttatagtgagctgagatcacaccattgcactccagcctgggcaacagagtgagactgcgtctcagaaaaaaaaaaaaaaaaaaaaaagtaatacgtgctgatcatacagtcatgcagaatgcttggaaatgtatcaagtaaaacattttcctctctcatctccatcacacaccaggaaataaccacattttacagtttggtatatattgctccaggttttattggtttttggtttttattttttgcacatataaattgtatttttaattattttaagtcttctagaaaataggattctactaatgtacaattttacagttgtcttttttcacattatgtcatagcttgaacacctccatgccagaagaaatattatgattattgtaatttacagtatttaaccaaccgaatttgtttttttctttctatatgcttctcttatgaaaccagaaagggagtttgggctttaaagatcactttataaaagcccgaggagactgggacctgagaatttggttgacaactggtaacagaaaataaagcaagttagcaggtcaagggcagtgctggcaatgtgtatattagtccacgtagtccttggaaccatctggtcaagggcattattttttatttatttattttgagatggagtctcactctcgccaggctggagtgcaggggctcagtctcggctcattgcaacctctgtctcctggtttcaagcaattcttctgcctcagcctcctgagtagctgggactacaggcacctgccaccatgcccagctaatttttgtatttttagtagagatagggtttcaccatgttggccaggatagtctcaatgttttgacctagtgatctgcccaccttggccttccaaagtgctgggattacaggcgtgagccaccacgcccggcttcaagggcattttttaaatcctcattttacagatgagaaaattgaagcacaaataggataagcagcttgcccagggttatattcttcttaagtggcagggccaggatttgaagcattttctccaactgttaagcacatgtatgacctttccacacacatttcagtgtcggggcagtgtggtccagtgtgaggggcatgggtggtggactgacagggagcctgggtgggtgattaggatggttctgattccctgtcacccgccacacttgagcgccaggtgttctgctgcctctcagcgtctccagccaatattccaatagatctttctgtcagaaatgtgtcttctctggctttaattcacagctgccccaggctggcaacccagaggcaacttgcatctacagtcactggtttgggaactggctgtgttgggggtgtgtgtgtctgttttgtgggaggtggaaacaagtaaaatgtcagcatctgctccaccaaccaccttgtggccctgcagtatgtcaccttccttagagctgagaggggtttagtgttgagacacatagctcaaggcatttgttgagagattatttcaataacagtaatagaaacaacagctaccatttctttttttttttaattttattattattataagttttagggtacatgtgctgtgcacaacgtgaggtgtgttacatatgtatacatttgccatgttggtgtgctgcacccattaactcgtcatttagcattaggtatatctcctaatgctatccctcccccctccccccaccctacaacaggccccagtgtgtgatgttccccttcctgtgtccatgtattctcattgttcaattcccacctatgagtgagaacatgtggtgtttggttttttgtccttgcaatagtttgctgagaatgatggtttccagtttcatccatgtccctacaaaggacatgaactcatcattttttatggctgcatagtattccatggtgtatatgtgccacattttcttaatccagtctatcgttgttggacatttaggttggttccaaatctttgctattgtgaatagtgccgctataaacatacgtgtgcatgtgtctttatagcagcatgatttataatcctttgggtatatacccagtaatgggttggctgggtcaaatggtatttctagttctagatccctgaggaatcgccacactgacttccacaatggttgaactagtttacagtcccaccaacagtgtaaaagtgttcctatttctccacatcctctccagcacctgttgtttcctgactttttaatgatcgccattctaactgatgtgagatggtatctcattgtggttttgatttgcattgctctgatggccagtgatgatgagcattttttcatgtgttttttggctgcataaatgtcttcttttgagaagtgtctgttcatatccttcgcccactttttgatggggttgtttgtttttttcttgtaaatttgtttgagttcattgtagattctggatattagccctttgtcagatgagtaggttgcgaaaattttctcccgttctgtaggttgcctgttcactctgatggtagtttcttttgctgtgcagaagctctttagtttaattagatcccatttgtcaattttggcttttgttgccattgcttttggtgttttagatgtgaagtccttggccatgcctatgtcctgaatggtattgcctaggttttcttctagggtttttatggttttaggtctaacatgtaagtctttaatccatcttgaattaatttttgtgtaaggtgtaaggaagggatccagtttcagctttctacatatgaacagctaccatttcttaaccactcacaatgtgttaagcactcacttaatctcattctttaaaacaaaacaaaacaaaaacaccaatgaggacacatactgttgcaacaaacactgtacagatgaaaaagctgggactcagaaatgttgaatagcagcccaggacacacactaggaagtaatagggctgggattagcacctgagtgtgtgtgactccagatccatgctcataaccatctggcctcggagccctcccacagggctgtgagaagagattgtcttgctgggccagtgggtgcaggagacactgaagcttggaatagggtgggatttttctcccttacagggaaggagagaattgagtgaggggagccttagcagtccctgactccaccctttctcactagatttgggggaaactgaggcccataatagttggagaggcaggatccagaaaccaggggggtttgtttaccttggcctggagttggctcctcccaggtggctccgcctctgtgtagtgccctcatccctccctctctgtgtccacaggcttcctgtcacttcgtgtcacatcccactcctgtccttcactccctctcagtctatccagccacccccagtgtggagagcagactagactcctttctcggacactgccattgcctcgtcatagaggcagggcagccccagctactcactctgagcctcagggtccttgtctgtgaaatgggaccataccaccactgcagagcttatgtgaggggcaaagcagagactgtatgcagagcacattgcatagctgccagtatgtcaaaaaagccagcactccacagttcctttatgcaatacttataactccaggatctgtggctgctgccactgtggatggtcccgccacggactcttccagcatctagtgagctgaaaggaaggaaagatggtattggcactgaagcctgaaactcagctgaagaaatagaattccgtgccatgacagctgcacatgccacattgggtgtcctgggtcctctgtgacaagaaccttactgaggtctctgtgtggtctgagattagcaccagcagcattggaccgttgccttctttcttcctccaacagaaatgcctccacggctgtgtacgcctgttgcaaccccatccaggagacatatttccagcagctggcacctgcagcacggagctccggcttcccaaaccctcaggatggcgccttcagcctctccggcaaagcaaagcagaagctgctgaagcacggggtgaacttgctctgaactgcacccaggaggtgactgggaaggagaaaaccagcaaaggaagctctgccttttataattgaaaaggcccctctattttatttttcttgaaaacattcccttttttaggaaccaaatgatatttgagtttttgttattccttttgcagattgggatgtgttttgggggcaggggttagttcttcaggtcggcagacccagagcacttgataaagaactgtatttaatcggtagtgttggggccgggacgggcttggctccctctctgccatactgagcctgaggtatttcatatctcctgctgttccatcccagcttgaattggtgccacaagcttccaagttggcattttttctagaacctgatcgtccactagcccagagtgtgtgtgttcaacccccacaccaggtggtggtaggcggtgtgactgcacagcgaggtgccggatctgtgagcaggccgactccactcccacgccgcaggtaggtttctccagtgcgctcttgctgggaggtccggatcgttcctgcagggaagcggcagcacacggagaccacttggttgaattctgttggaactctactcaaatctaggggcgtcttctttggacccacaatgggggcaagccttaataatatggaagggagtttgggctttagagatccctttataaaagctctgggggctgagccctgagaattcagtgacaacaggaccaacctgcgctgcctttgactacaagtgggccgtgcagctggttcctctcgagcgagtgtccctaaataggagtttacaagatgtctgggggtaaaagcactgtgcttttcagtggtggctgcgtgaaagggagcgacactcagctgtgtgttcctgggcttgtgtggtacttagaacctcagttctattacgttatagtcagacatttttttgacagtatgagacagactgcaggatgaaaatatttgtcaaaatcttaactgaatgtttactggaagtacttgagattccatttgagagttgtattgttaataatttcatgtcagtgaactgatatctgatgtttatgatatggtgtctttttcttgaaacaagcttccaagggctagaaataaaatagccaaaaaatgctggagttctgagtaattaaa

SEQ ID NO: 12435 - DNA, 3492 bp, Homo sapiens
agccctcctcgggctgggaaacaggaagctgtgttttaaatgccgtgatcactggattaaaggaaacatggctccactctgttctcttgccaggtggaattatttttttctttatgatggttccaaggtaaaggaagaaggcgatccaacaagagctggcatttgttacttttatccttcccagaccctgctagaccaacaggagttgctttgtggacagattgctggagttgtccgctgtgtttctgacatttctgactctcctcctactcttgttcgtctgagaaaactgaagtttgccataaaagttgatggagattacctttgggtgctgggctgtgctgtggagctccctgatgtcagctgcaagcggtttctggatcagctagttggattctttaatttttacaatggacctgtttccctagcttatgagaactgttctcaggaagaactgagcacggagtgggacaccttcatcgagcaaattctgaaaaacaccagtgatctgcataagattttcaattccctctggaacttggaccaaactaaagctttgagctacaccctgtccagctgttctgtacaaccctttccccttttctcccttcctgattgtgagcatgctgatgggtgggcatgatgcctcttgccctgcacaggtggagcccctgttgttgctgaaggcagcccgcattctgcagacctgccagcgctcgcctcacattctcgctggctgcatcctctataaaggactgattgtcagcacccaactcccgccctccctcaccgccaaggtcctgcttcaccgaacagcacctcaggagcagagactccctacgggagaggatgccccgcaggaacatggaaaatggatgttatggagcttcaagaatcgagttacccaccagaaccctaatggagcggcattgcccccgaatgtccagattatccctgtttttgtgaccaaagaggaagccattagtctccacgagttcccggtggaacagatgacaaggtctctagcatctccagcaggactccaggatggttcagcccagcaccatccaaagggtgggagcacatctgccctgaaagaaaacgccactggccatgtggaatccatggcctggaccaccccagatcccacatcccctgacgaagcttgtccagatggcaggaaggagaacggatgcttgtctggccatgatctggagagcatcaggcccgcaggactgcacaactctgccaggggtgaggttcttggcctcagctcctccctggggaaggaactagtctttctccaagaagaactcgacttgtctgaaatccacattccagaggctcaggaagtggaaatggcctcaggtcattttgccttcctacatgtgcctgttccagatggcagggctccttactgcaaggcatctctcagcgcctccagcagcctggaacccacgcctcctgaggacacagccatcagcagcttgcgccctccctctgctcctgagatgctgacccagcatggagcccaagagcagctcgaagaccatcctggccatagcagccaagcccccattcccagagcagaccctctccccagaaggacccgcaggcccttgttattgcctcgcttagatccaggacagagaggaaacaagcttcccacgggggaacaaggcctggatgaggatgttgatggggtctgtgaaagccacgcagcccctggtctggaatgcagttcaggctcagcaaactgtcagggtgctggcccctctgcagatggaatcagctccaggctgacaccagcagagtcctgcatggggctcgtgaggatgaatctctacactcactgcgtcaaagggctggtgctgtccctgctggctgaggagccgctgctgggagacagcgcagccatagaggaagtgtaccacagcagcctggcttcactgaatgggctggaagtccacctgaaagagacgctgcccagggatgaggcagcctccacgagcagcacctacaacttcacacattacgaccgcattcagagcttgctgatggcaaacctgccgcaggtggccaccccgcaggatcgccgcttcctccaggccgtcagcctgatgcatagcgaatttgcccagctgcccgcgctttatgaaatgactgtcagaaatgcctccacggctgtgtacgcctgttgcaaccccatccaggagacatatttccagcagctggcacctgcagcacggagctccggcttcccaaaccctcaggatggcgccttcagcctctccggcaaagcaaagcagaagctgctgaagcacggggtgaacttgctctgaactgcacccaggaggtgactgggaaggagaaaaccagcaaaggaagctctgccttttataattgaaaaggcccctctattttatttttcttgaaaacattcccttttttaggaaccaaatgatatttgagtttttgttattccttttgcagattgggatgtgttttgggggcaggggttagttcttcaggtcggcagacccagagcacttgataaagaactgtatttaatcggtagtgttggggccgggacgggcttggctccctctctgccatactgagcctgaggtatttcatatctcctgctgttccatcccagcttgaattggtgccacaagcttccaagttggcattttttctagaacctgatcgtccactagcccagagtgtgtgtgttcaacccccacaccaggtggtggtaggcggtgtgactgcacagcgaggtgccggatctgtgagcaggccgactccactcccacgccgcaggtaggtttctccagtgcgctcttgctgggaggtccggatcgttcctgcagggaagcggcagcacacggagaccacttggttgaattctgttggaactctactcaaatctaggggcgtcttctttggacccacaatgggggcaagccttaataatatggaagggagtttgggctttagagatccctttataaaagctctgggggctgagccctgagaattcagtgacaacaggaccaacctgcgctgcctttgactacaagtgggccgtgcagctggttcctctcgagcgagtgtccctaaataggagtttacaagatgtctgggggtaaaagcactgtgcttttcagtggtggctgcgtgaaagggagcgacactcagctgtgtgttcctgggcttgtgtggtacttagaacctcagttctattacgttatagtcagacatttttttgacagtatgagacagactgcaggatgaaaatatttgtcaaaatcttaactgaatgtttactggaagtacttgagattccatttgagagttgtattgttaataatttcatgtcagtgaactgatatctgatgtttatgatatggtgtctttttcttgaaacaagcttccaagggctagaaataaaatagccaaaaaatgctggagttctgagtaattaaa

SEQ ID NO: 12436 - DNA, 3936 bp, Homo sapiens
ggcttgccaggagctggagggggaggtaggcggggcggcgcgtgacctaaggcctctctgccgcgcgcgcagagccaaggcactgatgtttgaactggaaacttcaaaacgtttaataagagtcttcaggatgggtttgaactagacaagctagaaatttctttagaacaccagctctagcatgcatctcccacttttggctttcctggagaggagcttgaagaggtggttctgcagacagccacagtgatacttaggaaaccagaggaatggatttgacttttctgctaggattctctgttatagtttctccctgagttgtaagaggcatggaaatatacatgaaactgaagaacctgcaaggaagggaagtggaactttccatgctgagtgaaaactaaccaagtggcagttgtgactgaaaacactgaaacctaccacgtccagattcactggattgggggatagaggaacggtcacagctagggagaaagaagtgataccggaaaagaaaacctaaatgaagagaatgaggatgactgcacagtagatggccacctctacctccacagaggcaaagtcagcctcgtggtggaattatttttttctttatgatggttccaaggtaaaggaagaaggcgatccaacaagagctggcatttgttacttttatccttcccagaccctgctagaccaacaggagttgctttgtggacagattgctggagttgtccgctgtgtttctgacatttctgactctcctcctactcttgttcgtctgagaaaactgaagtttgccataaaagttgatggagattacctttgggtgctgggctgtgctgtggagctccctgatgtcagctgcaagcggtttctggatcagctagttggattctttaatttttacaatggacctgtttccctagcttatgagaactgttctcaggaagaactgagcacggagtgggacaccttcatcgagcaaattctgaaaaacaccagtgatctgcataagattttcaattccctctggaacttggaccaaactaaagctttgagctacaccctgtccagctgttctgtacaaccctttccccttttctcccttcctgattgtgagcatgctgatgggtgggcatgatgcctcttgccctgcacaggtggagcccctgttgttgctgaaggcagcccgcattctgcagacctgccagcgctcgcctcacattctcgctggctgcatcctctataaaggactgattgtcagcacccaactcccgccctccctcaccgccaaggtcctgcttcaccgaacagcacctcaggagcagagactccctacgggagaggatgccccgcaggaacatggagcggcattgcccccgaatgtccagattatccctgtttttgtgaccaaagaggaagccattagtctccacgagttcccggtggaacagatgacaaggtctctagcatctccagcaggactccaggatggttcagcccagcaccatccaaagggtgggagcacatctgccctgaaagaaaacgccactggccatgtggaatccatggcctggaccaccccagatcccacatcccctgacgaagcttgtccagatggcaggaaggagaacggatgcttgtctggccatgatctggagagcatcaggcccgcaggactgcacaactctgccaggggtgaggttcttggcctcagctcctccctggggaaggaactagtctttctccaagaagaactcgacttgtctgaaatccacattccagaggctcaggaagtggaaatggcctcaggtcattttgccttcctacatgtgcctgttccagatggcagggctccttactgcaaggcatctctcagcgcctccagcagcctggaacccacgcctcctgaggacacagccatcagcagcttgcgccctccctctgctcctgagatgctgacccagcatggagcccaagagcagctcgaagaccatcctggccatagcagccaagcccccattcccagagcagaccctctccccagaaggacccgcaggcccttgttattgcctcgcttagatccaggacagagaggaaacaagcttcccacgggggaacaaggcctggatgaggatgttgatggggtctgtgaaagccacgcagcccctggtctggaatgcagttcaggctcagcaaactgtcagggtgctggcccctctgcagatggaatcagctccaggctgacaccagcagagtcctgcatggggctcgtgaggatgaatctctacactcactgcgtcaaagggctggtgctgtccctgctggctgaggagccgctgctgggagacagcgcagccatagaggaagtgtaccacagcagcctggcttcactgaatgggctggaagtccacctgaaagagacgctgcccagggatgaggcagcctccacgagcagcacctacaacttcacacattacgaccgcattcagagcttgctgatggcaaacctgccgcaggtggccaccccgcaggatcgccgcttcctccaggccgtcagcctgatgcatagcgaatttgcccagctgcccgcgctttatgaaatgactgtcagaaatgcctccacggctgtgtacgcctgttgcaaccccatccaggagacatatttccagcagctggcacctgcagcacggagctccggcttcccaaaccctcaggatggcgccttcagcctctccggcaaagcaaagcagaagctgctgaagcacggggtgaacttgctctgaactgcacccaggaggtgactgggaaggagaaaaccagcaaaggaagctctgccttttataattgaaaaggcccctctattttatttttcttgaaaacattcccttttttaggaaccaaatgatatttgagtttttgttattccttttgcagattgggatgtgttttgggggcaggggttagttcttcaggtcggcagacccagagcacttgataaagaactgtatttaatcggtagtgttggggccgggacgggcttggctccctctctgccatactgagcctgaggtatttcatatctcctgctgttccatcccagcttgaattggtgccacaagcttccaagttggcattttttctagaacctgatcgtccactagcccagagtgtgtgtgttcaacccccacaccaggtggtggtaggcggtgtgactgcacagcgaggtgccggatctgtgagcaggccgactccactcccacgccgcaggtaggtttctccagtgcgctcttgctgggaggtccggatcgttcctgcagggaagcggcagcacacggagaccacttggttgaattctgttggaactctactcaaatctaggggcgtcttctttggacccacaatgggggcaagccttaataatatggaagggagtttgggctttagagatccctttataaaagctctgggggctgagccctgagaattcagtgacaacaggaccaacctgcgctgcctttgactacaagtgggccgtgcagctggttcctctcgagcgagtgtccctaaataggagtttacaagatgtctgggggtaaaagcactgtgcttttcagtggtggctgcgtgaaagggagcgacactcagctgtgtgttcctgggcttgtgtggtacttagaacctcagttctattacgttatagtcagacatttttttgacagtatgagacagactgcaggatgaaaatatttgtcaaaatcttaactgaatgtttactggaagtacttgagattccatttgagagttgtattgttaataatttcatgtcagtgaactgatatctgatgtttatgatatggtgtctttttcttgaaacaagcttccaagggctagaaataaaatagccaaaaaatgctggagttctgagtaattaaa

SEQ ID NO: 12437 - DNA, 11491 bp, Homo sapiens
tgatggagattacctttgggtaagttgaatggcagaatcagtgctgaagtgttgcaatgataagtttaggaagttatgttgtttctgagtcttgaatttagaattatctgcccccaccaacctcatccatgtactgtgtttagtaatcaccctcgcttcctgtggtactctctgcaggttttcatcatcaagtgctttccaaaacatttctaacatattctgcattgcacacagctggtttctcctttcctttcaaagacttaggccaacttgtggaaattctgtttactctgtgttgtaaattgagtttttatcatcatcttttcttctccatgctctctacacttactgggtaagtgacccagaaaaaaatgatagatatatgttaggttttagagaacccattaaaaaaaaaaaaagaatattgcttgagtccaggagttcgatatcagcctgggcaacatagtaagacccccgtctctataaaaaatttaaaaattaaccgggtgtggtggctcatgtctgtggtcttagctactggggaggctgaggggaggattgcttgagcttaggagtttcaggctgcagtgagccatgattgccactgcacgctagcctaggcaacagagtgacaccctgtcttaaaaaaaaaaaaagaataaaaatcattcctttacattctaatagtagcatataatctaaagtgctgtttcccatggctacatttattttaaggcttcctgaggtaaagggatgcttaagtgtgggatgctatattcaactttgtaggtattatttccaacattttattacgaaaattttttaaagtactgaacagttgaattttacagtgaatactcatatacctcctcaattctacagttagcattttattatagttgttttattacctatctattcattcctttatcctcccattaattcaaattatttttattttattttattgagacagggtctcaatctgttgctcaggctggagtgctgaggtgtgaccttggtttactgcaacctccgcctcccaggctcaaacgatcctcccatctcagcctcctgagttgctaggaccacaggcatgcaccaccatgcccggctaattttttaaactttttctagaggcagggtttcaccatgttgctcaggctggtcttgaactcctcagctcaaggaatcctcccgccttggcctcccaaagtgctgggattacaggcgcgagacactgtaacccagccccaaattattttgttacagttttcaaagtaagttgcacacattagtgtactctccacacagatactctctctatcatgcatatcatcaactaaaatttaatgtttggggctgagcgctgtggctcaggcctgtaatcccagcactttgggaggccaagacagtcggatcacctgaggtcaggaattcaagaccagcctgaccaacatggagaaaccctgtctgtactaaaaatacaaaattagccaggtgtggtggcacatgcctgtaatcccagctactcgggaggctgaggcaggagactctcttgaacctgggaggcagaggttacagtgagctgagatcgcgccattgcactccagcctgggcaacaaaagcgaaactccatctcaaaaaaaaaaaaaaaaaaaaaagaaatttaatgcttgtttgtggttacatgctttacaggcgtctgtcttgccacttaacacttgtgaaattcgttcatgttgttgcatctatcagcgttcgttccattttattatcaaacagtattccgttgtctgaatatatcacaatctgttcttcttttgatggacatctgaactgtgtccagttggggatattaaggataaggcttctgggaacattcctatacaagtattttggtgaacacgtgttttcatctctcctgggtaaatatccagtcctggaattgctgggtcatagagtaggtgtatgttggattttataggaaactgttagaacttttccttcagtggttgtaccattttacattcctaccaagaatgtatgagaattccagttactccacctgctcatcagcattgagattgacagtctgttcatcttagccattctgctggatgtgcagtggtgtgttattgtggttttagtcttcacttccctgatgactaatgatagtgaggccttttcatgtgcttaatgaccacttgaatatcttcctttgtgaagtgtccattcaaagccctgcccattttttaaattgggttttatttttttaattgaattgtagttctttttatatcctagataccagttctttgtcagatacatctttttaaaataatttctcccagtttgtggcatgcctgttaattttcttgttgtcttttgatgagcagaagtttttcattttaatgaagtctaacttataaattttatctttttatggttattgctttctgtgtcttgcctgaaaaaaaccactgcctactccattggaggagatagtctcccttttttattttttgtaagaatttgatagttttagcttttaaatttagatctgtaatccactttgggttaatatttgtgaatggtgtgaatagaggtcaaggatctttttttttttttccacctggataaccagttcttccagcatcattgttgaaaacattttcctttccctattggatttccctttggttcctttgccaaagatcagatgaccatttaagcgtgggtctatttctggactcttttcggcttttccacagatctgtttgaagattctgtgtgagtaccacactgtcttgatttctatagctttatagtaagtcttgaaaccagatagtataagttctccaaccttattctttctcaagatagctttggatatttcaggttctttgtgttttcattgtacaatcagtttgtggtttctgaagaaaagctggtgggattatgattgcaattgcattcagtctgttcatcaattggaagaattgaacacttcttacatgccagactgttgtaagctcttggattacatctgggaacaaagcaaagatccttgtgctactgtagcttacattcagagggaatttttgtttatttgttttctgtcagggtttattagtttaaatatctgatgattcccttaggacagattcctagaggtagaattactacatcaagtaataggaactttttcaggctctttaaacatatgaccagataactttctaactcagcaagtacttttttttttttgagacggtgtctcgctctgttgccaggctggagtgcagtagcgcaatctcggctcgctgcaacctctgcctcccaggttcaagcgattcccctgcctcagcctcctgagtagctgggactacaggcacacaccaccacgcccagtatttttagtagagacggggtttcaccatgttggtcaggatggtctcgatctcttgacctcgtgatccactcaaagtgctgggattacaggcatgagccaccgtgcccggccaagtatttatcttctgtggaactaaccactacgctcagcattttggagatctaggactgggaagattgcggtcagttcttgctcttaaagcactctatccagctggagaaacatgatggccattcatgaaggagtttgagtcctgtccattgtttgtaatggaatccagattaaacatctactgtccaaataacagtcctaacaatgcaagggtcagaaaaaaggtcagcattattggctcgaggtaatagaacagacctcatggagatactgaaattggtggtgggcactgaaggttgtaagttctggggaaatgaacaataaggaaaaggacatttgagattggaaaacatgaattgaggtacagaacttacttgtccatggagattaacttggccagaatgaagggtgtggactcagggacaatagaagatcaatttcgatgggccagtgaagtcaggtaattgagagccctggatgccaggattctgggcttggactcaaagagaaggaagatgcttgtcttcctggtttctctctttacaggtgctgggctgtgctgtggagctccctgatgtcagctgcaagcggtttctggatcagctagttggattctttaatttttacaatggacctgtttccctagcttatgaggtacaagtatggggttgaggagtcttacattgggcctctttataaaaaccggtattgccagaatgcagcacttactctggggtcttgtatacttcatataaacacattgtgtctggggacaaggtcaggagctcttggaggcccctcatatgcctttgggcctagtggcataggtcacatttattccaaatgtttatccccatctcctccctgggatgtttagaaagcgcaggccctgcttgccacccccacgcggcaggcgccgtggatctgtgatgggataggtttaaaacaggtcctcccttccggtcagtttcctgtgtgaggaacaatttttgaggtagttgggactctggccaaagaatctgtccctcaaaatctcagatattgacctgaggctctttctgttttagaactgttctcaggaagaactgagcacggagtgggacaccttcatcgagcaaattctgaaaaacaccagtgatctgcataagattttcaattccctctggaacttggaccaaactaaagtaacattttcatcctccttattcattttatatgtaagactagggcttctggatacttttttaatattcctgaagtgaactatatctggaaaagtgagtagaatgtcacttctcaggcagggccatgacacggcaggtcacctctcagcctcatttcccttatccaaagaatggtgtcagcatacctgccttcttgaactgttttgatgatcaagtgaagcagtacctcaaatgacaccaagtaaatgctcagtaaagggaattagtattttgttcatgcctcagaagtgttgaactcagtaatctgaaggccgcctctcttgatattcatatcatatgatctagttattctcagcatcaaaaatgcccagcatgaacatttcaaaaacaaggttgctgtctttgagagagaatggttgggaactgtttttgtatctctgagccgctccgtttgcggttggcactcagtgaaacctaggctgcttgtgtggctggcctgaccacctgtgctgccccattaagagccagctacctgagccctgactcacagccctctcctgtgtctcactgcgatagtaaataatgtccctgtagcaggggtgtagcactgtggctcagccttcacagagcatgactccaccagacatggggaagggttttccctgctccagtctggaaaacttcctgtagctggccccagagctttatagaatggctggctgggatggcacagtcttgaggctatgaagaataaacttcttaatgtgtcagcagctccggaggctccattaacactagttctaacagctggtggatacttgctggttctagctggcaggtggaagtctgaggaggctgctggttattgctggctcttcctgaccaggtccagatgcttttcttgtatttttagggacttctaggcccctgactccatacaaggaatgtggaactgaggcatatttccccgagtgaaagagcatgatgttttcattttatgtgatggaatagagtcatggaacctggtcagacatcaagccacctgtatcaccatggggattgtgcttcagaaggaaagtggaggatagggtaggtgggtttcacctggtaccatgacatgtatttataggatacaccctcctcttctgctgccgtgaggtcttagcattgtcagggtagacagtcggtctcccaggccatctactttgacccctttgaatagccatatgccatatttgctgcaccttctagcttctggacaggcctccttgttctaagaatttggcatttagtggtgtcagcagttctgagtatagagaggtagaatagtcccaagccatggcacagctttcactgtgtgacacattctccttttccaggctttgagctacaccctgtccagctgttctgtacaaccctttccccttttctcccttcctgattgtgagcatgctgatgggtgggcatgatgcctcttgccctgcacaggtggagcccctgttgttgctgaaggcagcccgcattctgcagacctgccagcgctcgcctcacattctcgctggctgcatcctctataaaggactgtgagtaactccagacccctttcttccagccccattcccttgctgcacaactgaccatcagccacctccagatcacagtggggagcccagtctctggccagttccaagtgggctggttcggcaaatatcaggtagtttagatttgactcagtttagaaagacaggtgtgtacctgtctttgagcaaagctgagaaattggaaatagttgtgttcagaaaagagttaagaatgtccctataattctcagtatggggcatgctggaatagttgtcagtctgcaaaatgctaatgcagagtcccgagcgttgccagcagccagcactgtagtcaagaggcatggaaggggcctgctgtgaccctcctcctgctgcccagagaccctggtgtgcttgcctcagctcagctctgcaaagcagccttacaggcccttatccagctgccttcaagcctcttggctgggccagtgtcttggttggcctctgagaattcacttcacttcttcatgtagttggagggcttcttggtgaatctgagtgcccaagagccactctaggtcatctaaggcctctctcctcatggagggtttgctgtcacagcccagggcaggcagggccattgcgctgtgcccggagcttcctgaggagcaggcaactactgtgtaaatggagaagcactgaggctctcgcaggggcccttgggccagacaggctcggccccagatcctcccttctttcgccagccatgcggccttgggcaagttgcttagcctcaattttctcttctgggaaatagacatcccttgtgaagaatgaaatgagatgacagatgcggaagaaccgagcatagaccctggtgggctttgcactcttcttccttgccccggttcttatcatgatggttctgaatcagctgtgggatttccaagttcgtcagtgacatacccaccaaagacagtattttttttccccttttctcattttgcatttcttaaatgtatatatatatatttttttttcttttttttttttttgtagggacgaggtcttgctatgttgcccaggctggtctcaaacacctggcttcaagcgatcctcagcttcccaaactgcttggattatagacataagccactgcacccagcctgtatttacattatacggctaatacatgaatacattttcactgtaaacaaatcaatcaatagaggaacacacagagcacaatttaaaagccccccttctttcttcaccatttttgtttgtttgtttttgagacacagtcttgctttgttgcccaggctgtagtgtagtggcataaacacagcttactacagcctcgacctcttggactcaagtgatcctcccacgtagctggaacaacaagcacttgctaccacacctggccaagcttttgattttttttttttttttttttgtagagatgggatctcactatgttgctcatggaggtctcaaactcctaagctcaagttattctcccacctcagcctcccaaagtgctgtgattgcaggagtaagccactgtgcccagcctctccctcactcttaacctgtcctcaccattggcagtttggtgggcatcttgctctttctgtgtgtttgtccccactggtacatgtatgcatatattgcttttgtttatttttgctatctccttaaataggatcacatggtttctcaacgcatacagtgaagatttccttaccggttcatatgggtctacctcattcttatgaggactgcatactttttgggattctggctgtgttgtgctttactgtcttgttgatgaacattttggtggtttactcattttttaattgtttttaccattctccctgtaatgaatattcttacgcatacatcttggtacaagctgagtcaaagggtttggatattttaaatgttggtaggaactgccagagtgccctctgtaagggttttaccagttgaaactcccaccagccaagtccccaagatcctcgtcaacacgggctgttaggcatctttaaaatttggagtgttttggtgtatttcgtctcatggtgttcttgttctgtgtgtgacctcctaggattgtcagcacccaactcccgccctccctcaccgccaaggtcctgcttcaccgaacagcacctcaggagcaggtattgtaaagtccacccacctggctggacagcatcccccagagcactggtcactgagcctgaggctggagggatcaggagcagaggccgtggagcagttgtttcacttggtcttgtcaggaccccaagtcctccaatgtcattctcctcagtagtgaagccattggtgaggctgaaagaaaatgttttcttccacgagctaggcctggatagttgttttttcttcaaaccaaggaaatcttggttgaattcgacttcccataagaatttgatgtctctttatgtcaaagagatgttagacttttcagagacagactgtaaaggatgtgtctttagaaagatttagggggttgggcacggtggttcacacctgtaatcccagcactttgggtggctgaggtgggcagatcacttgaggtgaggagttcaagaccagcctggccaacatgatgaaacccatctctatttaaaatacaaaaattagctgggtgtggtggtgcacacctgtaaatcccagctacttgggaggctgaggcaggagaatcgcttgaacctggcaggcagaggttgaggtgagctgagatcgcgccactgcactccagcctgggtagcaagagtgagactctgtctcaaaaaataaaaataaaaataaaaaaataaggaaaacaaactcttctaaaatacttccattttatatttatttaattgtttttatattgaaaaaaaagccatgcatgctcattgagaataaaattgcccatctttgaactgtacagggatagccactgccagcatctggcatatctccttccagtcctttttttgttttgtgtatgaagctgtggtttccagcgtatcatgaggctgtctttttacatgtattagtgaacaggcatgtaaaatgctggtagggctctattcagcctcctcagccactgtggctatgggtgtcaattcaagtagcctttctgggaaacactttgataatgagaacgttaaggatgccctttatttttttcctaataatttgacttctaggaatatatcttaaggaaataatgtaactgctgaaaaaaatttatactcaaaacttgatcacaacaagctttatgaaagtgaaaaatcagacaaaacttgaatgcttaaagtaggaggtggcaaattatggcctgtgggccacctgcctacaaatgaagttttatttggctgcttttgagctataatagcagaaccaagtaggtgggacagagaccatatgccctgcaaagccaaaaatatttactgtcttgtcttttgcacagaaagtttactaattactggtctaaggtaggtaaatgattaatttactcatatcacttaaaccttcataaaattttaatcagccgtttaaaatggccaaagatgttttagtggcaggaaatgcgtgttactgttttaagcagaaatatgaaattttatatagtgtggcctcaaaagtataaaaactgcataggcttaaggaaaaaatacccaatattaatagtactagcttggggatgagggattgtatgtgattttttttttcaacgctttgtctagagtaaattgaggttaggcttagtaatctaaaacatagttttttaaaaatcaccaaaaaaggaagaacaccatatcattctaagattgaaagtcattttggctagaagagcagttcttgtttggtttggttttgttttggtgggttcttttggaaccctcagattgaaacgagagatgttttcatttttgagaaaatcatcaggttttaggccctgattgtgaaccagaacaaacgagagattgggtatagcattttgtttaagtcaaatcctttatcgtgagagtcacagtattttgacatttttattataatggaatttatgtgaattctacatcagggctgtggcagatgtgactgtattctagaatatgagttccccaaaggtgtaaaagagaacaggaatcctcaattttattcccagaagggagagagactgagaaaatcagaacgtagagtgtgatgtgagtttgggtggagctgctgccttgcagcctgtgtgggcccaggttcttgcttcatcccagccatagtgggagccagcagcttgggggagcttctgttccatctgcttggctcttagcatgtggttgggacaagctttctgggcctggctaagttttatgaacagatggcacagcaaattcctgatggttaggtcaagaggagaatgtggtgcccagcgccaacttctgtgtgtgtttgttttcagagactccctacgggagaggatgccccgcaggaacatggtaagtagtgaggcgcatggttgcctcttgagaacggcggtcttttatgctacctacccctgtacaagttatgcgaaggaaaccaagccatctgcatgtttatttcctctgctcataataggaaaatggatgttatggagcttcaagaatcgagttacccaccagaaccctaatggtaaagctatgattttaggcatgctgtcaaatccctgctttcagaccctccttaacttcatattgtgagactgctcggtcaagtgccaggagattgtgattgggagagggtaaggcaaacagcgactgccagaaagaccttttgcaggatgtggaggcgtcctcaggagagttatttcgatttattctgaagcctgagttggagcagatccctttcttagcttatatcttcttcttgtaaaagtgcttttcaacctttctctcccgaacatcttccttctccaaagctgggagtcatgttgcctgcagggactctttccttactgggcccaggagttcgaggtgcagtttggcaacctgtgtcctggctgaggaatgcactcacagcacccctttccgagcccacgtgtgggttggatgcatcacgccagtgcagctattgccccgctgccctctctggctcaggggaaagtcctgttcatattgctttgcaattccaggagcggcattgcccccgaatgtccagattat

SEQ ID NO: 12438 - DNA, 556 bp, Homo sapiens
tgatggagattacctttgggtgctgggctgtgctgtggagctccctgatgtcagctgcaagcggtttctggatcagctagttggattctttaatttttacaatggacctgtttccctagcttatgagaactgttctcaggaagaactgagcacggagtgggacaccttcatcgagcaaattctgaaaaacaccagtgatctgcataagattttcaattccctctggaacttggaccaaactaaatcatggaacctggtcagacatcaagccacctgtatcaccatggggattgtgcttcagaaggaaagtggaggatagggtggagcccctgttgttgctgaaggcagcccgcattctgcagacctgccagcgctcgcctcacattctcgctggctgcatcctctataaaggactgattgtcagcacccaactcccgccctccctcaccgccaaggtcctgcttcaccgaacagcacctcaggagcagagactccctacgggagaggatgccccgcaggaacatggagcggcattgcccccgaatgtccagattat

SEQ ID NO: 12439 - DNA, 27464 bp, Homo sapiens
ttgaatttcctgcgcttacagaatggttttatctaatttgtagctactggggttctttattctctggggccacctgaaggctttcaaacacagtaataagccctcctcgggctgggaaacaggaagctgtgttttaaatgccgtgatcactggattaaaggaaacatggctccactctgttctcttgccaggtggaattatttttttctttatgatggttccaaggtaaaggaagaaggcgatccaacaagagctggcatttgttacttttatccttcccaggtaagccacacagcattttattgttcagtgaggatcccagtgcctccaagtggtgacttttcaaaagtatggggtttacattaggacagtttggctaatccagacaatgacatttctactgtcttattcttagttgtactatttcttgttgttctggtcttaaaatttccaggcagctcggcactttcatcgtctttagctttctatttccatcatgatttttgtctgcctccctctacccccaattttttgatcagcttggtttttaaaagttattattctgctgggcacggtagtttatgcctgcagtcccagctctttggcaggctgaggtggatggatcacctgaggtcaggagtttgagaccagcctggccagcatgatgaaaccctgtctctactaaaaatcccaaaattagctgggcgtggtggcacgctcctgtaatcccagctacttgggaggctgaggcacgagaatcgcttgaatccaggaggcagagttgcagtgagcagagactgcgccattgcacaccagcctgggcaataagagtgaaactccatctcaaaaaaaataaataaataagtttgtattcaaacatatacaaaaacagagaggcaagtatcatgaaccctcatatgccatcagtagcttcaacaattatcaatactttgccgatttttttttttttttttttgtgatggaggctcactctgtcacccagggtggagtgcagtggcatgatctctgctcactgcatgctccacctcccgggttcatgccattctcctgcctcaacctcccgagtagttgggactacagtcgcccgctaccacgcccggctaatttttgtatttttagtagggacggggttttaccatgttagccaggatggtctcgatctcctgacctcgtgatccacccacctcagcctcccaaagtgcagggattacaggcgtgagccaccacgcccggcaatactttgccaattttatgtgacctatctgaacctcttcttctctctcttttttttttcctggagcaaattctagatgttgcgtcatctcaccagtatcaagcaacatctctaactgaaaagggcattattttgaacattaccacacctaacgaaagttacagtaattagtaacagtaattccttaatattacctgatacccagactgtattcaaattttgccttattgtcttggatattacttattctgctcttccttccttccatgcacccatacttccatccttccatttctttttctttttcctaataaggatccaaacagcatccacatattctatttggttattttgtattttaagtccttttaataacagtcctcacccagccactcatctttttccccctcctctatgccattgaattattgaagaaaccaggtcatatgtgtagtagagtgttagaatgtcccacactctagatttggctgatttgttcctcatggtggtgtcatttaatgtctcctatccactgtatttcctttacattagtagtaagatctagagtcttggtgaggttcaagctcagttttctaggtaagaattcttcatgggtggtgtatacatttcctgtgtatcccatactgtctggctgtcctgtgcgttagttaaggctaaggttgattaggagattctgtacattccctcctgtgactgtgctctgacatggatagttggggttaatctgcatccctctggccactccgtatgggggatttgagtaggagtgaaaggctcatgcttctgctaagcatatgcctataatcctagcaacagaaatgcggttctgtgcagtcatcgcatgtgttcctgctgggtgttctcttagggttcagtcatctcaggtaggggttggcaaactttgtaaagggccagaaagtaaatattttaggctttgcaaggcacataaggtttcaatcacatgttcttctttgttgtaacctttaaaaagtataagaaccattcttagcttacaggccataggaaaacgggtaacagactggatttggcttgcaggctttagtatgctgtaagaaatgacttaagagttcaagaatttcagcttcctatctggaatgtgctcctttcccacagaccctgctagaccaacaggagttgctttgtggacagattgctggagttgtccgctgtgtttctgacatttctgactctcctcctactcttgttcgtctgagaaaactgaagtttgccataaaagttgatggagattacctttgggtaagttgaatggcagaatcagtgctgaagtgttgcaatgataagtttaggaagttatgttgtttctgagtcttgaatttagaattatctgcccccaccaacctcatccatgtactgtgtttagtaatcaccctcgcttcctgtggtactctctgcaggttttcatcatcaagtgctttccaaaacatttctaacatattctgcattgcacacagctggtttctcctttcctttcaaagacttaggccaacttgtggaaattctgtttactctgtgttgtaaattgagtttttatcatcatcttttcttctccatgctctctacacttactgggtaagtgacccagaaaaaaatgatagatatatgttaggttttagagaacccattaaaaaaaaaaaaagaatattgcttgagtccaggagttcgatatcagcctgggcaacatagtaagacccccgtctctataaaaaatttaaaaattaaccgggtgtggtggctcatgtctgtggtcttagctactggggaggctgaggggaggattgcttgagcttaggagtttcaggctgcagtgagccatgattgccactgcacgctagcctaggcaacagagtgacaccctgtcttaaaaaaaaaaaaagaataaaaatcattcctttacattctaatagtagcatataatctaaagtgctgtttcccatggctacatttattttaaggcttcctgaggtaaagggatgcttaagtgtgggatgctatattcaactttgtaggtattatttccaacattttattacgaaaattttttaaagtactgaacagttgaattttacagtgaatactcatatacctcctcaattctacagttagcattttattatagttgttttattacctatctattcattcctttatcctcccattaattcaaattatttttattttattttattgagacagggtctcaatctgttgctcaggctggagtgctgaggtgtgaccttggtttactgcaacctccgcctcccaggctcaaacgatcctcccatctcagcctcctgagttgctaggaccacaggcatgcaccaccatgcccggctaattttttaaactttttctagaggcagggtttcaccatgttgctcaggctggtcttgaactcctcagctcaaggaatcctcccgccttggcctcccaaagtgctgggattacaggcgcgagacactgtaacccagccccaaattattttgttacagttttcaaagtaagttgcacacattagtgtactctccacacagatactctctctatcatgcatatcatcaactaaaatttaatgtttggggctgagcgctgtggctcaggcctgtaatcccagcactttgggaggccaagacagtcggatcacctgaggtcaggaattcaagaccagcctgaccaacatggagaaaccctgtctgtactaaaaatacaaaattagccaggtgtggtggcacatgcctgtaatcccagctactcgggaggctgaggcaggagactctcttgaacctgggaggcagaggttacagtgagctgagatcgcgccattgcactccagcctgggcaacaaaagcgaaactccatctcaaaaaaaaaaaaaaaaaaaaaagaaatttaatgcttgtttgtggttacatgctttacaggcgtctgtcttgccacttaacacttgtgaaattcgttcatgttgttgcatctatcagcgttcgttccattttattatcaaacagtattccgttgtctgaatatatcacaatctgttcttcttttgatggacatctgaactgtgtccagttggggatattaaggataaggcttctgggaacattcctatacaagtattttggtgaacacgtgttttcatctctcctgggtaaatatccagtcctggaattgctgggtcatagagtaggtgtatgttggattttataggaaactgttagaacttttccttcagtggttgtaccattttacattcctaccaagaatgtatgagaattccagttactccacctgctcatcagcattgagattgacagtctgttcatcttagccattctgctggatgtgcagtggtgtgttattgtggttttagtcttcacttccctgatgactaatgatagtgaggccttttcatgtgcttaatgaccacttgaatatcttcctttgtgaagtgtccattcaaagccctgcccattttttaaattgggttttatttttttaattgaattgtagttctttttatatcctagataccagttctttgtcagatacatctttttaaaataatttctcccagtttgtggcatgcctgttaattttcttgttgtcttttgatgagcagaagtttttcattttaatgaagtctaacttataaattttatctttttatggttattgctttctgtgtcttgcctgaaaaaaaccactgcctactccattggaggagatagtctcccttttttattttttgtaagaatttgatagttttagcttttaaatttagatctgtaatccactttgggttaatatttgtgaatggtgtgaatagaggtcaaggatctttttttttttttccacctggataaccagttcttccagcatcattgttgaaaacattttcctttccctattggatttccctttggttcctttgccaaagatcagatgaccatttaagcgtgggtctatttctggactcttttcggcttttccacagatctgtttgaagattctgtgtgagtaccacactgtcttgatttctatagctttatagtaagtcttgaaaccagatagtataagttctccaaccttattctttctcaagatagctttggatatttcaggttctttgtgttttcattgtacaatcagtttgtggtttctgaagaaaagctggtgggattatgattgcaattgcattcagtctgttcatcaattggaagaattgaacacttcttacatgccagactgttgtaagctcttggattacatctgggaacaaagcaaagatccttgtgctactgtagcttacattcagagggaatttttgtttatttgttttctgtcagggtttattagtttaaatatctgatgattcccttaggacagattcctagaggtagaattactacatcaagtaataggaactttttcaggctctttaaacatatgaccagataactttctaactcagcaagtacttttttttttttgagacggtgtctcgctctgttgccaggctggagtgcagtagcgcaatctcggctcgctgcaacctctgcctcccaggttcaagcgattcccctgcctcagcctcctgagtagctgggactacaggcacacaccaccacgcccagtatttttagtagagacggggtttcaccatgttggtcaggatggtctcgatctcttgacctcgtgatccactcaaagtgctgggattacaggcatgagccaccgtgcccggccaagtatttatcttctgtggaactaaccactacgctcagcattttggagatctaggactgggaagattgcggtcagttcttgctcttaaagcactctatccagctggagaaacatgatggccattcatgaaggagtttgagtcctgtccattgtttgtaatggaatccagattaaacatctactgtccaaataacagtcctaacaatgcaagggtcagaaaaaaggtcagcattattggctcgaggtaatagaacagacctcatggagatactgaaattggtggtgggcactgaaggttgtaagttctggggaaatgaacaataaggaaaaggacatttgagattggaaaacatgaattgaggtacagaacttacttgtccatggagattaacttggccagaatgaagggtgtggactcagggacaatagaagatcaatttcgatgggccagtgaagtcaggtaattgagagccctggatgccaggattctgggcttggactcaaagagaaggaagatgcttgtcttcctggtttctctctttacaggtgctgggctgtgctgtggagctccctgatgtcagctgcaagcggtttctggatcagctagttggattctttaatttttacaatggacctgtttccctagcttatgaggtacaagtatggggttgaggagtcttacattgggcctctttataaaaaccggtattgccagaatgcagcacttactctggggtcttgtatacttcatataaacacattgtgtctggggacaaggtcaggagctcttggaggcccctcatatgcctttgggcctagtggcataggtcacatttattccaaatgtttatccccatctcctccctgggatgtttagaaagcgcaggccctgcttgccacccccacgcggcaggcgccgtggatctgtgatgggataggtttaaaacaggtcctcccttccggtcagtttcctgtgtgaggaacaatttttgaggtagttgggactctggccaaagaatctgtccctcaaaatctcagatattgacctgaggctctttctgttttagaactgttctcaggaagaactgagcacggagtgggacaccttcatcgagcaaattctgaaaaacaccagtgatctgcataagattttcaattccctctggaacttggaccaaactaaagtaacattttcatcctccttattcattttatatgtaagactagggcttctggatacttttttaatattcctgaagtgaactatatctggaaaagtgagtagaatgtcacttctcaggcagggccatgacacggcaggtcacctctcagcctcatttcccttatccaaagaatggtgtcagcatacctgccttcttgaactgttttgatgatcaagtgaagcagtacctcaaatgacaccaagtaaatgctcagtaaagggaattagtattttgttcatgcctcagaagtgttgaactcagtaatctgaaggccgcctctcttgatattcatatcatatgatctagttattctcagcatcaaaaatgcccagcatgaacatttcaaaaacaaggttgctgtctttgagagagaatggttgggaactgtttttgtatctctgagccgctccgtttgcggttggcactcagtgaaacctaggctgcttgtgtggctggcctgaccacctgtgctgccccattaagagccagctacctgagccctgactcacagccctctcctgtgtctcactgcgatagtaaataatgtccctgtagcaggggtgtagcactgtggctcagccttcacagagcatgactccaccagacatggggaagggttttccctgctccagtctggaaaacttcctgtagctggccccagagctttatagaatggctggctgggatggcacagtcttgaggctatgaagaataaacttcttaatgtgtcagcagctccggaggctccattaacactagttctaacagctggtggatacttgctggttctagctggcaggtggaagtctgaggaggctgctggttattgctggctcttcctgaccaggtccagatgcttttcttgtatttttagggacttctaggcccctgactccatacaaggaatgtggaactgaggcatatttccccgagtgaaagagcatgatgttttcattttatgtgatggaatagagtcatggaacctggtcagacatcaagccacctgtatcaccatggggattgtgcttcagaaggaaagtggaggatagggtaggtgggtttcacctggtaccatgacatgtatttataggatacaccctcctcttctgctgccgtgaggtcttagcattgtcagggtagacagtcggtctcccaggccatctactttgacccctttgaatagccatatgccatatttgctgcaccttctagcttctggacaggcctccttgttctaagaatttggcatttagtggtgtcagcagttctgagtatagagaggtagaatagtcccaagccatggcacagctttcactgtgtgacacattctccttttccaggctttgagctacaccctgtccagctgttctgtacaaccctttccccttttctcccttcctgattgtgagcatgctgatgggtgggcatgatgcctcttgccctgcacaggtggagcccctgttgttgctgaaggcagcccgcattctgcagacctgccagcgctcgcctcacattctcgctggctgcatcctctataaaggactgtgagtaactccagacccctttcttccagccccattcccttgctgcacaactgaccatcagccacctccagatcacagtggggagcccagtctctggccagttccaagtgggctggttcggcaaatatcaggtagtttagatttgactcagtttagaaagacaggtgtgtacctgtctttgagcaaagctgagaaattggaaatagttgtgttcagaaaagagttaagaatgtccctataattctcagtatggggcatgctggaatagttgtcagtctgcaaaatgctaatgcagagtcccgagcgttgccagcagccagcactgtagtcaagaggcatggaaggggcctgctgtgaccctcctcctgctgcccagagaccctggtgtgcttgcctcagctcagctctgcaaagcagccttacaggcccttatccagctgccttcaagcctcttggctgggccagtgtcttggttggcctctgagaattcacttcacttcttcatgtagttggagggcttcttggtgaatctgagtgcccaagagccactctaggtcatctaaggcctctctcctcatggagggtttgctgtcacagcccagggcaggcagggccattgcgctgtgcccggagcttcctgaggagcaggcaactactgtgtaaatggagaagcactgaggctctcgcaggggcccttgggccagacaggctcggccccagatcctcccttctttcgccagccatgcggccttgggcaagttgcttagcctcaattttctcttctgggaaatagacatcccttgtgaagaatgaaatgagatgacagatgcggaagaaccgagcatagaccctggtgggctttgcactcttcttccttgccccggttcttatcatgatggttctgaatcagctgtgggatttccaagttcgtcagtgacatacccaccaaagacagtattttttttccccttttctcattttgcatttcttaaatgtatatatatatatttttttttcttttttttttttttgtagggacgaggtcttgctatgttgcccaggctggtctcaaacacctggcttcaagcgatcctcagcttcccaaactgcttggattatagacataagccactgcacccagcctgtatttacattatacggctaatacatgaatacattttcactgtaaacaaatcaatcaatagaggaacacacagagcacaatttaaaagccccccttctttcttcaccatttttgtttgtttgtttttgagacacagtcttgctttgttgcccaggctgtagtgtagtggcataaacacagcttactacagcctcgacctcttggactcaagtgatcctcccacgtagctggaacaacaagcacttgctaccacacctggccaagcttttgattttttttttttttttttttgtagagatgggatctcactatgttgctcatggaggtctcaaactcctaagctcaagttattctcccacctcagcctcccaaagtgctgtgattgcaggagtaagccactgtgcccagcctctccctcactcttaacctgtcctcaccattggcagtttggtgggcatcttgctctttctgtgtgtttgtccccactggtacatgtatgcatatattgcttttgtttatttttgctatctccttaaataggatcacatggtttctcaacgcatacagtgaagatttccttaccggttcatatgggtctacctcattcttatgaggactgcatactttttgggattctggctgtgttgtgctttactgtcttgttgatgaacattttggtggtttactcattttttaattgtttttaccattctccctgtaatgaatattcttacgcatacatcttggtacaagctgagtcaaagggtttggatattttaaatgttggtaggaactgccagagtgccctctgtaagggttttaccagttgaaactcccaccagccaagtccccaagatcctcgtcaacacgggctgttaggcatctttaaaatttggagtgttttggtgtatttcgtctcatggtgttcttgttctgtgtgtgacctcctaggattgtcagcacccaactcccgccctccctcaccgccaaggtcctgcttcaccgaacagcacctcaggagcaggtattgtaaagtccacccacctggctggacagcatcccccagagcactggtcactgagcctgaggctggagggatcaggagcagaggccgtggagcagttgtttcacttggtcttgtcaggaccccaagtcctccaatgtcattctcctcagtagtgaagccattggtgaggctgaaagaaaatgttttcttccacgagctaggcctggatagttgttttttcttcaaaccaaggaaatcttggttgaattcgacttcccataagaatttgatgtctctttatgtcaaagagatgttagacttttcagagacagactgtaaaggatgtgtctttagaaagatttagggggttgggcacggtggttcacacctgtaatcccagcactttgggtggctgaggtgggcagatcacttgaggtgaggagttcaagaccagcctggccaacatgatgaaacccatctctatttaaaatacaaaaattagctgggtgtggtggtgcacacctgtaaatcccagctacttgggaggctgaggcaggagaatcgcttgaacctggcaggcagaggttgaggtgagctgagatcgcgccactgcactccagcctgggtagcaagagtgagactctgtctcaaaaaataaaaataaaaataaaaaaataaggaaaacaaactcttctaaaatacttccattttatatttatttaattgtttttatattgaaaaaaaagccatgcatgctcattgagaataaaattgcccatctttgaactgtacagggatagccactgccagcatctggcatatctccttccagtcctttttttgttttgtgtatgaagctgtggtttccagcgtatcatgaggctgtctttttacatgtattagtgaacaggcatgtaaaatgctggtagggctctattcagcctcctcagccactgtggctatgggtgtcaattcaagtagcctttctgggaaacactttgataatgagaacgttaaggatgccctttatttttttcctaataatttgacttctaggaatatatcttaaggaaataatgtaactgctgaaaaaaatttatactcaaaacttgatcacaacaagctttatgaaagtgaaaaatcagacaaaacttgaatgcttaaagtaggaggtggcaaattatggcctgtgggccacctgcctacaaatgaagttttatttggctgcttttgagctataatagcagaaccaagtaggtgggacagagaccatatgccctgcaaagccaaaaatatttactgtcttgtcttttgcacagaaagtttactaattactggtctaaggtaggtaaatgattaatttactcatatcacttaaaccttcataaaattttaatcagccgtttaaaatggccaaagatgttttagtggcaggaaatgcgtgttactgttttaagcagaaatatgaaattttatatagtgtggcctcaaaagtataaaaactgcataggcttaaggaaaaaatacccaatattaatagtactagcttggggatgagggattgtatgtgattttttttttcaacgctttgtctagagtaaattgaggttaggcttagtaatctaaaacatagttttttaaaaatcaccaaaaaaggaagaacaccatatcattctaagattgaaagtcattttggctagaagagcagttcttgtttggtttggttttgttttggtgggttcttttggaaccctcagattgaaacgagagatgttttcatttttgagaaaatcatcaggttttaggccctgattgtgaaccagaacaaacgagagattgggtatagcattttgtttaagtcaaatcctttatcgtgagagtcacagtattttgacatttttattataatggaatttatgtgaattctacatcagggctgtggcagatgtgactgtattctagaatatgagttccccaaaggtgtaaaagagaacaggaatcctcaattttattcccagaagggagagagactgagaaaatcagaacgtagagtgtgatgtgagtttgggtggagctgctgccttgcagcctgtgtgggcccaggttcttgcttcatcccagccatagtgggagccagcagcttgggggagcttctgttccatctgcttggctcttagcatgtggttgggacaagctttctgggcctggctaagttttatgaacagatggcacagcaaattcctgatggttaggtcaagaggagaatgtggtgcccagcgccaacttctgtgtgtgtttgttttcagagactccctacgggagaggatgccccgcaggaacatggtaagtagtgaggcgcatggttgcctcttgagaacggcggtcttttatgctacctacccctgtacaagttatgcgaaggaaaccaagccatctgcatgtttatttcctctgctcataataggaaaatggatgttatggagcttcaagaatcgagttacccaccagaaccctaatggtaaagctatgattttaggcatgctgtcaaatccctgctttcagaccctccttaacttcatattgtgagactgctcggtcaagtgccaggagattgtgattgggagagggtaaggcaaacagcgactgccagaaagaccttttgcaggatgtggaggcgtcctcaggagagttatttcgatttattctgaagcctgagttggagcagatccctttcttagcttatatcttcttcttgtaaaagtgcttttcaacctttctctcccgaacatcttccttctccaaagctgggagtcatgttgcctgcagggactctttccttactgggcccaggagttcgaggtgcagtttggcaacctgtgtcctggctgaggaatgcactcacagcacccctttccgagcccacgtgtgggttggatgcatcacgccagtgcagctattgccccgctgccctctctggctcaggggaaagtcctgttcatattgctttgcaattccaggagcggcattgcccccgaatgtccagattatccctgtttttgtgaccaaagaggaagccattagtctccacgagttcccggtggaacagatgacaaggtaatggagtgcacagagagttaaccttgcaccacacctgagggaccccatcgcgtgattggttaaaaaacaaacctctgatacatcccatcgttccttaattccatcttccccatgccctgtcttgtaaaggagcatctgaatcttgagtttgttaagaaacagagtggcatagagagatgacattggctttcatatcccagctctcttacttataccagctatgggaccttgggcaagtccattccctgcctgagcctcagttttttcatctgaaaagtagacaaaatagtatccctttcatgagttcattgtgacacttgaaaatagtataggtacagcacctagtatagggcctgatgcgtaggagaccttccagatgtgggtcagtcttattcagtgggctctgccattttcagtaggtgagtctggtgtcactacgtaaagccccaagggccagatgttggtgtatttttactcttgtgatttaactctggtggcctcttaggctctgtggcctcaggcacccccttgtccttgatgcctgtgctttagtcttcactgtggaagggcacttgccctgcagtctgtcaacgtgccccttccttacatctctcttgtttgccaggtctctagcatctccagcaggactccaggatggttcagcccagcaccatccaaagggtgggagcacatctgccctgaaagaaaacgccactggccatgtggaatccatggcctggaccaccccagatcccacatcccctgacgaagcttgtccagatggcaggaaggagaacggatgcttgtctggccatgatctggagagcatcaggcccgcaggactgcacaactctgccaggggtgaggttcttggcctcagctcctccctggggaaggaactagtctttctccaagaagaactcgacttgtctgaaatccacattccagaggctcaggaagtggaaatggcctcaggtcattttgccttcctacatgtgcctgttccagatggcagggctccttactgcaaggcatctctcagcgcctccagcagcctggaacccacgcctcctgaggacacagccatcagcagcttgcgccctccctctgctcctgagatgctgacccagcatggagcccaagagcagctcgaagaccatcctggccatagcagccaagcccccattcccagagcagaccctctccccagaaggacccgcaggcccttgttattgcctcgcttagatccaggacagagaggaaacaagcttcccacgggggaacaaggcctggatgaggatgttgatggggtctgtgaaagccacgcagcccctggtctggaatgcagttcaggctcagcaaactgtcagggtgctggcccctctgcagatggaatcagctccaggctgacaccagcagagtcctgcatggggctcgtgaggatgaatctctacactcactgcgtcaaagggctggtgctgtccctgctggctgaggagccgctgctgggagacagcgcagccatagaggaagtggtgagtgtcctcagaccttctcctgcccctctgcggcctctgccgatctcctgtgcttccctcacagcactgtgccaacacccagggaagagataaaggctcagccctcagttgtgtgaccctgggcaagacgttcttgtttagacgatggaggtattacctgcctctgtgggtttttgtggggggtaagagtgagtcaagcgcatagcactggtggtgcattggcatccaacaagtgttggttctcttcttccgctgtttctagttttgcagagcgcaggccttggagaaagggaaggcctgagatggaatcctggcccttgtcctctagctgtgtgaacttgcccacagacctttgtccccttgagccttggctaactcctcagtcacgtagggatggtggtagaccttcctgttccagatgcagtgagataatgcaggcagagactgcacacgtacgtgcatgtgttgtgccgcccctgctcatggcctcatttcctagcctggacagctctaggttctgtgtcagctggaaactcctccgcagtgtgtcacagcctgggttgggagttccctagaaacccagtgtttccctccatagccccagcatcgtacctgatctgaagctccttcctagaaggctgggatgtctgaaatcctgcctggctctggagggctcttaaactattgcagccccttccccgcttagaggcttagagtggtaaactgaccttccctggggcccacgctggagattcgttgctatagtaacagccttgctttagtaggcagggaaagtggtagcagtaagaacagcaggttgaaattgctgcagggcaaatggtgtcttggggctttccttgtttttattcttaaatgtgtattattctaagctgatcttactatcatgcagggcttgtgaccctccataaatgagctagtcaccttgaaatacagaagaagagataagactgcacagcagcttccttgcacagagctcctagcaagagaatgctctctggagctgtcaggcttctctgtgccctttccacagacgctggatcactgagttatggctcatttgcttcctgtatccccattcaccatagctaggagtgactatccatctccttcttatagcagtgcggggagttgtggctgcagtgttaaatgcctcatctccctgccaatgccttggttttcatggtctgttctgcacagtgtcgagccttggaagtgtcattttgaagggcccagtgtttgaatgcaataaagtggatataatacctctctttttaccttcccccacaaaaaggaaaaaatagcccaggctgctctttgagatgtattctgcaccaactatatgtgaaatacttcgcatctctcgttttagccaagccttagaacagttctgggaaggaggcattgtaactcccattttaccagtaagaaaacagcctcattgagatgaaaagacttcctgcaagtggcaggtccagaattcttgcttgtttctggttccccaccccagcctctctgtccccccactgccctgcccttgcagtgatagctgggaagctgaagaaagggggtcagtgtcctgccttctgtggctcgtgctctatggccatatcccctggtttgtcaaggtctatccatgctgttacgacatcagcctccatgggcttctgtggaaagcagggtttgatgctggctaggccccgggaaatagactgcagttttatggaagagaaaaagctaatcttttcttcttttttttttttttttttgagatggagttccgctcttgttgcccaggctggagtacaatggtgtgatctgagctcactgcaacctccgcctccccggttcaagcggttctcctacctcaacctcctgagtagctgggattacaggcatgtgccaccaggcccggctaattttgtatttttagtagagacggggtttctccatgttggtcaggctggtctcgaactcctgacctcaggtaatctgcccgcctcggcctcccaaagtgctgggattacaggcatgattgcacccatccctgaaaagctaatcttttctagtatggagtgactaactttgatcagcccactggtttgagagtgggtttgttaatcagacccaaaggatttctgttttataatcaggaagaggtgtttgattgcctttttgtcccagactagccttgaaaatactttatctgatttccctgcagcccctctgctactgtctagaaaaaccaaatacccccagttacggtgagcacaccccttttgcaagggctccttaatgatgttacatactgccaagctgcccttgtgtcatttggctgtcttgtctttgggtggatcagcttccacagggagtaggggtagggtgaggggcagcaggggttgggattggtgaaaggagccctgggtggagcagccaggagggttgggattggggctggaattccctcagagggagtggaataggctcacaccagggggcagcatagagccgctgatagtccattactcagaccccaagataatctccttgaccttcaaacacagtgatcagattaattatttatcactacaataggacatggagcttctgtgtacagtacatgaggcttgaagttagtgtgagagtgttgccataaaacattttatgaaaaaacaccttcccccaactgggaaaccggtatctctaagtgaatgtgtgttccatgcattgctcctgctgcacgctgtgtcacacactgacatttgtgccacttgctttcgtgtgcactagaagtcagaggacccgggaattagcctcagctctgtgttgcctagggctgttgtgaggatcacattatgtagcagtatatatcggtggctggcaaacattttatgtaaaggaccagaaagcaaatattttcagctttgcacagcttttcagctctgctgttgcagtacaaaaacagccatagacagtatataaatggtatgactgtattccagtaattatttatggacatggaattggaacttcatataatttgcacatgttacaatattattcttttgacttttttccccaaccaagtaaaaaaatataaaaaccattcttaggtctcagactgtacaaagataggcaacaggctggatttagtttataggctagagtttgctgacccctggtatgtatgaaagcacttggttatcagtaaaaattatccacatgtcatctgacatagcatcttgtgattaactgtgtttttatggttaagtgatcctatcttgagtgcaagttaggcagaagattttggaagcaaagctccgtgcctgtggggaaacagtttttggcatggctcactctctgttcttattgtttcttcctctggacaccagctcagcatggaagggatgactgttagcacgttcttgaggtccaaaaactttcagtgaggctgtggtttgacttcatcaggtgaatgcttatgtgtgcccgtgtgcgtgtcggcacatgcacacacacacatctgttcaaataagaggctcagtgttaaacgcagtgttggtcaggctctctcagtgatctgaacatgagatattatgattgtctttcctgagcacatatctttttacatagctctgcaaccttggtttaaaccaaatagctcataaattggcagtgcttggcattggatgtgttcatttattcattcatttagtggattcatttattgagcacctactaggagtcagacactctactaagcattgaggatacaaaactgagcgcatagaaaataactttgtatgtcacacctattgacttgaaatatcatttctgagactttcatacaggaaaactgatttaacaccaatatactcccaaaataacatgtaagcttcatgacatttacttcagaagcattctgtttgcatctctgtactttttatatgcacttatttttcttacatagctgttgaaaaatagtccacaaattatctgtgatctctaaagagacaccatttcttttatatgattattttcatttccttgactttataaaaagactctgcctcaggatagcactttagagtttacaaaggacttttggatgtgtcatttcatttaagtcactcaatagtcccgtactgttcccattttgcagttgactagaaaaatgaggcacagaaaacttggtaacttgctcctggtcatttgactaaaaagaggctgaacttgggatgttttttacctgggaactgcaaatgtttggggacagtgaccttctttcttgtggctgaagcaggcccaggaaaccccatttcagaccaagcctattatgacaggcctggcctactgagtcaagccctcagtggagcttgaggaacactgcacagccattaaagaattatatgatagaatatttaaagacgagaaaagcagttcatgctgtgttgttaggttaaaaaactatcagtcattatttatgatttgatctcatttttattttacagaaaaagagttacacaaaacagtttagtccagtcttttcaattgtacttaaactttatctccttggaggtttgtaaaaatacaggtacttgaacccatctccttgacagtcgtcctcaactgtattcctcttctgaaccatcaagtgcagaaagctgtttgactgacactcagtccttccaagaaagccaggaccgtgctaggtgtagcagagagaagttaccgtgttacatccagtgagggacttctgtacccagggccagtgagaaacaatgcgggatggtcccaggctgtttgtattgtgaaatcatgcagcctgggtaggaaagccatggttaaaataagatacaccacagtggtgacagtggctattactggatggtgaaatgatgggttgttttcttgttatttttttgctcatctcttttctaaatctcctacaatataatcattatttttaaaaacattagaacataagggtgaaagaaaaatgttggtgagagtccattttgctggatcaagtaggcagtaagatactccatgaatgatttttttttttttttttcgagacagagtctcactctatcacccaggctggagtgtggtggtgcggtctcggctcactgcagccttaaactcctggcttaagtgatcctcctgcctcggtctcacaaagcactgggattacaggtgtgagccaccgtgcctggctggaggattttttttttaactaagtctgtggttaactagccctcagaaggcttgctgaggtcagccctacaagcccatgaccctctccccctttgcagtaccacagcagcctggcttcactgaatgggctggaagtccacctgaaagagacgctgcccagggatgaggcagcctccacgagcagcacctacaacttcacacattacgaccgcattcagagcttgctgatgggtaagaaccagccaaggggcctggggcgacggggatgccagattctagatgggtggagatgagaacttgagccccagcatcatgatgacacggctgtgcacagagttgtctgacctgcgttcagggctctcttctcaccgggagcccagtcccactgagtgtggcgttcactgggcagacgcttctctgctcatgtgtctgtttttggcgtttcccagtgttttgagagaagttcatgttcacatatctgtgatagggtttgtctcagaatgttgagatccacacgcagaaaccgggtgctgcatcgcacagcggcggcagccgaagcccaatgccccgggcctttgtctctgccccgggcagccaactcatggccttgagccgtgctcagtccccgtgttcagtactgggcttcatggggtgggagggcagaaggtaactgtctgctcttcacaactctgtgtcctcttctggaagcaaacctgccgcaggtggccaccccgcaggatcgccgcttcctccaggccgtcagcctgatgcatagcgaatttgcccagctgcccgcgctttatgaaatgactgtcaggtgagcctccctgagtcgctccccaacctactctccacggtcctgctcatgggaaccacctgtggggcccaggcagcgccttattcctaagtagatgaaaaacattctagttactctccttaaggccttcctttgtcggttcctattgccgccatcatccactgttgtgcagtcacgtgccatggactttctggttcccttcctactttagacgcttggggtccagcagtgaaggaacctgaggtcctcaccatcatggagctacatccattactagggacggtggctccgtctccttgctagaaacagtgttgaaatattgttgtctttctaattacaaagtaatatggctgggcacagtggctcacacctgtaatctcagcactttgcgaggcagggggatcacttgaggtcagggttcaagaccagcctggccaacctggtgaaaccctgtctctactaaaaatacaaaaaattagctgggcagggtggtgggtgcctgtagtcccagctactcaggaggctgaggcaggagaatcacttgaacccgggtggcagaggttatagtgagctgagatcacaccattgcactccagcctgggcaacagagtgagactgcgtctcagaaaaaaaaaaaaaaaaaaaaaagtaatacgtgctgatcatacagtcatgcagaatgcttggaaatgtatcaagtaaaacattttcctctctcatctccatcacacaccaggaaataaccacattttacagtttggtatatattgctccaggttttattggtttttggtttttattttttgcacatataaattgtatttttaattattttaagtcttctagaaaataggattctactaatgtacaattttacagttgtcttttttcacattatgtcatagcttgaacacctccatgccagaagaaatattatgattattgtaatttacagtatttaaccaaccgaatttgtttttttctttctatatgcttctcttatgaaaccagaaagggagtttgggctttaaagatcactttataaaagcccgaggagactgggacctgagaatttggttgacaactggtaacagaaaataaagcaagttagcaggtcaagggcagtgctggcaatgtgtatattagtccacgtagtccttggaaccatctggtcaagggcattattttttatttatttattttgagatggagtctcactctcgccaggctggagtgcaggggctcagtctcggctcattgcaacctctgtctcctggtttcaagcaattcttctgcctcagcctcctgagtagctgggactacaggcacctgccaccatgcccagctaatttttgtatttttagtagagatagggtttcaccatgttggccaggatagtctcaatgttttgacctagtgatctgcccaccttggccttccaaagtgctgggattacaggcgtgagccaccacgcccggcttcaagggcattttttaaatcctcattttacagatgagaaaattgaagcacaaataggataagcagcttgcccagggttatattcttcttaagtggcagggccaggatttgaagcattttctccaactgttaagcacatgtatgacctttccacacacatttcagtgtcggggcagtgtggtccagtgtgaggggcatgggtggtggactgacagggagcctgggtgggtgattaggatggttctgattccctgtcacccgccacacttgagcgccaggtgttctgctgcctctcagcgtctccagccaatattccaatagatctttctgtcagaaatgtgtcttctctggctttaattcacagctgccccaggctggcaacccagaggcaacttgcatctacagtcactggtttgggaactggctgtgttgggggtgtgtgtgtctgttttgtgggaggtggaaacaagtaaaatgtcagcatctgctccaccaaccaccttgtggccctgcagtatgtcaccttccttagagctgagaggggtttagtgttgagacacatagctcaaggcatttgttgagagattatttcaataacagtaatagaaacaacagctaccatttctttttttttttaattttattattattataagttttagggtacatgtgctgtgcacaacgtgaggtgtgttacatatgtatacatttgccatgttggtgtgctgcacccattaactcgtcatttagcattaggtatatctcctaatgctatccctcccccctccccccaccctacaacaggccccagtgtgtgatgttccccttcctgtgtccatgtattctcattgttcaattcccacctatgagtgagaacatgtggtgtttggttttttgtccttgcaatagtttgctgagaatgatggtttccagtttcatccatgtccctacaaaggacatgaactcatcattttttatggctgcatagtattccatggtgtatatgtgccacattttcttaatccagtctatcgttgttggacatttaggttggttccaaatctttgctattgtgaatagtgccgctataaacatacgtgtgcatgtgtctttatagcagcatgatttataatcctttgggtatatacccagtaatgggttggctgggtcaaatggtatttctagttctagatccctgaggaatcgccacactgacttccacaatggttgaactagtttacagtcccaccaacagtgtaaaagtgttcctatttctccacatcctctccagcacctgttgtttcctgactttttaatgatcgccattctaactgatgtgagatggtatctcattgtggttttgatttgcattgctctgatggccagtgatgatgagcattttttcatgtgttttttggctgcataaatgtcttcttttgagaagtgtctgttcatatccttcgcccactttttgatggggttgtttgtttttttcttgtaaatttgtttgagttcattgtagattctggatattagccctttgtcagatgagtaggttgcgaaaattttctcccgttctgtaggttgcctgttcactctgatggtagtttcttttgctgtgcagaagctctttagtttaattagatcccatttgtcaattttggcttttgttgccattgcttttggtgttttagatgtgaagtccttggccatgcctatgtcctgaatggtattgcctaggttttcttctagggtttttatggttttaggtctaacatgtaagtctttaatccatcttgaattaatttttgtgtaaggtgtaaggaagggatccagtttcagctttctacatatgaacagctaccatttcttaaccactcacaatgtgttaagcactcacttaatctcattctttaaaacaaaacaaaacaaaaacaccaatgaggacacatactgttgcaacaaacactgtacagatgaaaaagctgggactcagaaatgttgaatagcagcccaggacacacactaggaagtaatagggctgggattagcacctgagtgtgtgtgactccagatccatgctcataaccatctggcctcggagccctcccacagggctgtgagaagagattgtcttgctgggccagtgggtgcaggagacactgaagcttggaatagggtgggatttttctcccttacagggaaggagagaattgagtgaggggagccttagcagtccctgactccaccctttctcactagatttgggggaaactgaggcccataatagttggagaggcaggatccagaaaccaggggggtttgtttaccttggcctggagttggctcctcccaggtggctccgcctctgtgtagtgccctcatccctccctctctgtgtccacaggcttcctgtcacttcgtgtcacatcccactcctgtccttcactccctctcagtctatccagccacccccagtgtggagagcagactagactcctttctcggacactgccattgcctcgtcatagaggcagggcagccccagctactcactctgagcctcagggtccttgtctgtgaaatgggaccataccaccactgcagagcttatgtgaggggcaaagcagagactgtatgcagagcacattgcatagctgccagtatgtcaaaaaagccagcactccacagttcctttatgcaatacttataactccaggatctgtggctgctgccactgtggatggtcccgccacggactcttccagcatctagtgagctgaaaggaaggaaagatggtattggcactgaagcctgaaactcagctgaagaaatagaattccgtgccatgacagctgcacatgccacattgggtgtcctgggtcctctgtgacaagaaccttactgaggtctctgtgtggtctgagattagcaccagcagcattggaccgttgccttctttcttcctccaacagaaatgcctccacggctgtgtacgcctgttgcaaccccatccaggagacatatttccagcagctggcacctgcagcacggagctccggcttcccaaaccctcaggatggcgccttcagcctctccggcaaagcaaagcagaagctgctgaagcacggggtgaacttgctctgaactgcacccaggaggtgactgggaaggagaaaaccagcaaaggaagctctgccttttataattgaaaaggcccctctattttatttttcttgaaaacattcccttttttaggaaccaaatgatatttgagtttttgttattccttttgcagattgggatgtgttttgggggcaggggttagttcttcaggtcggcagacccagagcacttgataaagaactgtatttaatcggtagtgttggggccgggacgggcttggctccctctctgccatactgagcctgaggtatttcatatctcctgctgttccatcccagcttgaattggtgccacaagcttccaagttggcattttttctagaacctgatcgtccactagcccagagtgtgtgtgttcaacccccacaccaggtggtggtaggcggtgtgactgcacagcgaggtgccggatctgtgagcaggccgactccactcccacgccgcaggtaggtttctccagtgcgctcttgctgggaggtccggatcgttcctgcagggaagcggcagcacacggagaccacttggttgaattctgttggaactctactcaaatctaggggcgtcttctttggacccacaatgggggcaagccttaataatatggaagggagtttgggctttagagatccctttataaaagctctgggggctgagccctgagaattcagtgacaacaggaccaacctgcgctgcctttgactacaagtgggccgtgcagctggttcctctcgagcgagtgtccctaaataggagtttacaagatgtctgggggtaaaagcactgtgcttttcagtggtggctgcgtgaaagggagcgacactcagctgtgtgttcctgggcttgtgtggtacttagaacctcagttctattacgttatagtcagacatttttttgacagtatgagacagactgcaggatgaaaatatttgtcaaaatcttaactgaatgtttactggaagtacttgagattccatttgagagttgtattgttaataatttcatgtcagtgaactgatatctgatgtttatgatatggtgtctttttcttgaaacaagcttccaagggctagaaataaaatagccaaaaaatgctggagttctgagtaattaaa

SEQ ID NO: 12440 - DNA, 4277 bp, Homo sapiens
ttgaatttcctgcgcttacagaatggttttatctaatttgtagctactggggttctttattctctggggccacctgaaggctttcaaacacagtaataagccctcctcgggctgggaaacaggaagctgtgttttaaatgccgtgatcactggattaaaggaaacatggctccactctgttctcttgccaggtggaattatttttttctttatgatggttccaaggtaaaggaagaaggcgatccaacaagagctggcatttgttacttttatccttcccagaccctgctagaccaacaggagttgctttgtggacagattgctggagttgtccgctgtgtttctgacatttctgactctcctcctactcttgttcgtctgagaaaactgaagtttgccataaaagttgatggagattacctttgggtgctgggctgtgctgtggagctccctgatgtcagctgcaagcggtttctggatcagctagttggattctttaatttttacaatggacctgtttccctagcttatgagaactgttctcaggaagaactgagcacggagtgggacaccttcatcgagcaaattctgaaaaacaccagtgatctgcataagattttcaattccctctggaacttggaccaaactaaaggacttctaggcccctgactccatacaaggaatgtggaactgaggcatatttccccgagtgaaagagcatgatgttttcattttatgtgatggaatagagtcatggaacctggtcagacatcaagccacctgtatcaccatggggattgtgcttcagaaggaaagtggaggatagggtggagcccctgttgttgctgaaggcagcccgcattctgcagacctgccagcgctcgcctcacattctcgctggctgcatcctctataaaggactgattgtcagcacccaactcccgccctccctcaccgccaaggtcctgcttcaccgaacagcacctcaggagcagagactccctacgggagaggatgccccgcaggaacatggtaagtagtgaggcgcatggttgcctcttgagaacggcggtcttttatgctacctacccctgtacaagttatgcgaaggaaaccaagccatctgcatgtttatttcctctgctcataataggaaaatggatgttatggagcttcaagaatcgagttacccaccagaaccctaatggtaaagctatgattttaggcatgctgtcaaatccctgctttcagaccctccttaacttcatattgtgagactgctcggtcaagtgccaggagattgtgattgggagagggtaaggcaaacagcgactgccagaaagaccttttgcaggatgtggaggcgtcctcaggagagttatttcgatttattctgaagcctgagttggagcagatccctttcttagcttatatcttcttcttgtaaaagtgcttttcaacctttctctcccgaacatcttccttctccaaagctgggagtcatgttgcctgcagggactctttccttactgggcccaggagttcgaggtgcagtttggcaacctgtgtcctggctgaggaatgcactcacagcacccctttccgagcccacgtgtgggttggatgcatcacgccagtgcagctattgccccgctgccctctctggctcaggggaaagtcctgttcatattgctttgcaattccaggagcggcattgcccccgaatgtccagattatccctgtttttgtgaccaaagaggaagccattagtctccacgagttcccggtggaacagatgacaaggtctctagcatctccagcaggactccaggatggttcagcccagcaccatccaaagggtgggagcacatctgccctgaaagaaaacgccactggccatgtggaatccatggcctggaccaccccagatcccacatcccctgacgaagcttgtccagatggcaggaaggagaacggatgcttgtctggccatgatctggagagcatcaggcccgcaggactgcacaactctgccaggggtgaggttcttggcctcagctcctccctggggaaggaactagtctttctccaagaagaactcgacttgtctgaaatccacattccagaggctcaggaagtggaaatggcctcaggtcattttgccttcctacatgtgcctgttccagatggcagggctccttactgcaaggcatctctcagcgcctccagcagcctggaacccacgcctcctgaggacacagccatcagcagcttgcgccctccctctgctcctgagatgctgacccagcatggagcccaagagcagctcgaagaccatcctggccatagcagccaagcccccattcccagagcagaccctctccccagaaggacccgcaggcccttgttattgcctcgcttagatccaggacagagaggaaacaagcttcccacgggggaacaaggcctggatgaggatgttgatggggtctgtgaaagccacgcagcccctggtctggaatgcagttcaggctcagcaaactgtcagggtgctggcccctctgcagatggaatcagctccaggctgacaccagcagagtcctgcatggggctcgtgaggatgaatctctacactcactgcgtcaaagggctggtgctgtccctgctggctgaggagccgctgctgggagacagcgcagccatagaggaagtgtaccacagcagcctggcttcactgaatgggctggaagtccacctgaaagagacgctgcccagggatgaggcagcctccacgagcagcacctacaacttcacacattacgaccgcattcagagcttgctgatggcaaacctgccgcaggtggccaccccgcaggatcgccgcttcctccaggccgtcagcctgatgcatagcgaatttgcccagctgcccgcgctttatgaaatgactgtcagaaatgcctccacggctgtgtacgcctgttgcaaccccatccaggagacatatttccagcagctggcacctgcagcacggagctccggcttcccaaaccctcaggatggcgccttcagcctctccggcaaagcaaagcagaagctgctgaagcacggggtgaacttgctctgaactgcacccaggaggtgactgggaaggagaaaaccagcaaaggaagctctgccttttataattgaaaaggcccctctattttatttttcttgaaaacattcccttttttaggaaccaaatgatatttgagtttttgttattccttttgcagattgggatgtgttttgggggcaggggttagttcttcaggtcggcagacccagagcacttgataaagaactgtatttaatcggtagtgttggggccgggacgggcttggctccctctctgccatactgagcctgaggtatttcatatctcctgctgttccatcccagcttgaattggtgccacaagcttccaagttggcattttttctagaacctgatcgtccactagcccagagtgtgtgtgttcaacccccacaccaggtggtggtaggcggtgtgactgcacagcgaggtgccggatctgtgagcaggccgactccactcccacgccgcaggtaggtttctccagtgcgctcttgctgggaggtccggatcgttcctgcagggaagcggcagcacacggagaccacttggttgaattctgttggaactctactcaaatctaggggcgtcttctttggacccacaatgggggcaagccttaataatatggaagggagtttgggctttagagatccctttataaaagctctgggggctgagccctgagaattcagtgacaacaggaccaacctgcgctgcctttgactacaagtgggccgtgcagctggttcctctcgagcgagtgtccctaaataggagtttacaagatgtctgggggtaaaagcactgtgcttttcagtggtggctgcgtgaaagggagcgacactcagctgtgtgttcctgggcttgtgtggtacttagaacctcagttctattacgttatagtcagacatttttttgacagtatgagacagactgcaggatgaaaatatttgtcaaaatcttaactgaatgtttactggaagtacttgagattccatttgagagttgtattgttaataatttcatgtcagtgaactgatatctgatgtttatgatatggtgtctttttcttgaaacaagcttccaagggctagaaataaaatagccaaaaaatgctggagttctgagtaattaaa

SEQ ID NO: 12441 - DNA, 6136 bp, Homo sapiens
cggcttgccaggagctggagggggaggtaggcggggcggcgcgtgacctaaggcctctctgccgcgcgcgcaggtacggggcagaagtcgcagagccaaggcactgatgtttgaactggaaacttcaaaacgtttaataagagtcttcaggatgggtttgaactagacaagctagaaatttctttagaacaccagctctagcatgcatctcccacttttggctttcctggagaggagcttgaagaggtggttctgcagacagccacagtgatacttaggaaaccagaggaatggatttgacttttctgctaggattctctgttatagtttctccctgagttgtaagaggcatggaaatatacatgaaactgaagaacctgcaaggaagggaagtggaactttccatgctgagtgaaaactaaccaagtggcagttgtgactgaaaacactgaaacctaccacgtccagattcactggattgggggatagaggaacggtcacagctagggagaaagaagtgataccggaaaagaaaacctaaatgaagagaatgaggatgactgcacagtagatggccacctctacctccacagaggcaaagtcagcctcgtggtggaattatttttttctttatgatggttccaaggtaaaggaagaaggcgatccaacaagagctggcatttgttacttttatccttcccagaccctgctagaccaacaggagttgctttgtggacagattgctggagttgtccgctgtgtttctgacatttctgactctcctcctactcttgttcgtctgagaaaactgaagtttgccataaaagttgatggagattacctttgggtgctgggctgtgctgtggagctccctgatgtcagctgcaagcggtttctggatcagctagttggattctttaatttttacaatggacctgtttccctagcttatgagaactgttctcaggaagaactgagcacggagtgggacaccttcatcgagcaaattctgaaaaacaccagtgatctgcataagattttcaattccctctggaacttggaccaaactaaagtggagcccctgttgttgctgaaggcagcccgcattctgcagacctgccagcgctcgcctcacattctcgctggctgcatcctctataaaggactgattgtcagcacccaactcccgccctccctcaccgccaaggtcctgcttcaccgaacagcacctcaggagcaggtattgtaaagtccacccacctggctggacagcatcccccagagcactggtcactgagcctgaggctggagggatcaggagcagaggccgtggagcagttgtttcacttggtcttgtcaggaccccaagtcctccaatgtcattctcctcagtagtgaagccattggtgaggctgaaagaaaatgttttcttccacgagctaggcctggatagttgttttttcttcaaaccaaggaaatcttggttgaattcgacttcccataagaatttgatgtctctttatgtcaaagagatgttagacttttcagagacagactgtaaaggatgtgtctttagaaagatttagggggttgggcacggtggttcacacctgtaatcccagcactttgggtggctgaggtgggcagatcacttgaggtgaggagttcaagaccagcctggccaacatgatgaaacccatctctatttaaaatacaaaaattagctgggtgtggtggtgcacacctgtaaatcccagctacttgggaggctgaggcaggagaatcgcttgaacctggcaggcagaggttgaggtgagctgagatcgcgccactgcactccagcctgggtagcaagagtgagactctgtctcaaaaaataaaaataaaaataaaaaaataaggaaaacaaactcttctaaaatacttccattttatatttatttaattgtttttatattgaaaaaaaagccatgcatgctcattgagaataaaattgcccatctttgaactgtacagggatagccactgccagcatctggcatatctccttccagtcctttttttgttttgtgtatgaagctgtggtttccagcgtatcatgaggctgtctttttacatgtattagtgaacaggcatgtaaaatgctggtagggctctattcagcctcctcagccactgtggctatgggtgtcaattcaagtagcctttctgggaaacactttgataatgagaacgttaaggatgccctttatttttttcctaataatttgacttctaggaatatatcttaaggaaataatgtaactgctgaaaaaaatttatactcaaaacttgatcacaacaagctttatgaaagtgaaaaatcagacaaaacttgaatgcttaaagtaggaggtggcaaattatggcctgtgggccacctgcctacaaatgaagttttatttggctgcttttgagctataatagcagaaccaagtaggtgggacagagaccatatgccctgcaaagccaaaaatatttactgtcttgtcttttgcacagaaagtttactaattactggtctaaggtaggtaaatgattaatttactcatatcacttaaaccttcataaaattttaatcagccgtttaaaatggccaaagatgttttagtggcaggaaatgcgtgttactgttttaagcagaaatatgaaattttatatagtgtggcctcaaaagtataaaaactgcataggcttaaggaaaaaatacccaatattaatagtactagcttggggatgagggattgtatgtgattttttttttcaacgctttgtctagagtaaattgaggttaggcttagtaatctaaaacatagttttttaaaaatcaccaaaaaaggaagaacaccatatcattctaagattgaaagtcattttggctagaagagcagttcttgtttggtttggttttgttttggtgggttcttttggaaccctcagattgaaacgagagatgttttcatttttgagaaaatcatcaggttttaggccctgattgtgaaccagaacaaacgagagattgggtatagcattttgtttaagtcaaatcctttatcgtgagagtcacagtattttgacatttttattataatggaatttatgtgaattctacatcagggctgtggcagatgtgactgtattctagaatatgagttccccaaaggtgtaaaagagaacaggaatcctcaattttattcccagaagggagagagactgagaaaatcagaacgtagagtgtgatgtgagtttgggtggagctgctgccttgcagcctgtgtgggcccaggttcttgcttcatcccagccatagtgggagccagcagcttgggggagcttctgttccatctgcttggctcttagcatgtggttgggacaagctttctgggcctggctaagttttatgaacagatggcacagcaaattcctgatggttaggtcaagaggagaatgtggtgcccagcgccaacttctgtgtgtgtttgttttcagagactccctacgggagaggatgccccgcaggaacatggagcggcattgcccccgaatgtccagattatccctgtttttgtgaccaaagaggaagccattagtctccacgagttcccggtggaacagatgacaaggtctctagcatctccagcaggactccaggatggttcagcccagcaccatccaaagggtgggagcacatctgccctgaaagaaaacgccactggccatgtggaatccatggcctggaccaccccagatcccacatcccctgacgaagcttgtccagatggcaggaaggagaacggatgcttgtctggccatgatctggagagcatcaggcccgcaggactgcacaactctgccaggggtgaggttcttggcctcagctcctccctggggaaggaactagtctttctccaagaagaactcgacttgtctgaaatccacattccagaggctcaggaagtggaaatggcctcaggtcattttgccttcctacatgtgcctgttccagatggcagggctccttactgcaaggcatctctcagcgcctccagcagcctggaacccacgcctcctgaggacacagccatcagcagcttgcgccctccctctgctcctgagatgctgacccagcatggagcccaagagcagctcgaagaccatcctggccatagcagccaagcccccattcccagagcagaccctctccccagaaggacccgcaggcccttgttattgcctcgcttagatccaggacagagaggaaacaagcttcccacgggggaacaaggcctggatgaggatgttgatggggtctgtgaaagccacgcagcccctggtctggaatgcagttcaggctcagcaaactgtcagggtgctggcccctctgcagatggaatcagctccaggctgacaccagcagagtcctgcatggggctcgtgaggatgaatctctacactcactgcgtcaaagggctggtgctgtccctgctggctgaggagccgctgctgggagacagcgcagccatagaggaagtgtaccacagcagcctggcttcactgaatgggctggaagtccacctgaaagagacgctgcccagggatgaggcagcctccacgagcagcacctacaacttcacacattacgaccgcattcagagcttgctgatggcaaacctgccgcaggtggccaccccgcaggatcgccgcttcctccaggccgtcagcctgatgcatagcgaatttgcccagctgcccgcgctttatgaaatgactgtcagaaatgcctccacggctgtgtacgcctgttgcaaccccatccaggagacatatttccagcagctggcacctgcagcacggagctccggcttcccaaaccctcaggatggcgccttcagcctctccggcaaagcaaagcagaagctgctgaagcacggggtgaacttgctctgaactgcacccaggaggtgactgggaaggagaaaaccagcaaaggaagctctgccttttataattgaaaaggcccctctattttatttttcttgaaaacattcccttttttaggaaccaaatgatatttgagtttttgttattccttttgcagattgggatgtgttttgggggcaggggttagttcttcaggtcggcagacccagagcacttgataaagaactgtatttaatcggtagtgttggggccgggacgggcttggctccctctctgccatactgagcctgaggtatttcatatctcctgctgttccatcccagcttgaattggtgccacaagcttccaagttggcattttttctagaacctgatcgtccactagcccagagtgtgtgtgttcaacccccacaccaggtggtggtaggcggtgtgactgcacagcgaggtgccggatctgtgagcaggccgactccactcccacgccgcaggtaggtttctccagtgcgctcttgctgggaggtccggatcgttcctgcagggaagcggcagcacacggagaccacttggttgaattctgttggaactctactcaaatctaggggcgtcttctttggacccacaatgggggcaagccttaataatatggaagggagtttgggctttagagatccctttataaaagctctgggggctgagccctgagaattcagtgacaacaggaccaacctgcgctgcctttgactacaagtgggccgtgcagctggttcctctcgagcgagtgtccctaaataggagtttacaagatgtctgggggtaaaagcactgtgcttttcagtggtggctgcgtgaaagggagcgacactcagctgtgtgttcctgggcttgtgtggtacttagaacctcagttctattacgttatagtcagacatttttttgacagtatgagacagactgcaggatgaaaatatttgtcaaaatcttaactgaatgtttactggaagtacttgagattccatttgagagttgtattgttaataatttcatgtcagtgaactgatatctgatgtttatgatatggtgtctttttcttgaaacaagcttccaagggctagaaataaaatagccaaaaaatgctggagttctgagtaattaaa

SEQ ID NO: 12442 - DNA, 1971 bp, Homo sapiens
aggagctggagggggaggtaggcggggcggcgcgtgacctaaggcctctctgccgcgcgcgcaggtacggggcagaagtcgcaggtacccagctgctgcccacatttctggtccagagtcccgaaccccgagcactgggatgcctggctactccggtgggtgggcggcgctcggagcgcggggataccgaggggcgggcccccagcttagagcgtgacccgaccccgcctaatccttaggcgttcgcccaccatttcccagtcccgtagagctggggccagacaccgcacagccctagtgctgttaccagtcgctgcctgcgccccgggggctgcgcccagcagcttcctggcccttttccagccattagcgtccgttttccagccctgctgccccactgaggccccttcccacagcagtatcaccagccccagccccgcgttgttactattacttcccaggctaccagatccttttctgctcatgttccgacgtctcttcctactccagggccattattggtctcttctggacctttcagagataagagaggacctcggtagtgtagggcccagtcctctgggaacaagggatggggagttttaggctgctgtccttggttccagtaacagagataccccctccacaggcacccaaatatgctccatagaatacaatgagtgtggtcctgtggaggcccaatccaaaatatctagagctgagaagagatagagattttacaggccgtcaaatattcaatgggggtcgtctctagagacttttaacaaactgtattgtgtacccacagattgcagaatggtgagcaaacatttgagaccatgttgctaaagcattaagcttggagaaagtgacagtaagaattagacaatagttttgaagtgaccaagaggttgtcacatggaagaattagaccttgttttgtgttttcctgcagagcgttatccagactagcgagtgggaggcagatgtaaaatctggaacgcagattttagtttgttggaaggagaaatgtaacatagtgaaccacgcatctctggagggtgtaaagcagagacagccaaggtaatttttggaaaagagtgcaggagagtagagtaaacgatgccagggttccttccgactctgaaattccgtgatacactgagctgtctttctcttgtggaagtttgaaagccatttgataaagttctcttcattttttagaaatttgccctgctctggaattctgcatgttcaggttacttttggactgtcaagatgacagttccttaatttgggttccattattaccacagcaactggtttatttgtatagctgtccacacctagagcattttcaccctgtcatttgattttatcttccgtgaagcttgtggtgtgtttcccttaactgttcgagaaactaaagcccttactctgaagtctctgcaagcctccctctttgattttgaagcatgattgtcaccctcacagaaagctcttttgaaatataccattcgtttaatcctgctgggtcacatgctctctcacgagttgctgaaatatctattccttgtgtttatttcagagccaaggcactgatgtttgaactggaaacttcaaaacgtttaataagagtcttcaggatgggtttgaactagacaagctagaaatttctttagaacaccagctctagcatgcatctcccacttttggctttcctggagaggagcttgaagaggtggttctgcagacagccacagtgatacttaggaaaccagaggaatggatttgacttttctgctaggattctctgttatagtttctccctgagttgtaagaggcatggaaatatacatgaaactgaagaacctgcaaggaagggaagtggaactttccatgctgagtgaaaactaaccaagtggcagttgtgactgaaaacactgaaacctaccacgtccagattcactg

SEQ ID NO: 12443 - DNA, 575 bp, Homo sapiens
aggagctggagggggaggtaggcggggcggcgcgtgacctaaggcctctctgccgcgcgcgcagagcgttatccagactagcgagtgggaggcagatgtaaaatctggaacgcagattttagtttgttggaaggagaaatgtaacatagtgaaccacgcatctctggagggtgtaaagcagagacagccaagagccaaggcactgatgtttgaactggaaacttcaaaacgtttaataagagtcttcaggatgggtttgaactagacaagctagaaatttctttagaacaccagctctagcatgcatctcccacttttggctttcctggagaggagcttgaagaggtggttctgcagacagccacagtgatacttaggaaaccagaggaatggatttgacttttctgctaggattctctgttatagtttctccctgagttgtaagaggcatggaaatatacatgaaactgaagaacctgcaaggaagggaagtggaactttccatgctgagtgaaaactaaccaagtggcagttgtgactgaaaacactgaaacctaccacgtccagattcactg

SEQ ID NO: 12444 - DNA, 2002 bp, Homo sapiens
ggcttgccaggagctggagggggaggtaggcggggcggcgcgtgacctaaggcctctctgccgcgcgcgcaggtacggggcagaagtcgcaggtacccagctgctgcccacatttctggtccagagtcccgaaccccgagcactgggatgcctggctactccggtgggtgggcggcgctcggagcgcggggataccgaggggcgggcccccagcttagagcgtgacccgaccccgcctaatccttaggcgttcgcccaccatttcccagtcccgtagagctggggccagacaccgcacagccctagtgctgttaccagtcgctgcctgcgccccgggggctgcgcccagcagcttcctggcccttttccagccattagcgtccgttttccagccctgctgccccactgaggccccttcccacagcagtatcaccagccccagccccgcgttgttactattacttcccaggctaccagatccttttctgctcatgttccgacgtctcttcctactccagggccattattggtctcttctggacctttcagagataagagaggacctcggtagtgtagggcccagtcctctgggaacaagggatggggagttttaggctgctgtccttggttccagtaacagagataccccctccacaggcacccaaatatgctccatagaatacaatgagtgtggtcctgtggaggcccaatccaaaatatctagagctgagaagagatagagattttacaggccgtcaaatattcaatgggggtcgtctctagagacttttaacaaactgtattgtgtacccacagattgcagaatggtgagcaaacatttgagaccatgttgctaaagcattaagcttggagaaagtgacagtaagaattagacaatagttttgaagtgaccaagaggttgtcacatggaagaattagaccttgttttgtgttttcctgcagagcgttatccagactagcgagtgggaggcagatgtaaaatctggaacgcagattttagtttgttggaaggagaaatgtaacatagtgaaccacgcatctctggagggtgtaaagcagagacagccaaggtaatttttggaaaagagtgcaggagagtagagtaaacgatgccagggttccttccgactctgaaattccgtgatacactgagctgtctttctcttgtggaagtttgaaagccatttgataaagttctcttcattttttagaaatttgccctgctctggaattctgcatgttcaggttacttttggactgtcaagatgacagttccttaatttgggttccattattaccacagcaactggtttatttgtatagctgtccacacctagagcattttcaccctgtcatttgattttatcttccgtgaagcttgtggtgtgtttcccttaactgttcgagaaactaaagcccttactctgaagtctctgcaagcctccctctttgattttgaagcatgattgtcaccctcacagaaagctcttttgaaatataccattcgtttaatcctgctgggtcacatgctctctcacgagttgctgaaatatctattccttgtgtttatttcagagccaaggcactgatgtttgaactggaaacttcaaaacgtttaataagagtcttcaggatgggtttgaactagacaagctagaaatttctttagaacaccagctctagcatgcatctcccacttttggctttcctggagaggagcttgaagaggtggttctgcagacagccacagtgatacttaggaaaccagaggaatggatttgacttttctgctaggattctctgttatagtttctccctgagttgtaagaggcatggaaatatacatgaaactgaagaacctgcaaggaagggaagtggaactttccatgctgagtgaaaactaaccaagtggcagttgtgactgaaaacactgaaacctaccacgtccagattcactggattgggggatagaggaacggtc

SEQ ID NO: 12445 - DNA, 697 bp, Homo sapiens
ggcttgccaggagctggagggggaggtaggcggggcggcgcgtgacctaaggcctctctgccgcgcgcgcaggtacggggcagaagtcgcaggtacccagctgctgcccacatttctggtccagagtcccgaaccccgagcactgggatgcctggctactccgagcgttatccagactagcgagtgggaggcagatgtaaaatctggaacgcagattttagtttgttggaaggagaaatgtaacatagtgaaccacgcatctctggagggtgtaaagcagagacagccaagagccaaggcactgatgtttgaactggaaacttcaaaacgtttaataagagtcttcaggatgggtttgaactagacaagctagaaatttctttagaacaccagctctagcatgcatctcccacttttggctttcctggagaggagcttgaagaggtggttctgcagacagccacagtgatacttaggaaaccagaggaatggatttgacttttctgctaggattctctgttatagtttctccctgagttgtaagaggcatggaaatatacatgaaactgaagaacctgcaaggaagggaagtggaactttccatgctgagtgaaaactaaccaagtggcagttgtgactgaaaacactgaaacctaccacgtccagattcactggattgggggatagaggaacggtc

SEQ ID NO: 12446 - DNA, 4042 bp, Homo sapiens
aaatgccgtgatcactggattaaaggaaacatggctccactctgttctcttgccaggtggaattatttttttctttatgatggttccaaggtaaaggaagaaggcgatccaacaagagctggcatttgttacttttatccttcccaggtaagccacacagcattttattgttcagtgaggatcccagtgcctccaagtggtgacttttcaaaagtatggggtttacattaggacagtttggctaatccagacaatgacatttctactgtcttattcttagttgtactatttcttgttgttctggtcttaaaatttccaggcagctcggcactttcatcgtctttagctttctatttccatcatgatttttgtctgcctccctctacccccaattttttgatcagcttggtttttaaaagttattattctgctgggcacggtagtttatgcctgcagtcccagctctttggcaggctgaggtggatggatcacctgaggtcaggagtttgagaccagcctggccagcatgatgaaaccctgtctctactaaaaatcccaaaattagctgggcgtggtggcacgctcctgtaatcccagctacttgggaggctgaggcacgagaatcgcttgaatccaggaggcagagttgcagtgagcagagactgcgccattgcacaccagcctgggcaataagagtgaaactccatctcaaaaaaaataaataaataagtttgtattcaaacatatacaaaaacagagaggcaagtatcatgaaccctcatatgccatcagtagcttcaacaattatcaatactttgccgatttttttttttttttttttgtgatggaggctcactctgtcacccagggtggagtgcagtggcatgatctctgctcactgcatgctccacctcccgggttcatgccattctcctgcctcaacctcccgagtagttgggactacagtcgcccgctaccacgcccggctaatttttgtatttttagtagggacggggttttaccatgttagccaggatggtctcgatctcctgacctcgtgatccacccacctcagcctcccaaagtgcagggattacaggcgtgagccaccacgcccggcaatactttgccaattttatgtgacctatctgaacctcttcttctctctcttttttttttcctggagcaaattctagatgttgcgtcatctcaccagtatcaagcaacatctctaactgaaaagggcattattttgaacattaccacacctaacgaaagttacagtaattagtaacagtaattccttaatattacctgatacccagactgtattcaaattttgccttattgtcttggatattacttattctgctcttccttccttccatgcacccatacttccatccttccatttctttttctttttcctaataaggatccaaacagcatccacatattctatttggttattttgtattttaagtccttttaataacagtcctcacccagccactcatctttttccccctcctctatgccattgaattattgaagaaaccaggtcatatgtgtagtagagtgttagaatgtcccacactctagatttggctgatttgttcctcatggtggtgtcatttaatgtctcctatccactgtatttcctttacattagtagtaagatctagagtcttggtgaggttcaagctcagttttctaggtaagaattcttcatgggtggtgtatacatttcctgtgtatcccatactgtctggctgtcctgtgcgttagttaaggctaaggttgattaggagattctgtacattccctcctgtgactgtgctctgacatggatagttggggttaatctgcatccctctggccactccgtatgggggatttgagtaggagtgaaaggctcatgcttctgctaagcatatgcctataatcctagcaacagaaatgcggttctgtgcagtcatcgcatgtgttcctgctgggtgttctcttagggttcagtcatctcaggtaggggttggcaaactttgtaaagggccagaaagtaaatattttaggctttgcaaggcacataaggtttcaatcacatgttcttctttgttgtaacctttaaaaagtataagaaccattcttagcttacaggccataggaaaacgggtaacagactggatttggcttgcaggctttagtatgctgtaagaaatgacttaagagttcaagaatttcagcttcctatctggaatgtgctcctttcccacagaccctgctagaccaacaggagttgctttgtggacagattgctggagttgtccgctgtgtttctgacatttctgactctcctcctactcttgttcgtctgagaaaactgaagtttgccataaaagttgatggagattacctttgggtaagttgaatggcagaatcagtgctgaagtgttgcaatgataagtttaggaagttatgttgtttctgagtcttgaatttagaattatctgcccccaccaacctcatccatgtactgtgtttagtaatcaccctcgcttcctgtggtactctctgcaggttttcatcatcaagtgctttccaaaacatttctaacatattctgcattgcacacagctggtttctcctttcctttcaaagacttaggccaacttgtggaaattctgtttactctgtgttgtaaattgagtttttatcatcatcttttcttctccatgctctctacacttactgggtaagtgacccagaaaaaaatgatagatatatgttaggttttagagaacccattaaaaaaaaaaaaagaatattgcttgagtccaggagttcgatatcagcctgggcaacatagtaagacccccgtctctataaaaaatttaaaaattaaccgggtgtggtggctcatgtctgtggtcttagctactggggaggctgaggggaggattgcttgagcttaggagtttcaggctgcagtgagccatgattgccactgcacgctagcctaggcaacagagtgacaccctgtcttaaaaaaaaaaaaagaataaaaatcattcctttacattctaatagtagcatataatctaaagtgctgtttcccatggctacatttattttaaggcttcctgaggtaaagggatgcttaagtgtgggatgctatattcaactttgtaggtattatttccaacattttattacgaaaattttttaaagtactgaacagttgaattttacagtgaatactcatatacctcctcaattctacagttagcattttattatagttgttttattacctatctattcattcctttatcctcccattaattcaaattatttttattttattttattgagacagggtctcaatctgttgctcaggctggagtgctgaggtgtgaccttggtttactgcaacctccgcctcccaggctcaaacgatcctcccatctcagcctcctgagttgctaggaccacaggcatgcaccaccatgcccggctaattttttaaactttttctagaggcagggtttcaccatgttgctcaggctggtcttgaactcctcagctcaaggaatcctcccgccttggcctcccaaagtgctgggattacaggcgcgagacactgtaacccagccccaaattattttgttacagttttcaaagtaagttgcacacattagtgtactctccacacagatactctctctatcatgcatatcatcaactaaaatttaatgtttggggctgagcgctgtggctcaggcctgtaatcccagcactttgggaggccaagacagtcggatcacctgaggtcaggaattcaagaccagcctgaccaacatggagaaaccctgtctgtactaaaaatacaaaattagccaggtgtggtggcacatgcctgtaatcccagctactcgggaggctgaggcaggagactctcttgaacctgggaggcagaggttacagtgagctgagatcgcgccattgcactccagcctgggcaacaaaagcgaaactccatctc

SEQ ID NO: 12447 - DNA, 1914 bp, Homo sapiens
aaatgccgtgatcactggattaaaggaaacatggctccactctgttctcttgccaggtggaattatttttttctttatgatggttccaaggtaaaggaagaaggcgatccaacaagagctggcatttgttacttttatccttcccagaccctgctagaccaacaggagttgctttgtggacagattgctggagttgtccgctgtgtttctgacatttctgactctcctcctactcttgttcgtctgagaaaactgaagtttgccataaaagttgatggagattacctttgggtaagttgaatggcagaatcagtgctgaagtgttgcaatgataagtttaggaagttatgttgtttctgagtcttgaatttagaattatctgcccccaccaacctcatccatgtactgtgtttagtaatcaccctcgcttcctgtggtactctctgcaggttttcatcatcaagtgctttccaaaacatttctaacatattctgcattgcacacagctggtttctcctttcctttcaaagacttaggccaacttgtggaaattctgtttactctgtgttgtaaattgagtttttatcatcatcttttcttctccatgctctctacacttactgggtaagtgacccagaaaaaaatgatagatatatgttaggttttagagaacccattaaaaaaaaaaaaagaatattgcttgagtccaggagttcgatatcagcctgggcaacatagtaagacccccgtctctataaaaaatttaaaaattaaccgggtgtggtggctcatgtctgtggtcttagctactggggaggctgaggggaggattgcttgagcttaggagtttcaggctgcagtgagccatgattgccactgcacgctagcctaggcaacagagtgacaccctgtcttaaaaaaaaaaaaagaataaaaatcattcctttacattctaatagtagcatataatctaaagtgctgtttcccatggctacatttattttaaggcttcctgaggtaaagggatgcttaagtgtgggatgctatattcaactttgtaggtattatttccaacattttattacgaaaattttttaaagtactgaacagttgaattttacagtgaatactcatatacctcctcaattctacagttagcattttattatagttgttttattacctatctattcattcctttatcctcccattaattcaaattatttttattttattttattgagacagggtctcaatctgttgctcaggctggagtgctgaggtgtgaccttggtttactgcaacctccgcctcccaggctcaaacgatcctcccatctcagcctcctgagttgctaggaccacaggcatgcaccaccatgcccggctaattttttaaactttttctagaggcagggtttcaccatgttgctcaggctggtcttgaactcctcagctcaaggaatcctcccgccttggcctcccaaagtgctgggattacaggcgcgagacactgtaacccagccccaaattattttgttacagttttcaaagtaagttgcacacattagtgtactctccacacagatactctctctatcatgcatatcatcaactaaaatttaatgtttggggctgagcgctgtggctcaggcctgtaatcccagcactttgggaggccaagacagtcggatcacctgaggtcaggaattcaagaccagcctgaccaacatggagaaaccctgtctgtactaaaaatacaaaattagccaggtgtggtggcacatgcctgtaatcccagctactcgggaggctgaggcaggagactctcttgaacctgggaggcagaggttacagtgagctgagatcgcgccattgcactccagcctgggcaacaaaagcgaaactccatctc

SEQ ID NO: 12448 - DNA, 6846 bp, Homo sapiens
ggcttgccaggagctggagggggaggtaggcggggcggcgcgtgacctaaggcctctctgccgcgcgcgcaggtacggggcagaagtcgcaggtacccagctgctgcccacatttctggtccagagtcccgaaccccgagcactgggatgcctggctactccggtgggtgggcggcgctcggagcgcggggataccgaggggcgggcccccagcttagagcgtgacccgaccccgcctaatccttaggcgttcgcccaccatttcccagtcccgtagagctggggccagacaccgcacagccctagtgctgttaccagtcgctgcctgcgccccgggggctgcgcccagcagcttcctggcccttttccagccattagcgtccgttttccagccctgctgccccactgaggccccttcccacagcagtatcaccagccccagccccgcgttgttactattacttcccaggctaccagatccttttctgctcatgttccgacgtctcttcctactccagggccattattggtctcttctggacctttcagagataagagaggacctcggtagtgtagggcccagtcctctgggaacaagggatggggagttttaggctgctgtccttggttccagtaacagagataccccctccacaggcacccaaatatgctccatagaatacaatgagtgtggtcctgtggaggcccaatccaaaatatctagagctgagaagagatagagattttacaggccgtcaaatattcaatgggggtcgtctctagagacttttaacaaactgtattgtgtacccacagattgcagaatggtgagcaaacatttgagaccatgttgctaaagcattaagcttggagaaagtgacagtaagaattagacaatagttttgaagtgaccaagaggttgtcacatggaagaattagaccttgttttgtgttttcctgcagagcgttatccagactagcgagtgggaggcagatgtaaaatctggaacgcagattttagtttgttggaaggagaaatgtaacatagtgaaccacgcatctctggagggtgtaaagcagagacagccaaggtaatttttggaaaagagtgcaggagagtagagtaaacgatgccagggttccttccgactctgaaattccgtgatacactgagctgtctttctcttgtggaagtttgaaagccatttgataaagttctcttcattttttagaaatttgccctgctctggaattctgcatgttcaggttacttttggactgtcaagatgacagttccttaatttgggttccattattaccacagcaactggtttatttgtatagctgtccacacctagagcattttcaccctgtcatttgattttatcttccgtgaagcttgtggtgtgtttcccttaactgttcgagaaactaaagcccttactctgaagtctctgcaagcctccctctttgattttgaagcatgattgtcaccctcacagaaagctcttttgaaatataccattcgtttaatcctgctgggtcacatgctctctcacgagttgctgaaatatctattccttgtgtttatttcagagccaaggcactgatgtttgaactggaaacttcaaaacgtttaataagagtcttcaggatgggtttgaactagacaagctagaaatttctttagaacaccagctctagcatgcatctcccacttttggctttcctggagaggagcttgaagaggtggttctgcagacagccacagtgatacttaggaaaccagaggaatggatttgacttttctgctaggattctctgttatagtttctccctgagttgtaagaggcatggaaatatacatgaaactgaagaacctgcaaggaagggaagtggaactttccatgctgagtgaaaactaaccaagtggcagttgtgactgaaaacactgaaacctaccacgtccagattcactggattgggggatagaggaacggtcacagctagggagaaagaagtgataccggaaaagaaaacctaaatgaagagaatgaggatgactgcacagtagatggccacctctacctccacagaggcaaagtcagcctcgtggtgagtaacaaggcctgccatggcatagcttttgctgggctgttggttagagttttggggttaattgaaaatccccagccagattgtgttaattttattaacataacaataaaaatgccattttcctcagagcagctgaatcaagcacgtgagccatcgctctccaaagctaacatgttttaaccttgcaagcctctcccaatgtttgaatgagtctggcattgctgggagattgtagaaaagatagccacagcctgatcatgcagcgagctttgatgataatgtgaatattgtagtcttcaatttgcagagatgaggtatggttgcatttgagaattacagcatgaggagaggtctggccagactgggtatcaaggggtattactcaatgtctgtctgaaacccagttcccttctcaaccctaaatgcgttaatcctttcccataattaggtttagcaaacatcagtcatagaggagatgaaggtgaaaagcaggtttagctagaattagcaggatttagtgactgattatttatgtggaagtcaaaaagatggagcagttcaaaatgacacccaagttttctttcgtgtgcccgcacaagcagggatgctttcatcaagagaacgtggggacaggggaggatggggtgcacatggagtttctgagttggctttgaaacttttttgaggctttttgatctgagcttaccctgcagccagttgtacatccagccttaggtattgggaaagaggacagtgccaagagaccaagttggtgctttatttatttgtttgtttgtttttgagacagggtcttgctctatcctccaggccagagtgcagtggcatgatctcaggtcactgtagcctcaatcccccaggctcaagtgatcctcctacctcagcatcccaagtaactggaaccagaggcacaccccaccatgcctggctaattttgtctgttttttgtggagatggggtttcacggtgttgcccaggctaatctcgaactcctaagctcaagcagtcctcctacctaggcctctcaaagtgctgggattataggtgtgagccactgtgcccagccaagttggtgctttttcatcaggaaggcagggtgggagccatggagggaggcttcagagagggcatagatccagggaagagagcagatgacacattggtcccattgcttgtttatgctatagcctcataaatgtgttctcagagacttagaagtaaaacaggtccagccaggctcagtagctcacacctgtaattccagcactttgggaggccagggcaggattatttgagtccaggaatttgagaccagcctgggcaatatagtgagactcgtttctataaaaaatttaaaaaaaaatagccgagcatgatggcacactcctgtagtcccatctacttgggaggctgaggcgggaggatggcttgagcctgggagattgagtttgcactgaaccgcaatcgcaccactgcactccagcctacagggctacaaagtgagaccctgtaaaaacaaaacaaaattgaggcctggcctttgaggtgtttgttttatggtcttaaagaggtaatcagataataacattacgtaatatagttatactgcagtgtagtctgtaagagtctttgaggaagaacagagggtcatggaaattcagaacaaagagatatctctgggccgagggaatcaggagacggttaatgaggaagtgtgcttgaatgatacttggtgaggtttggcatggtagagaggagttcagagtttctctgtaaattctcataggcccctgttttttccctgttacgaacttttggactcactatcctgcattgaaactgcgtgtttgctcagcaaccgcggagcacactgtgggccctcagtaaatgtttaagtgaatgcatgaattcctggtagaagggctgtttctggaaatctttgtgctcagcacttatgaggagtgcatctaatacatccctaacttattttgttatcagagccttaaaagacagcgtatcagaccatgtggttgtatagttaaggttcagtgtttcaaataagagcagtcattgtgggcgcctcgtttttttttctagctactcgtgtcttctccggcagatggtctaacggctggatagaggcatatttttagtttgaatttcctgcgcttacagaatggttttatctaatttgtagctactggggttctttattctctggggccacctgaaggctttcaaacacagtaataagccctcctcgggctgggaaacaggaagctgtgttttaaatgccgtgatcactggattaaaggaaacatggctccactctgttctcttgccaggtggaattatttttttctttatgatggttccaaggtaaaggaagaaggcgatccaacaagagctggcatttgttacttttatccttcccaggtaagccacacagcattttattgttcagtgaggatcccagtgcctccaagtggtgacttttcaaaagtatggggtttacattaggacagtttggctaatccagacaatgacatttctactgtcttattcttagttgtactatttcttgttgttctggtcttaaaatttccaggcagctcggcactttcatcgtctttagctttctatttccatcatgatttttgtctgcctccctctacccccaattttttgatcagcttggtttttaaaagttattattctgctgggcacggtagtttatgcctgcagtcccagctctttggcaggctgaggtggatggatcacctgaggtcaggagtttgagaccagcctggccagcatgatgaaaccctgtctctactaaaaatcccaaaattagctgggcgtggtggcacgctcctgtaatcccagctacttgggaggctgaggcacgagaatcgcttgaatccaggaggcagagttgcagtgagcagagactgcgccattgcacaccagcctgggcaataagagtgaaactccatctcaaaaaaaataaataaataagtttgtattcaaacatatacaaaaacagagaggcaagtatcatgaaccctcatatgccatcagtagcttcaacaattatcaatactttgccgatttttttttttttttttttgtgatggaggctcactctgtcacccagggtggagtgcagtggcatgatctctgctcactgcatgctccacctcccgggttcatgccattctcctgcctcaacctcccgagtagttgggactacagtcgcccgctaccacgcccggctaatttttgtatttttagtagggacggggttttaccatgttagccaggatggtctcgatctcctgacctcgtgatccacccacctcagcctcccaaagtgcagggattacaggcgtgagccaccacgcccggcaatactttgccaattttatgtgacctatctgaacctcttcttctctctcttttttttttcctggagcaaattctagatgttgcgtcatctcaccagtatcaagcaacatctctaactgaaaagggcattattttgaacattaccacacctaacgaaagttacagtaattagtaacagtaattccttaatattacctgatacccagactgtattcaaattttgccttattgtcttggatattacttattctgctcttccttccttccatgcacccatacttccatccttccatttctttttctttttcctaataaggatccaaacagcatccacatattctatttggttattttgtattttaagtccttttaataacagtcctcacccagccactcatctttttccccctcctctatgccattgaattattgaagaaaccaggtcatatgtgtagtagagtgttagaatgtcccacactctagatttggctgatttgttcctcatggtggtgtcatttaatgtctcctatccactgtatttcctttacattagtagtaagatctagagtcttggtgaggttcaagctcagttttctaggtaagaattcttcatgggtggtgtatacatttcctgtgtatcccatactgtctggctgtcctgtgcgttagttaaggctaaggttgattaggagattctgtacattccctcctgtgactgtgctctgacatggatagttggggttaatctgcatccctctggccactccgtatgggggatttgagtaggagtgaaaggctcatgcttctgctaagcatatgcctataatcctagcaacagaaatgcggttctgtgcagtcatcgcatgtgttcctgctgggtgttctcttagggttcagtcatctcaggtaggggttggcaaactttgtaaagggccagaaagtaaatattttaggctttgcaaggcacataaggtttcaatcacatgttcttctttgttgtaacctttaaaaagtataagaaccattcttagcttacaggccataggaaaacgggtaacagactggatttggcttgcaggctttagtatgctgtaagaaatgacttaagagttcaagaatttcagcttcctatctggaatgtgctcctttcccacagaccctgctagaccaacaggagttgctttgtggacagattgctggagttgtccgctgtgtttctgacatttctgactctcctcctactcttgttcgtctgagaaaactgaagtttgccataaaagttgatggagattacctttgggt

SEQ ID NO: 12449 - DNA, 737 bp, Homo sapiens
ggcttgccaggagctggagggggaggtaggcggggcggcgcgtgacctaaggcctctctgccgcgcgcgcagagccaaggcactgatgtttgaactggaaacttcaaaacgtttaataagagtcttcaggatgggtttgaactagacaagctagaaatttctttagaacaccagctctagcatgcatctcccacttttggctttcctggagaggagcttgaagaggtggttctgcagacagccacagtgatacttaggaaaccagaggaatggatttgacttttctgctaggattctctgttatagtttctccctgagttgtaagaggcatggaaatatacatgaaactgaagaacctgcaaggaagggaagtggaactttccatgctgagtgaaaactaaccaagtggcagttgtgactgaaaacactgaaacctaccacgtccagattcactggattgggggatagaggaacggtcacagctagggagaaagaagtgataccggaaaagaaaacctaaatgaagagaatgaggatgactgcacagtagatggccacctctacctccacagaggcaaagtcagcctcgtgaccctgctagaccaacaggagttgctttgtggacagattgctggagttgtccgctgtgtttctgacatttctgactctcctcctactcttgttcgtctgagaaaactgaagtttgccataaaagttgatggagattacctttgggt

SEQ ID NO: 12450 - DNA, 19305 bp, Homo sapiens
tctctttacaggtgctgggctgtgctgtggagctccctgatgtcagctgcaagcggtttctggatcagctagttggattctttaatttttacaatggacctgtttccctagcttatgaggtacaagtatggggttgaggagtcttacattgggcctctttataaaaaccggtattgccagaatgcagcacttactctggggtcttgtatacttcatataaacacattgtgtctggggacaaggtcaggagctcttggaggcccctcatatgcctttgggcctagtggcataggtcacatttattccaaatgtttatccccatctcctccctgggatgtttagaaagcgcaggccctgcttgccacccccacgcggcaggcgccgtggatctgtgatgggataggtttaaaacaggtcctcccttccggtcagtttcctgtgtgaggaacaatttttgaggtagttgggactctggccaaagaatctgtccctcaaaatctcagatattgacctgaggctctttctgttttagaactgttctcaggaagaactgagcacggagtgggacaccttcatcgagcaaattctgaaaaacaccagtgatctgcataagattttcaattccctctggaacttggaccaaactaaagtaacattttcatcctccttattcattttatatgtaagactagggcttctggatacttttttaatattcctgaagtgaactatatctggaaaagtgagtagaatgtcacttctcaggcagggccatgacacggcaggtcacctctcagcctcatttcccttatccaaagaatggtgtcagcatacctgccttcttgaactgttttgatgatcaagtgaagcagtacctcaaatgacaccaagtaaatgctcagtaaagggaattagtattttgttcatgcctcagaagtgttgaactcagtaatctgaaggccgcctctcttgatattcatatcatatgatctagttattctcagcatcaaaaatgcccagcatgaacatttcaaaaacaaggttgctgtctttgagagagaatggttgggaactgtttttgtatctctgagccgctccgtttgcggttggcactcagtgaaacctaggctgcttgtgtggctggcctgaccacctgtgctgccccattaagagccagctacctgagccctgactcacagccctctcctgtgtctcactgcgatagtaaataatgtccctgtagcaggggtgtagcactgtggctcagccttcacagagcatgactccaccagacatggggaagggttttccctgctccagtctggaaaacttcctgtagctggccccagagctttatagaatggctggctgggatggcacagtcttgaggctatgaagaataaacttcttaatgtgtcagcagctccggaggctccattaacactagttctaacagctggtggatacttgctggttctagctggcaggtggaagtctgaggaggctgctggttattgctggctcttcctgaccaggtccagatgcttttcttgtatttttagggacttctaggcccctgactccatacaaggaatgtggaactgaggcatatttccccgagtgaaagagcatgatgttttcattttatgtgatggaatagagtcatggaacctggtcagacatcaagccacctgtatcaccatggggattgtgcttcagaaggaaagtggaggatagggtaggtgggtttcacctggtaccatgacatgtatttataggatacaccctcctcttctgctgccgtgaggtcttagcattgtcagggtagacagtcggtctcccaggccatctactttgacccctttgaatagccatatgccatatttgctgcaccttctagcttctggacaggcctccttgttctaagaatttggcatttagtggtgtcagcagttctgagtatagagaggtagaatagtcccaagccatggcacagctttcactgtgtgacacattctccttttccaggctttgagctacaccctgtccagctgttctgtacaaccctttccccttttctcccttcctgattgtgagcatgctgatgggtgggcatgatgcctcttgccctgcacaggtggagcccctgttgttgctgaaggcagcccgcattctgcagacctgccagcgctcgcctcacattctcgctggctgcatcctctataaaggactgtgagtaactccagacccctttcttccagccccattcccttgctgcacaactgaccatcagccacctccagatcacagtggggagcccagtctctggccagttccaagtgggctggttcggcaaatatcaggtagtttagatttgactcagtttagaaagacaggtgtgtacctgtctttgagcaaagctgagaaattggaaatagttgtgttcagaaaagagttaagaatgtccctataattctcagtatggggcatgctggaatagttgtcagtctgcaaaatgctaatgcagagtcccgagcgttgccagcagccagcactgtagtcaagaggcatggaaggggcctgctgtgaccctcctcctgctgcccagagaccctggtgtgcttgcctcagctcagctctgcaaagcagccttacaggcccttatccagctgccttcaagcctcttggctgggccagtgtcttggttggcctctgagaattcacttcacttcttcatgtagttggagggcttcttggtgaatctgagtgcccaagagccactctaggtcatctaaggcctctctcctcatggagggtttgctgtcacagcccagggcaggcagggccattgcgctgtgcccggagcttcctgaggagcaggcaactactgtgtaaatggagaagcactgaggctctcgcaggggcccttgggccagacaggctcggccccagatcctcccttctttcgccagccatgcggccttgggcaagttgcttagcctcaattttctcttctgggaaatagacatcccttgtgaagaatgaaatgagatgacagatgcggaagaaccgagcatagaccctggtgggctttgcactcttcttccttgccccggttcttatcatgatggttctgaatcagctgtgggatttccaagttcgtcagtgacatacccaccaaagacagtattttttttccccttttctcattttgcatttcttaaatgtatatatatatatttttttttcttttttttttttttgtagggacgaggtcttgctatgttgcccaggctggtctcaaacacctggcttcaagcgatcctcagcttcccaaactgcttggattatagacataagccactgcacccagcctgtatttacattatacggctaatacatgaatacattttcactgtaaacaaatcaatcaatagaggaacacacagagcacaatttaaaagccccccttctttcttcaccatttttgtttgtttgtttttgagacacagtcttgctttgttgcccaggctgtagtgtagtggcataaacacagcttactacagcctcgacctcttggactcaagtgatcctcccacgtagctggaacaacaagcacttgctaccacacctggccaagcttttgattttttttttttttttttttgtagagatgggatctcactatgttgctcatggaggtctcaaactcctaagctcaagttattctcccacctcagcctcccaaagtgctgtgattgcaggagtaagccactgtgcccagcctctccctcactcttaacctgtcctcaccattggcagtttggtgggcatcttgctctttctgtgtgtttgtccccactggtacatgtatgcatatattgcttttgtttatttttgctatctccttaaataggatcacatggtttctcaacgcatacagtgaagatttccttaccggttcatatgggtctacctcattcttatgaggactgcatactttttgggattctggctgtgttgtgctttactgtcttgttgatgaacattttggtggtttactcattttttaattgtttttaccattctccctgtaatgaatattcttacgcatacatcttggtacaagctgagtcaaagggtttggatattttaaatgttggtaggaactgccagagtgccctctgtaagggttttaccagttgaaactcccaccagccaagtccccaagatcctcgtcaacacgggctgttaggcatctttaaaatttggagtgttttggtgtatttcgtctcatggtgttcttgttctgtgtgtgacctcctaggattgtcagcacccaactcccgccctccctcaccgccaaggtcctgcttcaccgaacagcacctcaggagcaggtattgtaaagtccacccacctggctggacagcatcccccagagcactggtcactgagcctgaggctggagggatcaggagcagaggccgtggagcagttgtttcacttggtcttgtcaggaccccaagtcctccaatgtcattctcctcagtagtgaagccattggtgaggctgaaagaaaatgttttcttccacgagctaggcctggatagttgttttttcttcaaaccaaggaaatcttggttgaattcgacttcccataagaatttgatgtctctttatgtcaaagagatgttagacttttcagagacagactgtaaaggatgtgtctttagaaagatttagggggttgggcacggtggttcacacctgtaatcccagcactttgggtggctgaggtgggcagatcacttgaggtgaggagttcaagaccagcctggccaacatgatgaaacccatctctatttaaaatacaaaaattagctgggtgtggtggtgcacacctgtaaatcccagctacttgggaggctgaggcaggagaatcgcttgaacctggcaggcagaggttgaggtgagctgagatcgcgccactgcactccagcctgggtagcaagagtgagactctgtctcaaaaaataaaaataaaaataaaaaaataaggaaaacaaactcttctaaaatacttccattttatatttatttaattgtttttatattgaaaaaaaagccatgcatgctcattgagaataaaattgcccatctttgaactgtacagggatagccactgccagcatctggcatatctccttccagtcctttttttgttttgtgtatgaagctgtggtttccagcgtatcatgaggctgtctttttacatgtattagtgaacaggcatgtaaaatgctggtagggctctattcagcctcctcagccactgtggctatgggtgtcaattcaagtagcctttctgggaaacactttgataatgagaacgttaaggatgccctttatttttttcctaataatttgacttctaggaatatatcttaaggaaataatgtaactgctgaaaaaaatttatactcaaaacttgatcacaacaagctttatgaaagtgaaaaatcagacaaaacttgaatgcttaaagtaggaggtggcaaattatggcctgtgggccacctgcctacaaatgaagttttatttggctgcttttgagctataatagcagaaccaagtaggtgggacagagaccatatgccctgcaaagccaaaaatatttactgtcttgtcttttgcacagaaagtttactaattactggtctaaggtaggtaaatgattaatttactcatatcacttaaaccttcataaaattttaatcagccgtttaaaatggccaaagatgttttagtggcaggaaatgcgtgttactgttttaagcagaaatatgaaattttatatagtgtggcctcaaaagtataaaaactgcataggcttaaggaaaaaatacccaatattaatagtactagcttggggatgagggattgtatgtgattttttttttcaacgctttgtctagagtaaattgaggttaggcttagtaatctaaaacatagttttttaaaaatcaccaaaaaaggaagaacaccatatcattctaagattgaaagtcattttggctagaagagcagttcttgtttggtttggttttgttttggtgggttcttttggaaccctcagattgaaacgagagatgttttcatttttgagaaaatcatcaggttttaggccctgattgtgaaccagaacaaacgagagattgggtatagcattttgtttaagtcaaatcctttatcgtgagagtcacagtattttgacatttttattataatggaatttatgtgaattctacatcagggctgtggcagatgtgactgtattctagaatatgagttccccaaaggtgtaaaagagaacaggaatcctcaattttattcccagaagggagagagactgagaaaatcagaacgtagagtgtgatgtgagtttgggtggagctgctgccttgcagcctgtgtgggcccaggttcttgcttcatcccagccatagtgggagccagcagcttgggggagcttctgttccatctgcttggctcttagcatgtggttgggacaagctttctgggcctggctaagttttatgaacagatggcacagcaaattcctgatggttaggtcaagaggagaatgtggtgcccagcgccaacttctgtgtgtgtttgttttcagagactccctacgggagaggatgccccgcaggaacatggtaagtagtgaggcgcatggttgcctcttgagaacggcggtcttttatgctacctacccctgtacaagttatgcgaaggaaaccaagccatctgcatgtttatttcctctgctcataataggaaaatggatgttatggagcttcaagaatcgagttacccaccagaaccctaatggtaaagctatgattttaggcatgctgtcaaatccctgctttcagaccctccttaacttcatattgtgagactgctcggtcaagtgccaggagattgtgattgggagagggtaaggcaaacagcgactgccagaaagaccttttgcaggatgtggaggcgtcctcaggagagttatttcgatttattctgaagcctgagttggagcagatccctttcttagcttatatcttcttcttgtaaaagtgcttttcaacctttctctcccgaacatcttccttctccaaagctgggagtcatgttgcctgcagggactctttccttactgggcccaggagttcgaggtgcagtttggcaacctgtgtcctggctgaggaatgcactcacagcacccctttccgagcccacgtgtgggttggatgcatcacgccagtgcagctattgccccgctgccctctctggctcaggggaaagtcctgttcatattgctttgcaattccaggagcggcattgcccccgaatgtccagattatccctgtttttgtgaccaaagaggaagccattagtctccacgagttcccggtggaacagatgacaaggtaatggagtgcacagagagttaaccttgcaccacacctgagggaccccatcgcgtgattggttaaaaaacaaacctctgatacatcccatcgttccttaattccatcttccccatgccctgtcttgtaaaggagcatctgaatcttgagtttgttaagaaacagagtggcatagagagatgacattggctttcatatcccagctctcttacttataccagctatgggaccttgggcaagtccattccctgcctgagcctcagttttttcatctgaaaagtagacaaaatagtatccctttcatgagttcattgtgacacttgaaaatagtataggtacagcacctagtatagggcctgatgcgtaggagaccttccagatgtgggtcagtcttattcagtgggctctgccattttcagtaggtgagtctggtgtcactacgtaaagccccaagggccagatgttggtgtatttttactcttgtgatttaactctggtggcctcttaggctctgtggcctcaggcacccccttgtccttgatgcctgtgctttagtcttcactgtggaagggcacttgccctgcagtctgtcaacgtgccccttccttacatctctcttgtttgccaggtctctagcatctccagcaggactccaggatggttcagcccagcaccatccaaagggtgggagcacatctgccctgaaagaaaacgccactggccatgtggaatccatggcctggaccaccccagatcccacatcccctgacgaagcttgtccagatggcaggaaggagaacggatgcttgtctggccatgatctggagagcatcaggcccgcaggactgcacaactctgccaggggtgaggttcttggcctcagctcctccctggggaaggaactagtctttctccaagaagaactcgacttgtctgaaatccacattccagaggctcaggaagtggaaatggcctcaggtcattttgccttcctacatgtgcctgttccagatggcagggctccttactgcaaggcatctctcagcgcctccagcagcctggaacccacgcctcctgaggacacagccatcagcagcttgcgccctccctctgctcctgagatgctgacccagcatggagcccaagagcagctcgaagaccatcctggccatagcagccaagcccccattcccagagcagaccctctccccagaaggacccgcaggcccttgttattgcctcgcttagatccaggacagagaggaaacaagcttcccacgggggaacaaggcctggatgaggatgttgatggggtctgtgaaagccacgcagcccctggtctggaatgcagttcaggctcagcaaactgtcagggtgctggcccctctgcagatggaatcagctccaggctgacaccagcagagtcctgcatggggctcgtgaggatgaatctctacactcactgcgtcaaagggctggtgctgtccctgctggctgaggagccgctgctgggagacagcgcagccatagaggaagtggtgagtgtcctcagaccttctcctgcccctctgcggcctctgccgatctcctgtgcttccctcacagcactgtgccaacacccagggaagagataaaggctcagccctcagttgtgtgaccctgggcaagacgttcttgtttagacgatggaggtattacctgcctctgtgggtttttgtggggggtaagagtgagtcaagcgcatagcactggtggtgcattggcatccaacaagtgttggttctcttcttccgctgtttctagttttgcagagcgcaggccttggagaaagggaaggcctgagatggaatcctggcccttgtcctctagctgtgtgaacttgcccacagacctttgtccccttgagccttggctaactcctcagtcacgtagggatggtggtagaccttcctgttccagatgcagtgagataatgcaggcagagactgcacacgtacgtgcatgtgttgtgccgcccctgctcatggcctcatttcctagcctggacagctctaggttctgtgtcagctggaaactcctccgcagtgtgtcacagcctgggttgggagttccctagaaacccagtgtttccctccatagccccagcatcgtacctgatctgaagctccttcctagaaggctgggatgtctgaaatcctgcctggctctggagggctcttaaactattgcagccccttccccgcttagaggcttagagtggtaaactgaccttccctggggcccacgctggagattcgttgctatagtaacagccttgctttagtaggcagggaaagtggtagcagtaagaacagcaggttgaaattgctgcagggcaaatggtgtcttggggctttccttgtttttattcttaaatgtgtattattctaagctgatcttactatcatgcagggcttgtgaccctccataaatgagctagtcaccttgaaatacagaagaagagataagactgcacagcagcttccttgcacagagctcctagcaagagaatgctctctggagctgtcaggcttctctgtgccctttccacagacgctggatcactgagttatggctcatttgcttcctgtatccccattcaccatagctaggagtgactatccatctccttcttatagcagtgcggggagttgtggctgcagtgttaaatgcctcatctccctgccaatgccttggttttcatggtctgttctgcacagtgtcgagccttggaagtgtcattttgaagggcccagtgtttgaatgcaataaagtggatataatacctctctttttaccttcccccacaaaaaggaaaaaatagcccaggctgctctttgagatgtattctgcaccaactatatgtgaaatacttcgcatctctcgttttagccaagccttagaacagttctgggaaggaggcattgtaactcccattttaccagtaagaaaacagcctcattgagatgaaaagacttcctgcaagtggcaggtccagaattcttgcttgtttctggttccccaccccagcctctctgtccccccactgccctgcccttgcagtgatagctgggaagctgaagaaagggggtcagtgtcctgccttctgtggctcgtgctctatggccatatcccctggtttgtcaaggtctatccatgctgttacgacatcagcctccatgggcttctgtggaaagcagggtttgatgctggctaggccccgggaaatagactgcagttttatggaagagaaaaagctaatcttttcttcttttttttttttttttttgagatggagttccgctcttgttgcccaggctggagtacaatggtgtgatctgagctcactgcaacctccgcctccccggttcaagcggttctcctacctcaacctcctgagtagctgggattacaggcatgtgccaccaggcccggctaattttgtatttttagtagagacggggtttctccatgttggtcaggctggtctcgaactcctgacctcaggtaatctgcccgcctcggcctcccaaagtgctgggattacaggcatgattgcacccatccctgaaaagctaatcttttctagtatggagtgactaactttgatcagcccactggtttgagagtgggtttgttaatcagacccaaaggatttctgttttataatcaggaagaggtgtttgattgcctttttgtcccagactagccttgaaaatactttatctgatttccctgcagcccctctgctactgtctagaaaaaccaaatacccccagttacggtgagcacaccccttttgcaagggctccttaatgatgttacatactgccaagctgcccttgtgtcatttggctgtcttgtctttgggtggatcagcttccacagggagtaggggtagggtgaggggcagcaggggttgggattggtgaaaggagccctgggtggagcagccaggagggttgggattggggctggaattccctcagagggagtggaataggctcacaccagggggcagcatagagccgctgatagtccattactcagaccccaagataatctccttgaccttcaaacacagtgatcagattaattatttatcactacaataggacatggagcttctgtgtacagtacatgaggcttgaagttagtgtgagagtgttgccataaaacattttatgaaaaaacaccttcccccaactgggaaaccggtatctctaagtgaatgtgtgttccatgcattgctcctgctgcacgctgtgtcacacactgacatttgtgccacttgctttcgtgtgcactagaagtcagaggacccgggaattagcctcagctctgtgttgcctagggctgttgtgaggatcacattatgtagcagtatatatcggtggctggcaaacattttatgtaaaggaccagaaagcaaatattttcagctttgcacagcttttcagctctgctgttgcagtacaaaaacagccatagacagtatataaatggtatgactgtattccagtaattatttatggacatggaattggaacttcatataatttgcacatgttacaatattattcttttgacttttttccccaaccaagtaaaaaaatataaaaaccattcttaggtctcagactgtacaaagataggcaacaggctggatttagtttataggctagagtttgctgacccctggtatgtatgaaagcacttggttatcagtaaaaattatccacatgtcatctgacatagcatcttgtgattaactgtgtttttatggttaagtgatcctatcttgagtgcaagttaggcagaagattttggaagcaaagctccgtgcctgtggggaaacagtttttggcatggctcactctctgttcttattgtttcttcctctggacaccagctcagcatggaagggatgactgttagcacgttcttgaggtccaaaaactttcagtgaggctgtggtttgacttcatcaggtgaatgcttatgtgtgcccgtgtgcgtgtcggcacatgcacacacacacatctgttcaaataagaggctcagtgttaaacgcagtgttggtcaggctctctcagtgatctgaacatgagatattatgattgtctttcctgagcacatatctttttacatagctctgcaaccttggtttaaaccaaatagctcataaattggcagtgcttggcattggatgtgttcatttattcattcatttagtggattcatttattgagcacctactaggagtcagacactctactaagcattgaggatacaaaactgagcgcatagaaaataactttgtatgtcacacctattgacttgaaatatcatttctgagactttcatacaggaaaactgatttaacaccaatatactcccaaaataacatgtaagcttcatgacatttacttcagaagcattctgtttgcatctctgtactttttatatgcacttatttttcttacatagctgttgaaaaatagtccacaaattatctgtgatctctaaagagacaccatttcttttatatgattattttcatttccttgactttataaaaagactctgcctcaggatagcactttagagtttacaaaggacttttggatgtgtcatttcatttaagtcactcaatagtcccgtactgttcccattttgcagttgactagaaaaatgaggcacagaaaacttggtaacttgctcctggtcatttgactaaaaagaggctgaacttgggatgttttttacctgggaactgcaaatgtttggggacagtgaccttctttcttgtggctgaagcaggcccaggaaaccccatttcagaccaagcctattatgacaggcctggcctactgagtcaagccctcagtggagcttgaggaacactgcacagccattaaagaattatatgatagaatatttaaagacgagaaaagcagttcatgctgtgttgttaggttaaaaaactatcagtcattatttatgatttgatctcatttttattttacagaaaaagagttacacaaaacagtttagtccagtcttttcaattgtacttaaactttatctccttggaggtttgtaaaaatacaggtacttgaacccatctccttgacagtcgtcctcaactgtattcctcttctgaaccatcaagtgcagaaagctgtttgactgacactcagtccttccaagaaagccaggaccgtgctaggtgtagcagagagaagttaccgtgttacatccagtgagggacttctgtacccagggccagtgagaaacaatgcgggatggtcccaggctgtttgtattgtgaaatcatgcagcctgggtaggaaagccatggttaaaataagatacaccacagtggtgacagtggctattactggatggtgaaatgatgggttgttttcttgttatttttttgctcatctcttttctaaatctcctacaatataatcattatttttaaaaacattagaacataagggtgaaagaaaaatgttggtgagagtccattttgctggatcaagtaggcagtaagatactccatgaatgatttttttttttttttttcgagacagagtctcactctatcacccaggctggagtgtggtggtgcggtctcggctcactgcagccttaaactcctggcttaagtgatcctcctgcctcggtctcacaaagcactgggattacaggtgtgagccaccgtgcctggctggaggattttttttttaactaagtctgtggttaactagccctcagaaggcttgctgaggtcagccctacaagcccatgaccctctccccctttgcagtaccacagcagcctggcttcactgaatgggctggaagtccacctgaaagagacgctgcccagggatgaggcagcctccacgagcagcacctacaacttcacacattacgaccgcattcagagcttgctgatgggtaagaaccagccaaggggcctggggcgacggggatgccagattctagatgggtggagatgagaacttgagccccagcatcatgatgacacggctgtgcacagagttgtctgacctgcgttcagggctctcttctcaccgggagcccagtcccactgagtgtggcgttcactgggcagacgcttctctgctcatgtgtctgtttttggcgtttcccagtgttttgagagaagttcatgttcacatatctgtgatagggtttgtctcagaatgttgagatccacacgcagaaaccgggtgctgcatcgcacagcggcggcagccgaagcccaatgccccgggcctttgtctctgccccgggcagccaactcatggccttgagccgtgctcagtccccgtgttcagtactgggcttcatggggtgggagggcagaaggtaactgtctgctcttcacaactctgtgtcctcttctggaagcaaacctgccgcaggtggccaccccgcaggatcgccgcttcctccaggccgtcagcctgatgcatagcgaatttgcccagctgcccgcgctttatgaaatgactgtcaggtgagcctccctgagtcgctccccaacctactctccacggtcctgctcatgggaaccacctgtggggcccaggcagcgccttattcctaagtagatgaaaaacattctagttactctccttaaggccttcctttgtcggttcctattgccgccatcatccactgttgtgcagtcacgtgccatggactttctggttcccttcctactttagacgcttggggtccagcagtgaaggaacctgaggtcctcaccatcatggagctacatccattactagggacggtggctccgtctccttgctagaaacagtgttgaaatattgttgtctttctaattacaaagtaatatggctgggcacagtggctcacacctgtaatctcagcactttgcgaggcagggggatcacttgaggtcagggttcaagaccagcctggccaacctggtgaaaccctgtctctactaaaaatacaaaaaattagctgggcagggtggtgggtgcctgtagtcccagctactcaggaggctgaggcaggagaatcacttgaacccgggtggcagaggttatagtgagctgagatcacaccattgcactccagcctgggcaacagagtgagactgcgtctcagaaaaaaaaaaaaaaaaaaaaaagtaatacgtgctgatcatacagtcatgcagaatgcttggaaatgtatcaagtaaaacattttcctctctcatctccatcacacaccaggaaataaccacattttacagtttggtatatattgctccaggttttattggtttttggtttttattttttgcacatataaattgtatttttaattattttaagtcttctagaaaataggattctactaatgtacaattttacagttgtcttttttcacattatgtcatagcttgaacacctccatgccagaagaaatattatgattattgtaatttacagtatttaaccaaccgaatttgtttttttctttctatatgcttctcttatgaaaccagaaagggagtttgggctttaaagatcactttataaaagcccgaggagactgggacctgagaatttggttgacaactggtaacagaaaataaagcaagttagcaggtcaagggcagtgctggcaatgtgtatattagtccacgtagtccttggaaccatctggtcaagggcattattttttatttatttattttgagatggagtctcactctcgccaggctggagtgcaggggctcagtctcggctcattgcaacctctgtctcctggtttcaagcaattcttctgcctcagcctcctgagtagctgggactacaggcacctgccaccatgcccagctaatttttgtatttttagtagagatagggtttcaccatgttggccaggatagtctcaatgttttgacctagtgatctgcccaccttggccttccaaagtgctgggattacaggcgtgagccaccacgcccggcttcaagggcattttttaaatcctcattttacagatgagaaaattgaagcacaaataggataagcagcttgcccagggttatattcttcttaagtggcagggccaggatttgaagcattttctccaactgttaagcacatgtatgacctttccacacacatttcagtgtcggggcagtgtggtccagtgtgaggggcatgggtggtggactgacagggagcctgggtgggtgattaggatggttctgattccctgtcacccgccacacttgagcgccaggtgttctgctgcctctcagcgtctccagccaatattccaatagatctttctgtcagaaatgtgtcttctctggctttaattcacagctgccccaggctggcaacccagaggcaacttgcatctacagtcactggtttgggaactggctgtgttgggggtgtgtgtgtctgttttgtgggaggtggaaacaagtaaaatgtcagcatctgctccaccaaccaccttgtggccctgcagtatgtcaccttccttagagctgagaggggtttagtgttgagacacatagctcaaggcatttgttgagagattatttcaataacagtaatagaaacaacagctaccatttctttttttttttaattttattattattataagttttagggtacatgtgctgtgcacaacgtgaggtgtgttacatatgtatacatttgccatgttggtgtgctgcacccattaactcgtcatttagcattaggtatatctcctaatgctatccctcccccctccccccaccctacaacaggccccagtgtgtgatgttccccttcctgtgtccatgtattctcattgttcaattcccacctatgagtgagaacatgtggtgtttggttttttgtccttgcaatagtttgctgagaatgatggtttccagtttcatccatgtccctacaaaggacatgaactcatcattttttatggctgcatagtattccatggtgtatatgtgccacattttcttaatccagtctatcgttgttggacatttaggttggttccaaatctttgctattgtgaatagtgccgctataaacatacgtgtgcatgtgtctttatagcagcatgatttataatcctttgggtatatacccagtaatgggttggctgggtcaaatggtatttctagttctagatccctgaggaatcgccacactgacttccacaatggttgaactagtttacagtcccaccaacagtgtaaaagtgttcctatttctccacatcctctccagcacctgttgtttcctgactttttaatgatcgccattctaactgatgtgagatggtatctcattgtggttttgatttgcattgctctgatggccagtgatgatgagcattttttcatgtgttttttggctgcataaatgtcttcttttgagaagtgtctgttcatatccttcgcccactttttgatggggttgtttgtttttttcttgtaaatttgtttgagttcattgtagattctggatattagccctttgtcagatgagtaggttgcgaaaattttctcccgttctgtaggttgcctgttcactctgatggtagtttcttttgctgtgcagaagctctttagtttaattagatcccatttgtcaattttggcttttgttgccattgcttttggtgttttagatgtgaagtccttggccatgcctatgtcctgaatggtattgcctaggttttcttctagggtttttatggttttaggtctaacatgtaagtctttaatccatcttgaattaatttttgtgtaaggtgtaaggaagggatccagtttcagctttctacatatgaacagctaccatttcttaaccactcacaatgtgttaagcactcacttaatctcattctttaaaacaaaacaaaacaaaaacaccaatgaggacacatactgttgcaacaaacactgtacagatgaaaaagctgggactcagaaatgttgaatagcagcccaggacacacactaggaagtaatagggctgggattagcacctgagtgtgtgtgactccagatccatgctcataaccatctggcctcggagccctcccacagggctgtgagaagagattgtcttgctgggccagtgggtgcaggagacactgaagcttggaatagggtgggatttttctcccttacagggaaggagagaattgagtgaggggagccttagcagtccctgactccaccctttctcactagatttgggggaaactgaggcccataatagttggagaggcaggatccagaaaccaggggggtttgtttaccttggcctggagttggctcctcccaggtggctccgcctctgtgtagtgccctcatccctccctctctgtgtccacaggcttcctgtcacttcgtgtcacatcccactcctgtccttcactccctctcagtctatccagccacccccagtgtggagagcagactagactcctttctcggacactgccattgcctcgtcatagaggcagggcagccccagctactcactctgagcctcagggtccttgtctgtgaaatgggaccataccaccactgcagagcttatgtgaggggcaaagcagagactgtatgcagagcacattgcatagctgccagtatgtcaaaaaagccagcactccacagttcctttatgcaatacttataactccaggatctgtggctgctg

SEQ ID NO: 12451 - DNA, 973 bp, Homo sapiens
tctctttacaggtgctgggctgtgctgtggagctccctgatgtcagctgcaagcggtttctggatcagctagttggattctttaatttttacaatggacctgtttccctagcttatgagaactgttctcaggaagaactgagcacggagtgggacaccttcatcgagcaaattctgaaaaacaccagtgatctgcataagattttcaattccctctggaacttggaccaaactaaagtggagcccctgttgttgctgaaggcagcccgcattctgcagacctgccagcgctcgcctcacattctcgctggctgcatcctctataaaggactgattgtcagcacccaactcccgccctccctcaccgccaaggtcctgcttcaccgaacagcacctcaggagcagtaccacagcagcctggcttcactgaatgggctggaagtccacctgaaagagacgctgcccagggatgaggcagcctccacgagcagcacctacaacttcacacattacgaccgcattcagagcttgctgatggcaaacctgccgcaggtggccaccccgcaggatcgccgcttcctccaggccgtcagcctgatgcatagcgaatttgcccagctgcccgcgctttatgaaatgactgtcaggcttcctgtcacttcgtgtcacatcccactcctgtccttcactccctctcagtctatccagccacccccagtgtggagagcagactagactcctttctcggacactgccattgcctcgtcatagaggcagggcagccccagctactcactctgagcctcagggtccttgtctgtgaaatgggaccataccaccactgcagagcttatgtgaggggcaaagcagagactgtatgcagagcacattgcatagctgccagtatgtcaaaaaagccagcactccacagttcctttatgcaatacttataactccaggatctgtggctgctg

SEQ ID NO: 12452 - DNA, 1413 bp, Homo sapiens
caagttggcattttttctagaacctgatcgtccactagcccagagtgtgtgtgttcaacccccacaccaggtggtggtaggcggtgtgactgcacagcgaggtgccggatctgtgagcaggccgactccactcccacgccgcaggtaggtttctccagtgcgctcttgctgggaggtccggatcgttcctgcagggaagcggcagcacacggagaccacttggttgaattctgttggaactctactcaaatctaggggcgtcttctttggacccacaatgggggcaagccttaataatatggaagggagtttgggctttagagatccctttataaaagctctgggggctgagccctgagaattcagtgacaacaggaccaacctgcgctgcctttgactacaagtgggccgtgcagctggttcctctcgagcgagtgtccctaaataggagtttacaagatgtctgggggtaaaagcactgtgcttttcagtggtggctgcgtgaaagggagcgacactcagctgtgtgttcctgggcttgtgtggtacttagaacctcagttctattacgttatagtcagacatttttttgacagtatgagacagactgcaggatgaaaatatttgtcaaaatcttaactgaatgtttactggaagtacttgagattccatttgagagttgtattgttaataatttcatgtcagtgaactgatatctgatgtttatgatatggtgtctttttcttgaaacaagcttccaagggctagaaataaaatagccaaaaaatgctggagttctgagtaattaaatggcagcatttttttgtgacaaaggtaagggttaagacagtgtgtgtgtgtgtgtgtgtgtgtgtgtgtgtgtgtgtgcgcgcgcgcgcgcgcgcgtaacgtgggcgcatccctcttttccttccctgggttcagtgtggctgggtaaggaccgtctgtttgtagggctgccaggctgcagcctgctgctccagggagcaccagctgcagctgatccaatacaccaagcctgtgtctccctcttctatcacctctctccaggatctctgctgtctcttggatcccatctgcctagatggaagaggatcctatccgaagctaggataaatgttgtcttactcctctgctatgttctcccagaaaaaattgattacaagttctctgctgtggttgctgcagctccaggaagtccccgcaatgtctcacgttgtctttgaccagtggtccccagtaccaggccagcgaagacaactttataatgtcatttgtgttgtgaaaattcttccactgacccaaaatggaaccgtacaaagcctatccgtgtatatggaaaagtctcatgcacctggattaactcagaaaaagtaaagtcctgaaacttca

SEQ ID NO: 12453 - DNA, 486 bp, Homo sapiens
caagttggcattttttctagaacctgatcgtccactagcccagagtgtgtgtgttcaacccccacaccaggtggtggtaggcggtgtgactgcacagcgaggtgccggatctgtgagcaggccgactccactcccacgccgcaggatctctgctgtctcttggatcccatctgcctagatggaagaggatcctatccgaagctaggataaatgttgtcttactcctctgctatgttctcccagaaaaaattgattacaagttctctgctgtggttgctgcagctccaggaagtccccgcaatgtctcacgttgtctttgaccagtggtccccagtaccaggccagcgaagacaactttataatgtcatttgtgttgtgaaaattcttccactgacccaaaatggaaccgtacaaagcctatccgtgtatatggaaaagtctcatgcacctggattaactcagaaaaagtaaagtcctgaaacttca

SEQ ID NO: 12454 - DNA, 19966 bp, Homo sapiens
ggaaacaagcttcccacgggggaacaaggcctggatgaggatgttgatggggtctgtgaaagccacgcagcccctggtctggaatgcagttcaggctcagcaaactgtcagggtgctggcccctctgcagatggaatcagctccaggctgacaccagcagagtcctgcatggggctcgtgaggatgaatctctacactcactgcgtcaaagggctggtgctgtccctgctggctgaggagccgctgctgggagacagcgcagccatagaggaagtggtgagtgtcctcagaccttctcctgcccctctgcggcctctgccgatctcctgtgcttccctcacagcactgtgccaacacccagggaagagataaaggctcagccctcagttgtgtgaccctgggcaagacgttcttgtttagacgatggaggtattacctgcctctgtgggtttttgtggggggtaagagtgagtcaagcgcatagcactggtggtgcattggcatccaacaagtgttggttctcttcttccgctgtttctagttttgcagagcgcaggccttggagaaagggaaggcctgagatggaatcctggcccttgtcctctagctgtgtgaacttgcccacagacctttgtccccttgagccttggctaactcctcagtcacgtagggatggtggtagaccttcctgttccagatgcagtgagataatgcaggcagagactgcacacgtacgtgcatgtgttgtgccgcccctgctcatggcctcatttcctagcctggacagctctaggttctgtgtcagctggaaactcctccgcagtgtgtcacagcctgggttgggagttccctagaaacccagtgtttccctccatagccccagcatcgtacctgatctgaagctccttcctagaaggctgggatgtctgaaatcctgcctggctctggagggctcttaaactattgcagccccttccccgcttagaggcttagagtggtaaactgaccttccctggggcccacgctggagattcgttgctatagtaacagccttgctttagtaggcagggaaagtggtagcagtaagaacagcaggttgaaattgctgcagggcaaatggtgtcttggggctttccttgtttttattcttaaatgtgtattattctaagctgatcttactatcatgcagggcttgtgaccctccataaatgagctagtcaccttgaaatacagaagaagagataagactgcacagcagcttccttgcacagagctcctagcaagagaatgctctctggagctgtcaggcttctctgtgccctttccacagacgctggatcactgagttatggctcatttgcttcctgtatccccattcaccatagctaggagtgactatccatctccttcttatagcagtgcggggagttgtggctgcagtgttaaatgcctcatctccctgccaatgccttggttttcatggtctgttctgcacagtgtcgagccttggaagtgtcattttgaagggcccagtgtttgaatgcaataaagtggatataatacctctctttttaccttcccccacaaaaaggaaaaaatagcccaggctgctctttgagatgtattctgcaccaactatatgtgaaatacttcgcatctctcgttttagccaagccttagaacagttctgggaaggaggcattgtaactcccattttaccagtaagaaaacagcctcattgagatgaaaagacttcctgcaagtggcaggtccagaattcttgcttgtttctggttccccaccccagcctctctgtccccccactgccctgcccttgcagtgatagctgggaagctgaagaaagggggtcagtgtcctgccttctgtggctcgtgctctatggccatatcccctggtttgtcaaggtctatccatgctgttacgacatcagcctccatgggcttctgtggaaagcagggtttgatgctggctaggccccgggaaatagactgcagttttatggaagagaaaaagctaatcttttcttcttttttttttttttttttgagatggagttccgctcttgttgcccaggctggagtacaatggtgtgatctgagctcactgcaacctccgcctccccggttcaagcggttctcctacctcaacctcctgagtagctgggattacaggcatgtgccaccaggcccggctaattttgtatttttagtagagacggggtttctccatgttggtcaggctggtctcgaactcctgacctcaggtaatctgcccgcctcggcctcccaaagtgctgggattacaggcatgattgcacccatccctgaaaagctaatcttttctagtatggagtgactaactttgatcagcccactggtttgagagtgggtttgttaatcagacccaaaggatttctgttttataatcaggaagaggtgtttgattgcctttttgtcccagactagccttgaaaatactttatctgatttccctgcagcccctctgctactgtctagaaaaaccaaatacccccagttacggtgagcacaccccttttgcaagggctccttaatgatgttacatactgccaagctgcccttgtgtcatttggctgtcttgtctttgggtggatcagcttccacagggagtaggggtagggtgaggggcagcaggggttgggattggtgaaaggagccctgggtggagcagccaggagggttgggattggggctggaattccctcagagggagtggaataggctcacaccagggggcagcatagagccgctgatagtccattactcagaccccaagataatctccttgaccttcaaacacagtgatcagattaattatttatcactacaataggacatggagcttctgtgtacagtacatgaggcttgaagttagtgtgagagtgttgccataaaacattttatgaaaaaacaccttcccccaactgggaaaccggtatctctaagtgaatgtgtgttccatgcattgctcctgctgcacgctgtgtcacacactgacatttgtgccacttgctttcgtgtgcactagaagtcagaggacccgggaattagcctcagctctgtgttgcctagggctgttgtgaggatcacattatgtagcagtatatatcggtggctggcaaacattttatgtaaaggaccagaaagcaaatattttcagctttgcacagcttttcagctctgctgttgcagtacaaaaacagccatagacagtatataaatggtatgactgtattccagtaattatttatggacatggaattggaacttcatataatttgcacatgttacaatattattcttttgacttttttccccaaccaagtaaaaaaatataaaaaccattcttaggtctcagactgtacaaagataggcaacaggctggatttagtttataggctagagtttgctgacccctggtatgtatgaaagcacttggttatcagtaaaaattatccacatgtcatctgacatagcatcttgtgattaactgtgtttttatggttaagtgatcctatcttgagtgcaagttaggcagaagattttggaagcaaagctccgtgcctgtggggaaacagtttttggcatggctcactctctgttcttattgtttcttcctctggacaccagctcagcatggaagggatgactgttagcacgttcttgaggtccaaaaactttcagtgaggctgtggtttgacttcatcaggtgaatgcttatgtgtgcccgtgtgcgtgtcggcacatgcacacacacacatctgttcaaataagaggctcagtgttaaacgcagtgttggtcaggctctctcagtgatctgaacatgagatattatgattgtctttcctgagcacatatctttttacatagctctgcaaccttggtttaaaccaaatagctcataaattggcagtgcttggcattggatgtgttcatttattcattcatttagtggattcatttattgagcacctactaggagtcagacactctactaagcattgaggatacaaaactgagcgcatagaaaataactttgtatgtcacacctattgacttgaaatatcatttctgagactttcatacaggaaaactgatttaacaccaatatactcccaaaataacatgtaagcttcatgacatttacttcagaagcattctgtttgcatctctgtactttttatatgcacttatttttcttacatagctgttgaaaaatagtccacaaattatctgtgatctctaaagagacaccatttcttttatatgattattttcatttccttgactttataaaaagactctgcctcaggatagcactttagagtttacaaaggacttttggatgtgtcatttcatttaagtcactcaatagtcccgtactgttcccattttgcagttgactagaaaaatgaggcacagaaaacttggtaacttgctcctggtcatttgactaaaaagaggctgaacttgggatgttttttacctgggaactgcaaatgtttggggacagtgaccttctttcttgtggctgaagcaggcccaggaaaccccatttcagaccaagcctattatgacaggcctggcctactgagtcaagccctcagtggagcttgaggaacactgcacagccattaaagaattatatgatagaatatttaaagacgagaaaagcagttcatgctgtgttgttaggttaaaaaactatcagtcattatttatgatttgatctcatttttattttacagaaaaagagttacacaaaacagtttagtccagtcttttcaattgtacttaaactttatctccttggaggtttgtaaaaatacaggtacttgaacccatctccttgacagtcgtcctcaactgtattcctcttctgaaccatcaagtgcagaaagctgtttgactgacactcagtccttccaagaaagccaggaccgtgctaggtgtagcagagagaagttaccgtgttacatccagtgagggacttctgtacccagggccagtgagaaacaatgcgggatggtcccaggctgtttgtattgtgaaatcatgcagcctgggtaggaaagccatggttaaaataagatacaccacagtggtgacagtggctattactggatggtgaaatgatgggttgttttcttgttatttttttgctcatctcttttctaaatctcctacaatataatcattatttttaaaaacattagaacataagggtgaaagaaaaatgttggtgagagtccattttgctggatcaagtaggcagtaagatactccatgaatgatttttttttttttttttcgagacagagtctcactctatcacccaggctggagtgtggtggtgcggtctcggctcactgcagccttaaactcctggcttaagtgatcctcctgcctcggtctcacaaagcactgggattacaggtgtgagccaccgtgcctggctggaggattttttttttaactaagtctgtggttaactagccctcagaaggcttgctgaggtcagccctacaagcccatgaccctctccccctttgcagtaccacagcagcctggcttcactgaatgggctggaagtccacctgaaagagacgctgcccagggatgaggcagcctccacgagcagcacctacaacttcacacattacgaccgcattcagagcttgctgatgggtaagaaccagccaaggggcctggggcgacggggatgccagattctagatgggtggagatgagaacttgagccccagcatcatgatgacacggctgtgcacagagttgtctgacctgcgttcagggctctcttctcaccgggagcccagtcccactgagtgtggcgttcactgggcagacgcttctctgctcatgtgtctgtttttggcgtttcccagtgttttgagagaagttcatgttcacatatctgtgatagggtttgtctcagaatgttgagatccacacgcagaaaccgggtgctgcatcgcacagcggcggcagccgaagcccaatgccccgggcctttgtctctgccccgggcagccaactcatggccttgagccgtgctcagtccccgtgttcagtactgggcttcatggggtgggagggcagaaggtaactgtctgctcttcacaactctgtgtcctcttctggaagcaaacctgccgcaggtggccaccccgcaggatcgccgcttcctccaggccgtcagcctgatgcatagcgaatttgcccagctgcccgcgctttatgaaatgactgtcaggtgagcctccctgagtcgctccccaacctactctccacggtcctgctcatgggaaccacctgtggggcccaggcagcgccttattcctaagtagatgaaaaacattctagttactctccttaaggccttcctttgtcggttcctattgccgccatcatccactgttgtgcagtcacgtgccatggactttctggttcccttcctactttagacgcttggggtccagcagtgaaggaacctgaggtcctcaccatcatggagctacatccattactagggacggtggctccgtctccttgctagaaacagtgttgaaatattgttgtctttctaattacaaagtaatatggctgggcacagtggctcacacctgtaatctcagcactttgcgaggcagggggatcacttgaggtcagggttcaagaccagcctggccaacctggtgaaaccctgtctctactaaaaatacaaaaaattagctgggcagggtggtgggtgcctgtagtcccagctactcaggaggctgaggcaggagaatcacttgaacccgggtggcagaggttatagtgagctgagatcacaccattgcactccagcctgggcaacagagtgagactgcgtctcagaaaaaaaaaaaaaaaaaaaaaagtaatacgtgctgatcatacagtcatgcagaatgcttggaaatgtatcaagtaaaacattttcctctctcatctccatcacacaccaggaaataaccacattttacagtttggtatatattgctccaggttttattggtttttggtttttattttttgcacatataaattgtatttttaattattttaagtcttctagaaaataggattctactaatgtacaattttacagttgtcttttttcacattatgtcatagcttgaacacctccatgccagaagaaatattatgattattgtaatttacagtatttaaccaaccgaatttgtttttttctttctatatgcttctcttatgaaaccagaaagggagtttgggctttaaagatcactttataaaagcccgaggagactgggacctgagaatttggttgacaactggtaacagaaaataaagcaagttagcaggtcaagggcagtgctggcaatgtgtatattagtccacgtagtccttggaaccatctggtcaagggcattattttttatttatttattttgagatggagtctcactctcgccaggctggagtgcaggggctcagtctcggctcattgcaacctctgtctcctggtttcaagcaattcttctgcctcagcctcctgagtagctgggactacaggcacctgccaccatgcccagctaatttttgtatttttagtagagatagggtttcaccatgttggccaggatagtctcaatgttttgacctagtgatctgcccaccttggccttccaaagtgctgggattacaggcgtgagccaccacgcccggcttcaagggcattttttaaatcctcattttacagatgagaaaattgaagcacaaataggataagcagcttgcccagggttatattcttcttaagtggcagggccaggatttgaagcattttctccaactgttaagcacatgtatgacctttccacacacatttcagtgtcggggcagtgtggtccagtgtgaggggcatgggtggtggactgacagggagcctgggtgggtgattaggatggttctgattccctgtcacccgccacacttgagcgccaggtgttctgctgcctctcagcgtctccagccaatattccaatagatctttctgtcagaaatgtgtcttctctggctttaattcacagctgccccaggctggcaacccagaggcaacttgcatctacagtcactggtttgggaactggctgtgttgggggtgtgtgtgtctgttttgtgggaggtggaaacaagtaaaatgtcagcatctgctccaccaaccaccttgtggccctgcagtatgtcaccttccttagagctgagaggggtttagtgttgagacacatagctcaaggcatttgttgagagattatttcaataacagtaatagaaacaacagctaccatttctttttttttttaattttattattattataagttttagggtacatgtgctgtgcacaacgtgaggtgtgttacatatgtatacatttgccatgttggtgtgctgcacccattaactcgtcatttagcattaggtatatctcctaatgctatccctcccccctccccccaccctacaacaggccccagtgtgtgatgttccccttcctgtgtccatgtattctcattgttcaattcccacctatgagtgagaacatgtggtgtttggttttttgtccttgcaatagtttgctgagaatgatggtttccagtttcatccatgtccctacaaaggacatgaactcatcattttttatggctgcatagtattccatggtgtatatgtgccacattttcttaatccagtctatcgttgttggacatttaggttggttccaaatctttgctattgtgaatagtgccgctataaacatacgtgtgcatgtgtctttatagcagcatgatttataatcctttgggtatatacccagtaatgggttggctgggtcaaatggtatttctagttctagatccctgaggaatcgccacactgacttccacaatggttgaactagtttacagtcccaccaacagtgtaaaagtgttcctatttctccacatcctctccagcacctgttgtttcctgactttttaatgatcgccattctaactgatgtgagatggtatctcattgtggttttgatttgcattgctctgatggccagtgatgatgagcattttttcatgtgttttttggctgcataaatgtcttcttttgagaagtgtctgttcatatccttcgcccactttttgatggggttgtttgtttttttcttgtaaatttgtttgagttcattgtagattctggatattagccctttgtcagatgagtaggttgcgaaaattttctcccgttctgtaggttgcctgttcactctgatggtagtttcttttgctgtgcagaagctctttagtttaattagatcccatttgtcaattttggcttttgttgccattgcttttggtgttttagatgtgaagtccttggccatgcctatgtcctgaatggtattgcctaggttttcttctagggtttttatggttttaggtctaacatgtaagtctttaatccatcttgaattaatttttgtgtaaggtgtaaggaagggatccagtttcagctttctacatatgaacagctaccatttcttaaccactcacaatgtgttaagcactcacttaatctcattctttaaaacaaaacaaaacaaaaacaccaatgaggacacatactgttgcaacaaacactgtacagatgaaaaagctgggactcagaaatgttgaatagcagcccaggacacacactaggaagtaatagggctgggattagcacctgagtgtgtgtgactccagatccatgctcataaccatctggcctcggagccctcccacagggctgtgagaagagattgtcttgctgggccagtgggtgcaggagacactgaagcttggaatagggtgggatttttctcccttacagggaaggagagaattgagtgaggggagccttagcagtccctgactccaccctttctcactagatttgggggaaactgaggcccataatagttggagaggcaggatccagaaaccaggggggtttgtttaccttggcctggagttggctcctcccaggtggctccgcctctgtgtagtgccctcatccctccctctctgtgtccacaggcttcctgtcacttcgtgtcacatcccactcctgtccttcactccctctcagtctatccagccacccccagtgtggagagcagactagactcctttctcggacactgccattgcctcgtcatagaggcagggcagccccagctactcactctgagcctcagggtccttgtctgtgaaatgggaccataccaccactgcagagcttatgtgaggggcaaagcagagactgtatgcagagcacattgcatagctgccagtatgtcaaaaaagccagcactccacagttcctttatgcaatacttataactccaggatctgtggctgctgccactgtggatggtcccgccacggactcttccagcatctagtgagctgaaaggaaggaaagatggtattggcactgaagcctgaaactcagctgaagaaatagaattccgtgccatgacagctgcacatgccacattgggtgtcctgggtcctctgtgacaagaaccttactgaggtctctgtgtggtctgagattagcaccagcagcattggaccgttgccttctttcttcctccaacagaaatgcctccacggctgtgtacgcctgttgcaaccccatccaggagacatatttccagcagctggcacctgcagcacggagctccggcttcccaaaccctcaggatggcgccttcagcctctccggcaaagcaaagcagaagctgctgaagcacggggtgaacttgctctgaactgcacccaggaggtgactgggaaggagaaaaccagcaaaggaagctctgccttttataattgaaaaggcccctctattttatttttcttgaaaacattcccttttttaggaaccaaatgatatttgagtttttgttattccttttgcagattgggatgtgttttgggggcaggggttagttcttcaggtcggcagacccagagcacttgataaagaactgtatttaatcggtagtgttggggccgggacgggcttggctccctctctgccatactgagcctgaggtatttcatatctcctgctgttccatcccagcttgaattggtgccacaagcttccaagttggcattttttctagaacctgatcgtccactagcccagagtgtgtgtgttcaacccccacaccaggtggtggtaggcggtgtgactgcacagcgaggtgccggatctgtgagcaggccgactccactcccacgccgcaggtaggtttctccagtgcgctcttgctgggaggtccggatcgttcctgcagggaagcggcagcacacggagaccacttggttgaattctgttggaactctactcaaatctaggggcgtcttctttggacccacaatgggggcaagccttaataatatggaagggagtttgggctttagagatccctttataaaagctctgggggctgagccctgagaattcagtgacaacaggaccaacctgcgctgcctttgactacaagtgggccgtgcagctggttcctctcgagcgagtgtccctaaataggagtttacaagatgtctgggggtaaaagcactgtgcttttcagtggtggctgcgtgaaagggagcgacactcagctgtgtgttcctgggcttgtgtggtacttagaacctcagttctattacgttatagtcagacatttttttgacagtatgagacagactgcaggatgaaaatatttgtcaaaatcttaactgaatgtttactggaagtacttgagattccatttgagagttgtattgttaataatttcatgtcagtgaactgatatctgatgtttatgatatggtgtctttttcttgaaacaagcttccaagggctagaaataaaatagccaaaaaatgctggagttctgagtaattaaatggcagcatttttttgtgacaaaggtaagggttaagacagtgtgtgtgtgtgtgtgtgtgtgtgtgtgtgtgtgtgtgcgcgcgcgcgcgcgcgcgtaacgtgggcgcatccctcttttccttccctgggttcagtgtggctgggtaaggaccgtctgtttgtagggctgccaggctgcagcctgctgctccagggagcaccagctgcagctgatccaatacaccaagcctgtgtctccctcttctatcacctctctccaggatctctgctgtctcttggatcccatctgcctagatggaagaggatcctatccgaagctaggataaatgttgtcttactcctctgctatgttctcccagaaaaaattgattacaagttctctgctgtggttgctgcagctccaggaagtccccgcaatgtctcacgttgtctttgaccagtggtccccagtaccaggccagcgaagacaactttataatgtcatttgtgttgtgaaaattcttccactgacccaaaatggaaccgtacaaagcctatccgtgtatatggaaaagtctcatgcacctggattaactcagaaaaagtaaagtcctgaaacttcactttgcaggtgtgcccctttctttcctcctttgatcctgcttagtttctgcagtggaggttctgctcagagccccagggcactggcagctgcagccgtcatctctaaagcttggtaactgtggcccagaggctgcagagaagaaacacttaacccgctgttttcccgttttttaatatttcagaggtttcagggggtcactcaggacacggttaatcccacagccccaggcccatcccctcaaaattagcgcccccagagtacgggccaagcgacggacagccaagcagcatgttcttgctggaatgggcaccacaacctcttatggccatgtttcccaagggaaggcagtgtgcaggacagcctgcccaccctggactcctagttgacaccgagtgccactgtcagtgatccaggaccacagattctagtgactcttcagggcagaaaagcctctgttttggcttcctctgtgccagccatctgccacctgtgaactgtaaggataaaggtcgcatgagtgattaatagtggtgtgttagtccgttctcacggttctaataaagacatacccgagactgggtactttataaaggaaagaggtttaactgactcacagttctgcagggctggagagaccttgggaaacttatgatcatggcagaaggggaaccaaacacatccttcttcacatggtggcagcaaagagaagtgcagagtgaaaggggggaaaagccccttatacaaccatcagatctcacgagaactgtcacaagaacagcatggaagtaaccacacccataattcaattacctcccaccaggtccctcccacgacatgtggggactatgagaactacaaaatgagatttgggtgggaacacagccaaaccatatcaagtggcaatcagattcctactgggaaaggacccctagaggggatgtttgagcctgatcaaactgtctcctcccctggagggaagcatctagacttctgggccgttgtcacttcaaccgacagagggtggtagcaagtggagcccaggggctttgttgaagtcgccctccatggtgtctgtcttgcatatttggtggtcttttccaatgtggctaagatgtacttcccatgccgcccagttactgcgttcttaacaccccgccctgctcggggtgggtgagtagcagcagacctttctctggtgtgagcctccctgccacaggccacttccctgtgtgtgcagtgagctgaatggtggcccccaaagatcaggtcccaatccccagaacctgtgaatgttgccttgttggatcggatgtttgcagatgtggttgagtgaaggatcttgagacgaagagatgatcctggcttatcccgtggtccctaaatgccctcacaaatgtgcttttaggagaggggcagggggaggttactcacgtggagaaggccacgtgaagatggcaaagactggagtgatgtggccgccagtcaaggaatgccagcagccaccaggtgccagaaaaggcaagaagtggattctgccctagagtgtgcggagggactgtgactgtcaacgtactgaattcggtcccgtgaaactgatttcagacttcggcctccagaaccgtgagagcatgggtttgtgttgtaagcctctgggtatatgctcatttgttacagcagccagaggaaacaaatccatcctcctgccaacttgctttctccttgtgatgcccagttccctctctctcagtagcgccgagccacagagcacggagggcgtgagaagagctggggccccacatgaggttgccatggcgcggggcacaggggagcctttaagcaggggagtgggatgggcgcggtgtgacgcctgtataatcccagcactttgggaggccgaggcgggtggatcacttgagctcaggagttcaagaccagcctggccaacgtgatgaaaccctgtctctactaaaaatacaaaaattaaccaggtggggtggcgcatgcctgtaatcccagctactcgggaggccgaagccggagaattgcttaaacccaggaggcggaggttgcagtgagccgagctgagattcattgcactccagcctgggtgacagagtgagactctgtctcaaaaaaaaaaaaaaaaaaaaaaaatgcaggggagtgactggagctggttctcatgaggaaggtcactagctcctgagtaggggataagctgggcaacagtggaaaccaccaggaggctatggttgtccaggtgggaagtggaatggctgaagcagagaggaggccagataatgggcagacgagcctgggcactgatgaggtttggggcggggagggacagccccagtggagaaggcagccaaggagatagattcctgccctgaaggagctggcggacggagtgagcaggaaacccacactaatactctcagcctgtgctcccgacacacacactcctctcccaacccctgaacccaccgctgctcctgggaaaagggcagtgggtgtgggaaagcacttgtctcctgctttgcttcttgattctgactgccacccggctctctgtgaggagacaggggagggcaggtgtcagacccactctcagcatcctagcttagaaataaaacatactctagatctttcttcaacatatttgttgagtttgagaagcttacagtgaagattctaagggcttcaaggtgaaaataggacaccttctctgttgatccagtatttaaatgtccaaacctgaaattagctgtacttcccctgagaataaaacccagagagtgctttggaatcctgtcaagagctgggaggtgttttatgattgcctgtgcatgccgaggtataagccgaaaagttgcaacccttctcccctgccctgcctcgctgtcagctgggccaagcaccctgaggaaagggcttgaggcccaggctgccaaacccatggggaggagagggagacaagtcctctaccgagtgtgctgttcaaagacaccttgtgcatccttcctccccacccaggctggactggcttgtgtggctgtggcaggagcacatgggctttggtgtcagacagctgggttcaaatcgcagctctgccacttattgctggaaatcagggcaagttgcttttctgtctctgagcctcagtgtccttttctttaaaatggacaggagaaggaaatggatgtaaggacttggcctatcatgggccctcagcaaatggagggtcctgttgagtgttctgagaaggcaaatggcctcccagcacagggagaaggacctgggggccggaggggtgtggtccttctgcatgttgaggaagtgagtcctggatgtgtgtccagacttcagaagatgcgctgtgctgcgagcctggatactcggcttccaattccagctcgccctgcagctggctgcgtgaccttgttcatgtcagctgcccgctctgagcctgtttcctcatgtgttaaatgtgcaattgacaaggatgaggtaggggaaggaacctcgtagggtgcacagtgctctccatgctcaaagaagcaggtgccctcacctcgaacgtgggggtggctaatgtatgggaagcggggagatatggggaagggcaggtacccagaagttagaagcaacgtgtgtgcctgggaaagaggcggaaagtaaaccaatccctgtgtgtgctccctcctgcctcctaatgctgcaatctgcttgagtgttttccctgccatctgtcagcagttctaaaatatgtggccttattctgtcctgttccctgtgtttacatctggttagcaagattcggctggggagttaaatgttatggaaggttgctggcagcaggcatgacggtcctcaaaaacctcattctgtgcttagcctctgctactcatatttacatcctgacaatgtgtatggagcacctctcccatccacccagaccacgacataatagcatcttaccaaaacctcacttgacactcacagagtggattaggacttttggtggcaaggatagaaaccacaactcaaacttggcttacgaataaaaggcgcacttattggctcatgtaacagaaaagtccagaggtagagctggttttcggcagagctgcgttcaggactcacgtgatctccacagcgcaggccccgcttgcctccgtgggtttctctctcagcttctttcccttcacctccccccaccaccccacctaataaaaagtggcctctctttcacagtcgtcccagaaaaagaacttggatcacgtgtccagccctgacccaatctctcagtggcccagagtttggaagactgattggtcagatctggatcatgggcccagccctggagacccaaggactgagcatggggatgttatggtcttgcaagaggctcatactgttggcaggataggtttaaaagcagtggctgctggccaggcgtggtggctaatgcctgtaataccagcactttgcggggcagaggcaggctgatcacttgaggttaggagttcgagatcagcctggccaacatagtgaaactgtctctactaaaaatacaagaattagccaggcgtggaagcgggcacctgtaagtccagctagtcacgaggctgaggcaggagaatcaccagaaggtggaggttgcagtgagccgagattgcgccactgcactccagcctgggcaacagaggagactctgtctcaaaaaaacaaaaacagataacaaaaaacagtgactgtcctctagagaccaagcttaggtggcctgcccggtgttacacagggccatagctcagactttaatgtccaggctgaatggtttcaaaggccttatcattcttgctactcacagcagcgaccccctcagcctgagctacacgttagaatcatgaccggaaatgagtttaaaacaaagacccgtgcctggaccccactctcggaacaatgaaaaaagatgctttgggagtggggtgtgtgctttggggtttccgacaagttcccgggtgactgcatcgtgcagccacagtcaaggaccagcacaccaggatcactcctctcccccacagtatgctacggagcactcagtgttacaagtttaatcgctgtcaccaaggacagaacccagacaatctgggtgactctaggggctgatgaacaggtgcctgggagaaagggtttgggatcagaagacctggggtgtgaccttctacaaatagtaattggtctggccttgagtacatgggaacagagggagcttgaggccagtccagcctgtctcgggtggaaggcaggattcccatttgcagccggctggctcccctttctcaccttgagcctccagagctacaacacgtaaattagcttagcaatgcctagctggcaatgcacacttgaggagggtgagaaacatcgcgatcccaggtgagtggcgctcttcccttccgcttgttgtggcagcccagcccggacagctggctggaacctcgcttgcaggtggaaacatgcggcagcccggctgcttctagggctcctggctgggagacccccctgtctccctctcttctaaagggaaaaacatgaaaaacacagctactgagggacatgtttcttcctctgtgattagacacaggcaattgaaagtagccactggcttctctggccacacccactgctgtcccgatgtgttttcccatctcttccatttggcggccttcctcttcacctgtttctctactcagctgtggcagaaagggaaacaaggttgttgagtgcccttcatgtgccagatactgcacatacccacagaggagaaactgaggctatgagaggctaagggacttgcccaaggtcccgagggtgcaaactcctggcacggagtcctaaatcctcagcttttctgaagccagggtccttgttcttctttgcccagttagacatctattgctccttaacatatcctagatgtgctcttgtccccaccccactagtcccattgctttgggacattttgcttcattcactatccacgatcaattctagtgacccgcctgtctctgtgacatcactcaaaacacaagagcctcaaagtcacttgcccccttctgcctagcaagtctttttttttggacagggtcttgttctgtcgtcttggctggagtgcactggcgcgacctaggctcactgcagcccccgcctcccaggttcaagtgatcctcccacctcagcctctcaaatagctgggactacaggtgtgcaccaccacactcagctagtttgtttgtttggtagagacaacgcctcactatattactcaggctggtctcaaactccttggctcaagcaatcctccccgctcagcttcccaaagtgctaggattacaggcgtgagccaccgagcctggcctaagtctttctttacaacagatgacctcaccacttcactctggttttcagcaagatcctttatttatcttctgttccccagacatgtcacatgaatgcaggtagctaggtacctgcgcgggctgttggttttgtaaacgcagagcagagcagtcacgatgtgtagaaatcatgcacctcagtgattctttaacaagataatgagtaaaaagacttcaggtatgtttgaaatgtctgccttttcctgcattctcatcactgacaaatatctgtgtagacattttactcaaatgtagacgtgctctttgcacacttgctagtacctgcctggtgcatttcaactgtgttttcttccaacagttgtacctcttagaagctgctgttttccatttggatctaaacactggacctgcacctgcgaccagctgtatattccaaaccactcctcggctttataaatctgacactgctcataatacattattcagaaaaggcatctctagtgtggctggccggctacgctttcacacatcagctaacacaggctatttctagagtgagtgcctcaaactggtctcctgggaccttttccttcgggaagagatccacatgttcttcacaggagaccagaaaaccagcacaacggccacgggtcctctgggcatgtaggtcttctctgtctcctcactagcacacactggcttgggtcattgtcacgcagtgcacacctttgtgccatgacaaagacacagggccaactcttccactatctccaagtctagtgtttgaacatttatgtacagacaaataaatgaaaaaaaaaaaaac

SEQ ID NO: 12455 - DNA, 986 bp, Homo sapiens
ggaaacaagcttcccacgggggaacaaggcctggatgaggatgttgatggggtctgtgaaagccacgcagcccctggtctggaatgcagttcaggctcagcaaactgtcagggtgctggcccctctgcagatggaatcagctccaggctgacaccagcagagtcctgcatggggctcgtgaggatgaatctctacactcactgcgtcaaagggctggtgctgtccctgctggctgaggagccgctgctgggagacagcgcagccatagaggaagtgtaccacagcagcctggcttcactgaatgggctggaagtccacctgaaagagacgctgcccagggatgaggcagcctccacgagcagcacctacaacttcacacattacgaccgcattcagagcttgctgatggcaaacctgccgcaggtggccaccccgcaggatcgccgcttcctccaggccgtcagcctgatgcatagcgaatttgcccagctgcccgcgctttatgaaatgactgtcagttgtacctcttagaagctgctgttttccatttggatctaaacactggacctgcacctgcgaccagctgtatattccaaaccactcctcggctttataaatctgacactgctcataatacattattcagaaaaggcatctctagtgtggctggccggctacgctttcacacatcagctaacacaggctatttctagagtgagtgcctcaaactggtctcctgggaccttttccttcgggaagagatccacatgttcttcacaggagaccagaaaaccagcacaacggccacgggtcctctgggcatgtaggtcttctctgtctcctcactagcacacactggcttgggtcattgtcacgcagtgcacacctttgtgccatgacaaagacacagggccaactcttccactatctccaagtctagtgtttgaacatttatgtacagacaaataaatgaaaaaaaaaaaaac

SEQ ID NO: 12456 - DNA, 26377 bp, Homo sapiens
attctctggggccacctgaaggctttcaaacacagtaataagccctcctcgggctgggaaacaggaagctgtgttttaaatgccgtgatcactggattaaaggaaacatggctccactctgttctcttgccaggtggaattatttttttctttatgatggttccaaggtaaaggaagaaggcgatccaacaagagctggcatttgttacttttatccttcccaggtaagccacacagcattttattgttcagtgaggatcccagtgcctccaagtggtgacttttcaaaagtatggggtttacattaggacagtttggctaatccagacaatgacatttctactgtcttattcttagttgtactatttcttgttgttctggtcttaaaatttccaggcagctcggcactttcatcgtctttagctttctatttccatcatgatttttgtctgcctccctctacccccaattttttgatcagcttggtttttaaaagttattattctgctgggcacggtagtttatgcctgcagtcccagctctttggcaggctgaggtggatggatcacctgaggtcaggagtttgagaccagcctggccagcatgatgaaaccctgtctctactaaaaatcccaaaattagctgggcgtggtggcacgctcctgtaatcccagctacttgggaggctgaggcacgagaatcgcttgaatccaggaggcagagttgcagtgagcagagactgcgccattgcacaccagcctgggcaataagagtgaaactccatctcaaaaaaaataaataaataagtttgtattcaaacatatacaaaaacagagaggcaagtatcatgaaccctcatatgccatcagtagcttcaacaattatcaatactttgccgatttttttttttttttttttgtgatggaggctcactctgtcacccagggtggagtgcagtggcatgatctctgctcactgcatgctccacctcccgggttcatgccattctcctgcctcaacctcccgagtagttgggactacagtcgcccgctaccacgcccggctaatttttgtatttttagtagggacggggttttaccatgttagccaggatggtctcgatctcctgacctcgtgatccacccacctcagcctcccaaagtgcagggattacaggcgtgagccaccacgcccggcaatactttgccaattttatgtgacctatctgaacctcttcttctctctcttttttttttcctggagcaaattctagatgttgcgtcatctcaccagtatcaagcaacatctctaactgaaaagggcattattttgaacattaccacacctaacgaaagttacagtaattagtaacagtaattccttaatattacctgatacccagactgtattcaaattttgccttattgtcttggatattacttattctgctcttccttccttccatgcacccatacttccatccttccatttctttttctttttcctaataaggatccaaacagcatccacatattctatttggttattttgtattttaagtccttttaataacagtcctcacccagccactcatctttttccccctcctctatgccattgaattattgaagaaaccaggtcatatgtgtagtagagtgttagaatgtcccacactctagatttggctgatttgttcctcatggtggtgtcatttaatgtctcctatccactgtatttcctttacattagtagtaagatctagagtcttggtgaggttcaagctcagttttctaggtaagaattcttcatgggtggtgtatacatttcctgtgtatcccatactgtctggctgtcctgtgcgttagttaaggctaaggttgattaggagattctgtacattccctcctgtgactgtgctctgacatggatagttggggttaatctgcatccctctggccactccgtatgggggatttgagtaggagtgaaaggctcatgcttctgctaagcatatgcctataatcctagcaacagaaatgcggttctgtgcagtcatcgcatgtgttcctgctgggtgttctcttagggttcagtcatctcaggtaggggttggcaaactttgtaaagggccagaaagtaaatattttaggctttgcaaggcacataaggtttcaatcacatgttcttctttgttgtaacctttaaaaagtataagaaccattcttagcttacaggccataggaaaacgggtaacagactggatttggcttgcaggctttagtatgctgtaagaaatgacttaagagttcaagaatttcagcttcctatctggaatgtgctcctttcccacagaccctgctagaccaacaggagttgctttgtggacagattgctggagttgtccgctgtgtttctgacatttctgactctcctcctactcttgttcgtctgagaaaactgaagtttgccataaaagttgatggagattacctttgggtaagttgaatggcagaatcagtgctgaagtgttgcaatgataagtttaggaagttatgttgtttctgagtcttgaatttagaattatctgcccccaccaacctcatccatgtactgtgtttagtaatcaccctcgcttcctgtggtactctctgcaggttttcatcatcaagtgctttccaaaacatttctaacatattctgcattgcacacagctggtttctcctttcctttcaaagacttaggccaacttgtggaaattctgtttactctgtgttgtaaattgagtttttatcatcatcttttcttctccatgctctctacacttactgggtaagtgacccagaaaaaaatgatagatatatgttaggttttagagaacccattaaaaaaaaaaaaagaatattgcttgagtccaggagttcgatatcagcctgggcaacatagtaagacccccgtctctataaaaaatttaaaaattaaccgggtgtggtggctcatgtctgtggtcttagctactggggaggctgaggggaggattgcttgagcttaggagtttcaggctgcagtgagccatgattgccactgcacgctagcctaggcaacagagtgacaccctgtcttaaaaaaaaaaaaagaataaaaatcattcctttacattctaatagtagcatataatctaaagtgctgtttcccatggctacatttattttaaggcttcctgaggtaaagggatgcttaagtgtgggatgctatattcaactttgtaggtattatttccaacattttattacgaaaattttttaaagtactgaacagttgaattttacagtgaatactcatatacctcctcaattctacagttagcattttattatagttgttttattacctatctattcattcctttatcctcccattaattcaaattatttttattttattttattgagacagggtctcaatctgttgctcaggctggagtgctgaggtgtgaccttggtttactgcaacctccgcctcccaggctcaaacgatcctcccatctcagcctcctgagttgctaggaccacaggcatgcaccaccatgcccggctaattttttaaactttttctagaggcagggtttcaccatgttgctcaggctggtcttgaactcctcagctcaaggaatcctcccgccttggcctcccaaagtgctgggattacaggcgcgagacactgtaacccagccccaaattattttgttacagttttcaaagtaagttgcacacattagtgtactctccacacagatactctctctatcatgcatatcatcaactaaaatttaatgtttggggctgagcgctgtggctcaggcctgtaatcccagcactttgggaggccaagacagtcggatcacctgaggtcaggaattcaagaccagcctgaccaacatggagaaaccctgtctgtactaaaaatacaaaattagccaggtgtggtggcacatgcctgtaatcccagctactcgggaggctgaggcaggagactctcttgaacctgggaggcagaggttacagtgagctgagatcgcgccattgcactccagcctgggcaacaaaagcgaaactccatctcaaaaaaaaaaaaaaaaaaaaaagaaatttaatgcttgtttgtggttacatgctttacaggcgtctgtcttgccacttaacacttgtgaaattcgttcatgttgttgcatctatcagcgttcgttccattttattatcaaacagtattccgttgtctgaatatatcacaatctgttcttcttttgatggacatctgaactgtgtccagttggggatattaaggataaggcttctgggaacattcctatacaagtattttggtgaacacgtgttttcatctctcctgggtaaatatccagtcctggaattgctgggtcatagagtaggtgtatgttggattttataggaaactgttagaacttttccttcagtggttgtaccattttacattcctaccaagaatgtatgagaattccagttactccacctgctcatcagcattgagattgacagtctgttcatcttagccattctgctggatgtgcagtggtgtgttattgtggttttagtcttcacttccctgatgactaatgatagtgaggccttttcatgtgcttaatgaccacttgaatatcttcctttgtgaagtgtccattcaaagccctgcccattttttaaattgggttttatttttttaattgaattgtagttctttttatatcctagataccagttctttgtcagatacatctttttaaaataatttctcccagtttgtggcatgcctgttaattttcttgttgtcttttgatgagcagaagtttttcattttaatgaagtctaacttataaattttatctttttatggttattgctttctgtgtcttgcctgaaaaaaaccactgcctactccattggaggagatagtctcccttttttattttttgtaagaatttgatagttttagcttttaaatttagatctgtaatccactttgggttaatatttgtgaatggtgtgaatagaggtcaaggatctttttttttttttccacctggataaccagttcttccagcatcattgttgaaaacattttcctttccctattggatttccctttggttcctttgccaaagatcagatgaccatttaagcgtgggtctatttctggactcttttcggcttttccacagatctgtttgaagattctgtgtgagtaccacactgtcttgatttctatagctttatagtaagtcttgaaaccagatagtataagttctccaaccttattctttctcaagatagctttggatatttcaggttctttgtgttttcattgtacaatcagtttgtggtttctgaagaaaagctggtgggattatgattgcaattgcattcagtctgttcatcaattggaagaattgaacacttcttacatgccagactgttgtaagctcttggattacatctgggaacaaagcaaagatccttgtgctactgtagcttacattcagagggaatttttgtttatttgttttctgtcagggtttattagtttaaatatctgatgattcccttaggacagattcctagaggtagaattactacatcaagtaataggaactttttcaggctctttaaacatatgaccagataactttctaactcagcaagtacttttttttttttgagacggtgtctcgctctgttgccaggctggagtgcagtagcgcaatctcggctcgctgcaacctctgcctcccaggttcaagcgattcccctgcctcagcctcctgagtagctgggactacaggcacacaccaccacgcccagtatttttagtagagacggggtttcaccatgttggtcaggatggtctcgatctcttgacctcgtgatccactcaaagtgctgggattacaggcatgagccaccgtgcccggccaagtatttatcttctgtggaactaaccactacgctcagcattttggagatctaggactgggaagattgcggtcagttcttgctcttaaagcactctatccagctggagaaacatgatggccattcatgaaggagtttgagtcctgtccattgtttgtaatggaatccagattaaacatctactgtccaaataacagtcctaacaatgcaagggtcagaaaaaaggtcagcattattggctcgaggtaatagaacagacctcatggagatactgaaattggtggtgggcactgaaggttgtaagttctggggaaatgaacaataaggaaaaggacatttgagattggaaaacatgaattgaggtacagaacttacttgtccatggagattaacttggccagaatgaagggtgtggactcagggacaatagaagatcaatttcgatgggccagtgaagtcaggtaattgagagccctggatgccaggattctgggcttggactcaaagagaaggaagatgcttgtcttcctggtttctctctttacaggtgctgggctgtgctgtggagctccctgatgtcagctgcaagcggtttctggatcagctagttggattctttaatttttacaatggacctgtttccctagcttatgaggtacaagtatggggttgaggagtcttacattgggcctctttataaaaaccggtattgccagaatgcagcacttactctggggtcttgtatacttcatataaacacattgtgtctggggacaaggtcaggagctcttggaggcccctcatatgcctttgggcctagtggcataggtcacatttattccaaatgtttatccccatctcctccctgggatgtttagaaagcgcaggccctgcttgccacccccacgcggcaggcgccgtggatctgtgatgggataggtttaaaacaggtcctcccttccggtcagtttcctgtgtgaggaacaatttttgaggtagttgggactctggccaaagaatctgtccctcaaaatctcagatattgacctgaggctctttctgttttagaactgttctcaggaagaactgagcacggagtgggacaccttcatcgagcaaattctgaaaaacaccagtgatctgcataagattttcaattccctctggaacttggaccaaactaaagtaacattttcatcctccttattcattttatatgtaagactagggcttctggatacttttttaatattcctgaagtgaactatatctggaaaagtgagtagaatgtcacttctcaggcagggccatgacacggcaggtcacctctcagcctcatttcccttatccaaagaatggtgtcagcatacctgccttcttgaactgttttgatgatcaagtgaagcagtacctcaaatgacaccaagtaaatgctcagtaaagggaattagtattttgttcatgcctcagaagtgttgaactcagtaatctgaaggccgcctctcttgatattcatatcatatgatctagttattctcagcatcaaaaatgcccagcatgaacatttcaaaaacaaggttgctgtctttgagagagaatggttgggaactgtttttgtatctctgagccgctccgtttgcggttggcactcagtgaaacctaggctgcttgtgtggctggcctgaccacctgtgctgccccattaagagccagctacctgagccctgactcacagccctctcctgtgtctcactgcgatagtaaataatgtccctgtagcaggggtgtagcactgtggctcagccttcacagagcatgactccaccagacatggggaagggttttccctgctccagtctggaaaacttcctgtagctggccccagagctttatagaatggctggctgggatggcacagtcttgaggctatgaagaataaacttcttaatgtgtcagcagctccggaggctccattaacactagttctaacagctggtggatacttgctggttctagctggcaggtggaagtctgaggaggctgctggttattgctggctcttcctgaccaggtccagatgcttttcttgtatttttagggacttctaggcccctgactccatacaaggaatgtggaactgaggcatatttccccgagtgaaagagcatgatgttttcattttatgtgatggaatagagtcatggaacctggtcagacatcaagccacctgtatcaccatggggattgtgcttcagaaggaaagtggaggatagggtaggtgggtttcacctggtaccatgacatgtatttataggatacaccctcctcttctgctgccgtgaggtcttagcattgtcagggtagacagtcggtctcccaggccatctactttgacccctttgaatagccatatgccatatttgctgcaccttctagcttctggacaggcctccttgttctaagaatttggcatttagtggtgtcagcagttctgagtatagagaggtagaatagtcccaagccatggcacagctttcactgtgtgacacattctccttttccaggctttgagctacaccctgtccagctgttctgtacaaccctttccccttttctcccttcctgattgtgagcatgctgatgggtgggcatgatgcctcttgccctgcacaggtggagcccctgttgttgctgaaggcagcccgcattctgcagacctgccagcgctcgcctcacattctcgctggctgcatcctctataaaggactgtgagtaactccagacccctttcttccagccccattcccttgctgcacaactgaccatcagccacctccagatcacagtggggagcccagtctctggccagttccaagtgggctggttcggcaaatatcaggtagtttagatttgactcagtttagaaagacaggtgtgtacctgtctttgagcaaagctgagaaattggaaatagttgtgttcagaaaagagttaagaatgtccctataattctcagtatggggcatgctggaatagttgtcagtctgcaaaatgctaatgcagagtcccgagcgttgccagcagccagcactgtagtcaagaggcatggaaggggcctgctgtgaccctcctcctgctgcccagagaccctggtgtgcttgcctcagctcagctctgcaaagcagccttacaggcccttatccagctgccttcaagcctcttggctgggccagtgtcttggttggcctctgagaattcacttcacttcttcatgtagttggagggcttcttggtgaatctgagtgcccaagagccactctaggtcatctaaggcctctctcctcatggagggtttgctgtcacagcccagggcaggcagggccattgcgctgtgcccggagcttcctgaggagcaggcaactactgtgtaaatggagaagcactgaggctctcgcaggggcccttgggccagacaggctcggccccagatcctcccttctttcgccagccatgcggccttgggcaagttgcttagcctcaattttctcttctgggaaatagacatcccttgtgaagaatgaaatgagatgacagatgcggaagaaccgagcatagaccctggtgggctttgcactcttcttccttgccccggttcttatcatgatggttctgaatcagctgtgggatttccaagttcgtcagtgacatacccaccaaagacagtattttttttccccttttctcattttgcatttcttaaatgtatatatatatatttttttttcttttttttttttttgtagggacgaggtcttgctatgttgcccaggctggtctcaaacacctggcttcaagcgatcctcagcttcccaaactgcttggattatagacataagccactgcacccagcctgtatttacattatacggctaatacatgaatacattttcactgtaaacaaatcaatcaatagaggaacacacagagcacaatttaaaagccccccttctttcttcaccatttttgtttgtttgtttttgagacacagtcttgctttgttgcccaggctgtagtgtagtggcataaacacagcttactacagcctcgacctcttggactcaagtgatcctcccacgtagctggaacaacaagcacttgctaccacacctggccaagcttttgattttttttttttttttttttgtagagatgggatctcactatgttgctcatggaggtctcaaactcctaagctcaagttattctcccacctcagcctcccaaagtgctgtgattgcaggagtaagccactgtgcccagcctctccctcactcttaacctgtcctcaccattggcagtttggtgggcatcttgctctttctgtgtgtttgtccccactggtacatgtatgcatatattgcttttgtttatttttgctatctccttaaataggatcacatggtttctcaacgcatacagtgaagatttccttaccggttcatatgggtctacctcattcttatgaggactgcatactttttgggattctggctgtgttgtgctttactgtcttgttgatgaacattttggtggtttactcattttttaattgtttttaccattctccctgtaatgaatattcttacgcatacatcttggtacaagctgagtcaaagggtttggatattttaaatgttggtaggaactgccagagtgccctctgtaagggttttaccagttgaaactcccaccagccaagtccccaagatcctcgtcaacacgggctgttaggcatctttaaaatttggagtgttttggtgtatttcgtctcatggtgttcttgttctgtgtgtgacctcctaggattgtcagcacccaactcccgccctccctcaccgccaaggtcctgcttcaccgaacagcacctcaggagcaggtattgtaaagtccacccacctggctggacagcatcccccagagcactggtcactgagcctgaggctggagggatcaggagcagaggccgtggagcagttgtttcacttggtcttgtcaggaccccaagtcctccaatgtcattctcctcagtagtgaagccattggtgaggctgaaagaaaatgttttcttccacgagctaggcctggatagttgttttttcttcaaaccaaggaaatcttggttgaattcgacttcccataagaatttgatgtctctttatgtcaaagagatgttagacttttcagagacagactgtaaaggatgtgtctttagaaagatttagggggttgggcacggtggttcacacctgtaatcccagcactttgggtggctgaggtgggcagatcacttgaggtgaggagttcaagaccagcctggccaacatgatgaaacccatctctatttaaaatacaaaaattagctgggtgtggtggtgcacacctgtaaatcccagctacttgggaggctgaggcaggagaatcgcttgaacctggcaggcagaggttgaggtgagctgagatcgcgccactgcactccagcctgggtagcaagagtgagactctgtctcaaaaaataaaaataaaaataaaaaaataaggaaaacaaactcttctaaaatacttccattttatatttatttaattgtttttatattgaaaaaaaagccatgcatgctcattgagaataaaattgcccatctttgaactgtacagggatagccactgccagcatctggcatatctccttccagtcctttttttgttttgtgtatgaagctgtggtttccagcgtatcatgaggctgtctttttacatgtattagtgaacaggcatgtaaaatgctggtagggctctattcagcctcctcagccactgtggctatgggtgtcaattcaagtagcctttctgggaaacactttgataatgagaacgttaaggatgccctttatttttttcctaataatttgacttctaggaatatatcttaaggaaataatgtaactgctgaaaaaaatttatactcaaaacttgatcacaacaagctttatgaaagtgaaaaatcagacaaaacttgaatgcttaaagtaggaggtggcaaattatggcctgtgggccacctgcctacaaatgaagttttatttggctgcttttgagctataatagcagaaccaagtaggtgggacagagaccatatgccctgcaaagccaaaaatatttactgtcttgtcttttgcacagaaagtttactaattactggtctaaggtaggtaaatgattaatttactcatatcacttaaaccttcataaaattttaatcagccgtttaaaatggccaaagatgttttagtggcaggaaatgcgtgttactgttttaagcagaaatatgaaattttatatagtgtggcctcaaaagtataaaaactgcataggcttaaggaaaaaatacccaatattaatagtactagcttggggatgagggattgtatgtgattttttttttcaacgctttgtctagagtaaattgaggttaggcttagtaatctaaaacatagttttttaaaaatcaccaaaaaaggaagaacaccatatcattctaagattgaaagtcattttggctagaagagcagttcttgtttggtttggttttgttttggtgggttcttttggaaccctcagattgaaacgagagatgttttcatttttgagaaaatcatcaggttttaggccctgattgtgaaccagaacaaacgagagattgggtatagcattttgtttaagtcaaatcctttatcgtgagagtcacagtattttgacatttttattataatggaatttatgtgaattctacatcagggctgtggcagatgtgactgtattctagaatatgagttccccaaaggtgtaaaagagaacaggaatcctcaattttattcccagaagggagagagactgagaaaatcagaacgtagagtgtgatgtgagtttgggtggagctgctgccttgcagcctgtgtgggcccaggttcttgcttcatcccagccatagtgggagccagcagcttgggggagcttctgttccatctgcttggctcttagcatgtggttgggacaagctttctgggcctggctaagttttatgaacagatggcacagcaaattcctgatggttaggtcaagaggagaatgtggtgcccagcgccaacttctgtgtgtgtttgttttcagagactccctacgggagaggatgccccgcaggaacatggtaagtagtgaggcgcatggttgcctcttgagaacggcggtcttttatgctacctacccctgtacaagttatgcgaaggaaaccaagccatctgcatgtttatttcctctgctcataataggaaaatggatgttatggagcttcaagaatcgagttacccaccagaaccctaatggtaaagctatgattttaggcatgctgtcaaatccctgctttcagaccctccttaacttcatattgtgagactgctcggtcaagtgccaggagattgtgattgggagagggtaaggcaaacagcgactgccagaaagaccttttgcaggatgtggaggcgtcctcaggagagttatttcgatttattctgaagcctgagttggagcagatccctttcttagcttatatcttcttcttgtaaaagtgcttttcaacctttctctcccgaacatcttccttctccaaagctgggagtcatgttgcctgcagggactctttccttactgggcccaggagttcgaggtgcagtttggcaacctgtgtcctggctgaggaatgcactcacagcacccctttccgagcccacgtgtgggttggatgcatcacgccagtgcagctattgccccgctgccctctctggctcaggggaaagtcctgttcatattgctttgcaattccaggagcggcattgcccccgaatgtccagattatccctgtttttgtgaccaaagaggaagccattagtctccacgagttcccggtggaacagatgacaaggtaatggagtgcacagagagttaaccttgcaccacacctgagggaccccatcgcgtgattggttaaaaaacaaacctctgatacatcccatcgttccttaattccatcttccccatgccctgtcttgtaaaggagcatctgaatcttgagtttgttaagaaacagagtggcatagagagatgacattggctttcatatcccagctctcttacttataccagctatgggaccttgggcaagtccattccctgcctgagcctcagttttttcatctgaaaagtagacaaaatagtatccctttcatgagttcattgtgacacttgaaaatagtataggtacagcacctagtatagggcctgatgcgtaggagaccttccagatgtgggtcagtcttattcagtgggctctgccattttcagtaggtgagtctggtgtcactacgtaaagccccaagggccagatgttggtgtatttttactcttgtgatttaactctggtggcctcttaggctctgtggcctcaggcacccccttgtccttgatgcctgtgctttagtcttcactgtggaagggcacttgccctgcagtctgtcaacgtgccccttccttacatctctcttgtttgccaggtctctagcatctccagcaggactccaggatggttcagcccagcaccatccaaagggtgggagcacatctgccctgaaagaaaacgccactggccatgtggaatccatggcctggaccaccccagatcccacatcccctgacgaagcttgtccagatggcaggaaggagaacggatgcttgtctggccatgatctggagagcatcaggcccgcaggactgcacaactctgccaggggtgaggttcttggcctcagctcctccctggggaaggaactagtctttctccaagaagaactcgacttgtctgaaatccacattccagaggctcaggaagtggaaatggcctcaggtcattttgccttcctacatgtgcctgttccagatggcagggctccttactgcaaggcatctctcagcgcctccagcagcctggaacccacgcctcctgaggacacagccatcagcagcttgcgccctccctctgctcctgagatgctgacccagcatggagcccaagagcagctcgaagaccatcctggccatagcagccaagcccccattcccagagcagaccctctccccagaaggacccgcaggcccttgttattgcctcgcttagatccaggacagagaggaaacaagcttcccacgggggaacaaggcctggatgaggatgttgatggggtctgtgaaagccacgcagcccctggtctggaatgcagttcaggctcagcaaactgtcagggtgctggcccctctgcagatggaatcagctccaggctgacaccagcagagtcctgcatggggctcgtgaggatgaatctctacactcactgcgtcaaagggctggtgctgtccctgctggctgaggagccgctgctgggagacagcgcagccatagaggaagtggtgagtgtcctcagaccttctcctgcccctctgcggcctctgccgatctcctgtgcttccctcacagcactgtgccaacacccagggaagagataaaggctcagccctcagttgtgtgaccctgggcaagacgttcttgtttagacgatggaggtattacctgcctctgtgggtttttgtggggggtaagagtgagtcaagcgcatagcactggtggtgcattggcatccaacaagtgttggttctcttcttccgctgtttctagttttgcagagcgcaggccttggagaaagggaaggcctgagatggaatcctggcccttgtcctctagctgtgtgaacttgcccacagacctttgtccccttgagccttggctaactcctcagtcacgtagggatggtggtagaccttcctgttccagatgcagtgagataatgcaggcagagactgcacacgtacgtgcatgtgttgtgccgcccctgctcatggcctcatttcctagcctggacagctctaggttctgtgtcagctggaaactcctccgcagtgtgtcacagcctgggttgggagttccctagaaacccagtgtttccctccatagccccagcatcgtacctgatctgaagctccttcctagaaggctgggatgtctgaaatcctgcctggctctggagggctcttaaactattgcagccccttccccgcttagaggcttagagtggtaaactgaccttccctggggcccacgctggagattcgttgctatagtaacagccttgctttagtaggcagggaaagtggtagcagtaagaacagcaggttgaaattgctgcagggcaaatggtgtcttggggctttccttgtttttattcttaaatgtgtattattctaagctgatcttactatcatgcagggcttgtgaccctccataaatgagctagtcaccttgaaatacagaagaagagataagactgcacagcagcttccttgcacagagctcctagcaagagaatgctctctggagctgtcaggcttctctgtgccctttccacagacgctggatcactgagttatggctcatttgcttcctgtatccccattcaccatagctaggagtgactatccatctccttcttatagcagtgcggggagttgtggctgcagtgttaaatgcctcatctccctgccaatgccttggttttcatggtctgttctgcacagtgtcgagccttggaagtgtcattttgaagggcccagtgtttgaatgcaataaagtggatataatacctctctttttaccttcccccacaaaaaggaaaaaatagcccaggctgctctttgagatgtattctgcaccaactatatgtgaaatacttcgcatctctcgttttagccaagccttagaacagttctgggaaggaggcattgtaactcccattttaccagtaagaaaacagcctcattgagatgaaaagacttcctgcaagtggcaggtccagaattcttgcttgtttctggttccccaccccagcctctctgtccccccactgccctgcccttgcagtgatagctgggaagctgaagaaagggggtcagtgtcctgccttctgtggctcgtgctctatggccatatcccctggtttgtcaaggtctatccatgctgttacgacatcagcctccatgggcttctgtggaaagcagggtttgatgctggctaggccccgggaaatagactgcagttttatggaagagaaaaagctaatcttttcttcttttttttttttttttttgagatggagttccgctcttgttgcccaggctggagtacaatggtgtgatctgagctcactgcaacctccgcctccccggttcaagcggttctcctacctcaacctcctgagtagctgggattacaggcatgtgccaccaggcccggctaattttgtatttttagtagagacggggtttctccatgttggtcaggctggtctcgaactcctgacctcaggtaatctgcccgcctcggcctcccaaagtgctgggattacaggcatgattgcacccatccctgaaaagctaatcttttctagtatggagtgactaactttgatcagcccactggtttgagagtgggtttgttaatcagacccaaaggatttctgttttataatcaggaagaggtgtttgattgcctttttgtcccagactagccttgaaaatactttatctgatttccctgcagcccctctgctactgtctagaaaaaccaaatacccccagttacggtgagcacaccccttttgcaagggctccttaatgatgttacatactgccaagctgcccttgtgtcatttggctgtcttgtctttgggtggatcagcttccacagggagtaggggtagggtgaggggcagcaggggttgggattggtgaaaggagccctgggtggagcagccaggagggttgggattggggctggaattccctcagagggagtggaataggctcacaccagggggcagcatagagccgctgatagtccattactcagaccccaagataatctccttgaccttcaaacacagtgatcagattaattatttatcactacaataggacatggagcttctgtgtacagtacatgaggcttgaagttagtgtgagagtgttgccataaaacattttatgaaaaaacaccttcccccaactgggaaaccggtatctctaagtgaatgtgtgttccatgcattgctcctgctgcacgctgtgtcacacactgacatttgtgccacttgctttcgtgtgcactagaagtcagaggacccgggaattagcctcagctctgtgttgcctagggctgttgtgaggatcacattatgtagcagtatatatcggtggctggcaaacattttatgtaaaggaccagaaagcaaatattttcagctttgcacagcttttcagctctgctgttgcagtacaaaaacagccatagacagtatataaatggtatgactgtattccagtaattatttatggacatggaattggaacttcatataatttgcacatgttacaatattattcttttgacttttttccccaaccaagtaaaaaaatataaaaaccattcttaggtctcagactgtacaaagataggcaacaggctggatttagtttataggctagagtttgctgacccctggtatgtatgaaagcacttggttatcagtaaaaattatccacatgtcatctgacatagcatcttgtgattaactgtgtttttatggttaagtgatcctatcttgagtgcaagttaggcagaagattttggaagcaaagctccgtgcctgtggggaaacagtttttggcatggctcactctctgttcttattgtttcttcctctggacaccagctcagcatggaagggatgactgttagcacgttcttgaggtccaaaaactttcagtgaggctgtggtttgacttcatcaggtgaatgcttatgtgtgcccgtgtgcgtgtcggcacatgcacacacacacatctgttcaaataagaggctcagtgttaaacgcagtgttggtcaggctctctcagtgatctgaacatgagatattatgattgtctttcctgagcacatatctttttacatagctctgcaaccttggtttaaaccaaatagctcataaattggcagtgcttggcattggatgtgttcatttattcattcatttagtggattcatttattgagcacctactaggagtcagacactctactaagcattgaggatacaaaactgagcgcatagaaaataactttgtatgtcacacctattgacttgaaatatcatttctgagactttcatacaggaaaactgatttaacaccaatatactcccaaaataacatgtaagcttcatgacatttacttcagaagcattctgtttgcatctctgtactttttatatgcacttatttttcttacatagctgttgaaaaatagtccacaaattatctgtgatctctaaagagacaccatttcttttatatgattattttcatttccttgactttataaaaagactctgcctcaggatagcactttagagtttacaaaggacttttggatgtgtcatttcatttaagtcactcaatagtcccgtactgttcccattttgcagttgactagaaaaatgaggcacagaaaacttggtaacttgctcctggtcatttgactaaaaagaggctgaacttgggatgttttttacctgggaactgcaaatgtttggggacagtgaccttctttcttgtggctgaagcaggcccaggaaaccccatttcagaccaagcctattatgacaggcctggcctactgagtcaagccctcagtggagcttgaggaacactgcacagccattaaagaattatatgatagaatatttaaagacgagaaaagcagttcatgctgtgttgttaggttaaaaaactatcagtcattatttatgatttgatctcatttttattttacagaaaaagagttacacaaaacagtttagtccagtcttttcaattgtacttaaactttatctccttggaggtttgtaaaaatacaggtacttgaacccatctccttgacagtcgtcctcaactgtattcctcttctgaaccatcaagtgcagaaagctgtttgactgacactcagtccttccaagaaagccaggaccgtgctaggtgtagcagagagaagttaccgtgttacatccagtgagggacttctgtacccagggccagtgagaaacaatgcgggatggtcccaggctgtttgtattgtgaaatcatgcagcctgggtaggaaagccatggttaaaataagatacaccacagtggtgacagtggctattactggatggtgaaatgatgggttgttttcttgttatttttttgctcatctcttttctaaatctcctacaatataatcattatttttaaaaacattagaacataagggtgaaagaaaaatgttggtgagagtccattttgctggatcaagtaggcagtaagatactccatgaatgatttttttttttttttttcgagacagagtctcactctatcacccaggctggagtgtggtggtgcggtctcggctcactgcagccttaaactcctggcttaagtgatcctcctgcctcggtctcacaaagcactgggattacaggtgtgagccaccgtgcctggctggaggattttttttttaactaagtctgtggttaactagccctcagaaggcttgctgaggtcagccctacaagcccatgaccctctccccctttgcagtaccacagcagcctggcttcactgaatgggctggaagtccacctgaaagagacgctgcccagggatgaggcagcctccacgagcagcacctacaacttcacacattacgaccgcattcagagcttgctgatgggtaagaaccagccaaggggcctggggcgacggggatgccagattctagatgggtggagatgagaacttgagccccagcatcatgatgacacggctgtgcacagagttgtctgacctgcgttcagggctctcttctcaccgggagcccagtcccactgagtgtggcgttcactgggcagacgcttctctgctcatgtgtctgtttttggcgtttcccagtgttttgagagaagttcatgttcacatatctgtgatagggtttgtctcagaatgttgagatccacacgcagaaaccgggtgctgcatcgcacagcggcggcagccgaagcccaatgccccgggcctttgtctctgccccgggcagccaactcatggccttgagccgtgctcagtccccgtgttcagtactgggcttcatggggtgggagggcagaaggtaactgtctgctcttcacaactctgtgtcctcttctggaagcaaacctgccgcaggtggccaccccgcaggatcgccgcttcctccaggccgtcagcctgatgcatagcgaatttgcccagctgcccgcgctttatgaaatgactgtcaggtgagcctccctgagtcgctccccaacctactctccacggtcctgctcatgggaaccacctgtggggcccaggcagcgccttattcctaagtagatgaaaaacattctagttactctccttaaggccttcctttgtcggttcctattgccgccatcatccactgttgtgcagtcacgtgccatggactttctggttcccttcctactttagacgcttggggtccagcagtgaaggaacctgaggtcctcaccatcatggagctacatccattactagggacggtggctccgtctccttgctagaaacagtgttgaaatattgttgtctttctaattacaaagtaatatggctgggcacagtggctcacacctgtaatctcagcactttgcgaggcagggggatcacttgaggtcagggttcaagaccagcctggccaacctggtgaaaccctgtctctactaaaaatacaaaaaattagctgggcagggtggtgggtgcctgtagtcccagctactcaggaggctgaggcaggagaatcacttgaacccgggtggcagaggttatagtgagctgagatcacaccattgcactccagcctgggcaacagagtgagactgcgtctcagaaaaaaaaaaaaaaaaaaaaaagtaatacgtgctgatcatacagtcatgcagaatgcttggaaatgtatcaagtaaaacattttcctctctcatctccatcacacaccaggaaataaccacattttacagtttggtatatattgctccaggttttattggtttttggtttttattttttgcacatataaattgtatttttaattattttaagtcttctagaaaataggattctactaatgtacaattttacagttgtcttttttcacattatgtcatagcttgaacacctccatgccagaagaaatattatgattattgtaatttacagtatttaaccaaccgaatttgtttttttctttctatatgcttctcttatgaaaccagaaagggagtttgggctttaaagatcactttataaaagcccgaggagactgggacctgagaatttggttgacaactggtaacagaaaataaagcaagttagcaggtcaagggcagtgctggcaatgtgtatattagtccacgtagtccttggaaccatctggtcaagggcattattttttatttatttattttgagatggagtctcactctcgccaggctggagtgcaggggctcagtctcggctcattgcaacctctgtctcctggtttcaagcaattcttctgcctcagcctcctgagtagctgggactacaggcacctgccaccatgcccagctaatttttgtatttttagtagagatagggtttcaccatgttggccaggatagtctcaatgttttgacctagtgatctgcccaccttggccttccaaagtgctgggattacaggcgtgagccaccacgcccggcttcaagggcattttttaaatcctcattttacagatgagaaaattgaagcacaaataggataagcagcttgcccagggttatattcttcttaagtggcagggccaggatttgaagcattttctccaactgttaagcacatgtatgacctttccacacacatttcagtgtcggggcagtgtggtccagtgtgaggggcatgggtggtggactgacagggagcctgggtgggtgattaggatggttctgattccctgtcacccgccacacttgagcgccaggtgttctgctgcctctcagcgtctccagccaatattccaatagatctttctgtcagaaatgtgtcttctctggctttaattcacagctgccccaggctggcaacccagaggcaacttgcatctacagtcactggtttgggaactggctgtgttgggggtgtgtgtgtctgttttgtgggaggtggaaacaagtaaaatgtcagcatctgctccaccaaccaccttgtggccctgcagtatgtcaccttccttagagctgagaggggtttagtgttgagacacatagctcaaggcatttgttgagagattatttcaataacagtaatagaaacaacagctaccatttctttttttttttaattttattattattataagttttagggtacatgtgctgtgcacaacgtgaggtgtgttacatatgtatacatttgccatgttggtgtgctgcacccattaactcgtcatttagcattaggtatatctcctaatgctatccctcccccctccccccaccctacaacaggccccagtgtgtgatgttccccttcctgtgtccatgtattctcattgttcaattcccacctatgagtgagaacatgtggtgtttggttttttgtccttgcaatagtttgctgagaatgatggtttccagtttcatccatgtccctacaaaggacatgaactcatcattttttatggctgcatagtattccatggtgtatatgtgccacattttcttaatccagtctatcgttgttggacatttaggttggttccaaatctttgctattgtgaatagtgccgctataaacatacgtgtgcatgtgtctttatagcagcatgatttataatcctttgggtatatacccagtaatgggttggctgggtcaaatggtatttctagttctagatccctgaggaatcgccacactgacttccacaatggttgaactagtttacagtcccaccaacagtgtaaaagtgttcctatttctccacatcctctccagcacctgttgtttcctgactttttaatgatcgccattctaactgatgtgagatggtatctcattgtggttttgatttgcattgctctgatggccagtgatgatgagcattttttcatgtgttttttggctgcataaatgtcttcttttgagaagtgtctgttcatatccttcgcccactttttgatggggttgtttgtttttttcttgtaaatttgtttgagttcattgtagattctggatattagccctttgtcagatgagtaggttgcgaaaattttctcccgttctgtaggttgcctgttcactctgatggtagtttcttttgctgtgcagaagctctttagtttaattagatcccatttgtcaattttggcttttgttgccattgcttttggtgttttagatgtgaagtccttggccatgcctatgtcctgaatggtattgcctaggttttcttctagggtttttatggttttaggtctaacatgtaagtctttaatccatcttgaattaatttttgtgtaaggtgtaaggaagggatccagtttcagctttctacatatgaacagctaccatttcttaaccactcacaatgtgttaagcactcacttaatctcattctttaaaacaaaacaaaacaaaaacaccaatgaggacacatactgttgcaacaaacactgtacagatgaaaaagctgggactcagaaatgttgaatagcagcccaggacacacactaggaagtaatagggctgggattagcacctgagtgtgtgtgactccagatccatgctcataaccatctggcctcggagccctcccacagggctgtgagaagagattgtcttgctgggccagtgggtgcaggagacactgaagcttggaatagggtgggatttttctcccttacagggaaggagagaattgagtgaggggagccttagcagtccctgactccaccctttctcactagatttgggggaaactgaggcccataatagttggagaggcaggatccagaaaccaggggggtttgtttaccttggcctggagttggctcctcccaggtggctccgcctctgtgtagtgccctcatccctccctctctgtgtccacaggcttcctgtcacttcgtgtcacatcccactcctgtccttcactccctctcagtctatccagccacccccagtgtggagagcagactagactcctttctcggacactgccattgcctcgtcatagaggcagggcagccccagctactcactctgagcctcagggtccttgtctgtgaaatgggaccataccaccactgcagagcttatgtgaggggcaaagcagagactgtatgcagagcacattgcatagctgccagtatgtcaaaaaagccagcactccacagttcctttatgcaatacttataactccaggatctgtggctgctgccactgtggatggtcccgccacggactcttccagcatctagtgagctgaaaggaaggaaagatggtattggcactgaagcctgaaactcagctgaagaaatagaattccgtgccatgacagctgcacatgccacattgggtgtcctgggtcctctgtgacaagaaccttactgaggtctctgtgtggtctgagattagcaccagcagcattggaccgttgccttctttcttcctccaacagaaatgcctccacggctgtgtacgcctgttgcaaccccatccaggagacatatttccagcagctggcacctgcagcacggagctccggcttcccaaaccctcaggatggcgccttcagcctctccggcaaagcaaagcagaagctgctgaagcacggggtgaacttgctctgaactgcacccaggaggtgactgggaaggagaaaaccagcaaaggaagctctgccttttataattgaaaaggcccctctattttatttttcttgaaaacattcccttttttaggaaccaaatg

SEQ ID NO: 12457 - DNA, 2772 bp, Homo sapiens
attctctggggccacctgaaggctttcaaacacagtaataagccctcctcgggctgggaaacaggaagctgtgttttaaatgccgtgatcactggattaaaggaaacatggctccactctgttctcttgccaggtggaattatttttttctttatgatggttccaaggtaaaggaagaaggcgatccaacaagagctggcatttgttacttttatccttcccagaccctgctagaccaacaggagttgctttgtggacagattgctggagttgtccgctgtgtttctgacatttctgactctcctcctactcttgttcgtctgagaaaactgaagtttgccataaaagttgatggagattacctttgggtgctgggctgtgctgtggagctccctgatgtcagctgcaagcggtttctggatcagctagttggattctttaatttttacaatggacctgtttccctagcttatgagaactgttctcaggaagaactgagcacggagtgggacaccttcatcgagcaaattctgaaaaacaccagtgatctgcataagattttcaattccctctggaacttggaccaaactaaagtggagcccctgttgttgctgaaggcagcccgcattctgcagacctgccagcgctcgcctcacattctcgctggctgcatcctctataaaggactgattgtcagcacccaactcccgccctccctcaccgccaaggtcctgcttcaccgaacagcacctcaggagcagagactccctacgggagaggatgccccgcaggaacatggtaagtagtgaggcgcatggttgcctcttgagaacggcggtcttttatgctacctacccctgtacaagttatgcgaaggaaaccaagccatctgcatgtttatttcctctgctcataataggaaaatggatgttatggagcttcaagaatcgagttacccaccagaaccctaatggtaaagctatgattttaggcatgctgtcaaatccctgctttcagaccctccttaacttcatattgtgagactgctcggtcaagtgccaggagattgtgattgggagagggtaaggcaaacagcgactgccagaaagaccttttgcaggatgtggaggcgtcctcaggagagttatttcgatttattctgaagcctgagttggagcagatccctttcttagcttatatcttcttcttgtaaaagtgcttttcaacctttctctcccgaacatcttccttctccaaagctgggagtcatgttgcctgcagggactctttccttactgggcccaggagttcgaggtgcagtttggcaacctgtgtcctggctgaggaatgcactcacagcacccctttccgagcccacgtgtgggttggatgcatcacgccagtgcagctattgccccgctgccctctctggctcaggggaaagtcctgttcatattgctttgcaattccaggagcggcattgcccccgaatgtccagattatccctgtttttgtgaccaaagaggaagccattagtctccacgagttcccggtggaacagatgacaaggtctctagcatctccagcaggactccaggatggttcagcccagcaccatccaaagggtgggagcacatctgccctgaaagaaaacgccactggccatgtggaatccatggcctggaccaccccagatcccacatcccctgacgaagcttgtccagatggcaggaaggagaacggatgcttgtctggccatgatctggagagcatcaggcccgcaggactgcacaactctgccaggggtgaggttcttggcctcagctcctccctggggaaggaactagtctttctccaagaagaactcgacttgtctgaaatccacattccagaggctcaggaagtggaaatggcctcaggtcattttgccttcctacatgtgcctgttccagatggcagggctccttactgcaaggcatctctcagcgcctccagcagcctggaacccacgcctcctgaggacacagccatcagcagcttgcgccctccctctgctcctgagatgctgacccagcatggagcccaagagcagctcgaagaccatcctggccatagcagccaagcccccattcccagagcagaccctctccccagaaggacccgcaggcccttgttattgcctcgcttagatccaggacagagaggaaacaagcttcccacgggggaacaaggcctggatgaggatgttgatggggtctgtgaaagccacgcagcccctggtctggaatgcagttcaggctcagcaaactgtcagggtgctggcccctctgcagatggaatcagctccaggctgacaccagcagagtcctgcatggggctcgtgaggatgaatctctacactcactgcgtcaaagggctggtgctgtccctgctggctgaggagccgctgctgggagacagcgcagccatagaggaagtgaaatgcctccacggctgtgtacgcctgttgcaaccccatccaggagacatatttccagcagctggcacctgcagcacggagctccggcttcccaaaccctcaggatggcgccttcagcctctccggcaaagcaaagcagaagctgctgaagcacggggtgaacttgctctgaactgcacccaggaggtgactgggaaggagaaaaccagcaaaggaagctctgccttttataattgaaaaggcccctctattttatttttcttgaaaacattcccttttttaggaaccaaatg

SEQ ID NO: 12458 - DNA, 20593 bp, Homo sapiens
gtgaggatgaatctctacactcactgcgtcaaagggctggtgctgtccctgctggctgaggagccgctgctgggagacagcgcagccatagaggaagtggtgagtgtcctcagaccttctcctgcccctctgcggcctctgccgatctcctgtgcttccctcacagcactgtgccaacacccagggaagagataaaggctcagccctcagttgtgtgaccctgggcaagacgttcttgtttagacgatggaggtattacctgcctctgtgggtttttgtggggggtaagagtgagtcaagcgcatagcactggtggtgcattggcatccaacaagtgttggttctcttcttccgctgtttctagttttgcagagcgcaggccttggagaaagggaaggcctgagatggaatcctggcccttgtcctctagctgtgtgaacttgcccacagacctttgtccccttgagccttggctaactcctcagtcacgtagggatggtggtagaccttcctgttccagatgcagtgagataatgcaggcagagactgcacacgtacgtgcatgtgttgtgccgcccctgctcatggcctcatttcctagcctggacagctctaggttctgtgtcagctggaaactcctccgcagtgtgtcacagcctgggttgggagttccctagaaacccagtgtttccctccatagccccagcatcgtacctgatctgaagctccttcctagaaggctgggatgtctgaaatcctgcctggctctggagggctcttaaactattgcagccccttccccgcttagaggcttagagtggtaaactgaccttccctggggcccacgctggagattcgttgctatagtaacagccttgctttagtaggcagggaaagtggtagcagtaagaacagcaggttgaaattgctgcagggcaaatggtgtcttggggctttccttgtttttattcttaaatgtgtattattctaagctgatcttactatcatgcagggcttgtgaccctccataaatgagctagtcaccttgaaatacagaagaagagataagactgcacagcagcttccttgcacagagctcctagcaagagaatgctctctggagctgtcaggcttctctgtgccctttccacagacgctggatcactgagttatggctcatttgcttcctgtatccccattcaccatagctaggagtgactatccatctccttcttatagcagtgcggggagttgtggctgcagtgttaaatgcctcatctccctgccaatgccttggttttcatggtctgttctgcacagtgtcgagccttggaagtgtcattttgaagggcccagtgtttgaatgcaataaagtggatataatacctctctttttaccttcccccacaaaaaggaaaaaatagcccaggctgctctttgagatgtattctgcaccaactatatgtgaaatacttcgcatctctcgttttagccaagccttagaacagttctgggaaggaggcattgtaactcccattttaccagtaagaaaacagcctcattgagatgaaaagacttcctgcaagtggcaggtccagaattcttgcttgtttctggttccccaccccagcctctctgtccccccactgccctgcccttgcagtgatagctgggaagctgaagaaagggggtcagtgtcctgccttctgtggctcgtgctctatggccatatcccctggtttgtcaaggtctatccatgctgttacgacatcagcctccatgggcttctgtggaaagcagggtttgatgctggctaggccccgggaaatagactgcagttttatggaagagaaaaagctaatcttttcttcttttttttttttttttttgagatggagttccgctcttgttgcccaggctggagtacaatggtgtgatctgagctcactgcaacctccgcctccccggttcaagcggttctcctacctcaacctcctgagtagctgggattacaggcatgtgccaccaggcccggctaattttgtatttttagtagagacggggtttctccatgttggtcaggctggtctcgaactcctgacctcaggtaatctgcccgcctcggcctcccaaagtgctgggattacaggcatgattgcacccatccctgaaaagctaatcttttctagtatggagtgactaactttgatcagcccactggtttgagagtgggtttgttaatcagacccaaaggatttctgttttataatcaggaagaggtgtttgattgcctttttgtcccagactagccttgaaaatactttatctgatttccctgcagcccctctgctactgtctagaaaaaccaaatacccccagttacggtgagcacaccccttttgcaagggctccttaatgatgttacatactgccaagctgcccttgtgtcatttggctgtcttgtctttgggtggatcagcttccacagggagtaggggtagggtgaggggcagcaggggttgggattggtgaaaggagccctgggtggagcagccaggagggttgggattggggctggaattccctcagagggagtggaataggctcacaccagggggcagcatagagccgctgatagtccattactcagaccccaagataatctccttgaccttcaaacacagtgatcagattaattatttatcactacaataggacatggagcttctgtgtacagtacatgaggcttgaagttagtgtgagagtgttgccataaaacattttatgaaaaaacaccttcccccaactgggaaaccggtatctctaagtgaatgtgtgttccatgcattgctcctgctgcacgctgtgtcacacactgacatttgtgccacttgctttcgtgtgcactagaagtcagaggacccgggaattagcctcagctctgtgttgcctagggctgttgtgaggatcacattatgtagcagtatatatcggtggctggcaaacattttatgtaaaggaccagaaagcaaatattttcagctttgcacagcttttcagctctgctgttgcagtacaaaaacagccatagacagtatataaatggtatgactgtattccagtaattatttatggacatggaattggaacttcatataatttgcacatgttacaatattattcttttgacttttttccccaaccaagtaaaaaaatataaaaaccattcttaggtctcagactgtacaaagataggcaacaggctggatttagtttataggctagagtttgctgacccctggtatgtatgaaagcacttggttatcagtaaaaattatccacatgtcatctgacatagcatcttgtgattaactgtgtttttatggttaagtgatcctatcttgagtgcaagttaggcagaagattttggaagcaaagctccgtgcctgtggggaaacagtttttggcatggctcactctctgttcttattgtttcttcctctggacaccagctcagcatggaagggatgactgttagcacgttcttgaggtccaaaaactttcagtgaggctgtggtttgacttcatcaggtgaatgcttatgtgtgcccgtgtgcgtgtcggcacatgcacacacacacatctgttcaaataagaggctcagtgttaaacgcagtgttggtcaggctctctcagtgatctgaacatgagatattatgattgtctttcctgagcacatatctttttacatagctctgcaaccttggtttaaaccaaatagctcataaattggcagtgcttggcattggatgtgttcatttattcattcatttagtggattcatttattgagcacctactaggagtcagacactctactaagcattgaggatacaaaactgagcgcatagaaaataactttgtatgtcacacctattgacttgaaatatcatttctgagactttcatacaggaaaactgatttaacaccaatatactcccaaaataacatgtaagcttcatgacatttacttcagaagcattctgtttgcatctctgtactttttatatgcacttatttttcttacatagctgttgaaaaatagtccacaaattatctgtgatctctaaagagacaccatttcttttatatgattattttcatttccttgactttataaaaagactctgcctcaggatagcactttagagtttacaaaggacttttggatgtgtcatttcatttaagtcactcaatagtcccgtactgttcccattttgcagttgactagaaaaatgaggcacagaaaacttggtaacttgctcctggtcatttgactaaaaagaggctgaacttgggatgttttttacctgggaactgcaaatgtttggggacagtgaccttctttcttgtggctgaagcaggcccaggaaaccccatttcagaccaagcctattatgacaggcctggcctactgagtcaagccctcagtggagcttgaggaacactgcacagccattaaagaattatatgatagaatatttaaagacgagaaaagcagttcatgctgtgttgttaggttaaaaaactatcagtcattatttatgatttgatctcatttttattttacagaaaaagagttacacaaaacagtttagtccagtcttttcaattgtacttaaactttatctccttggaggtttgtaaaaatacaggtacttgaacccatctccttgacagtcgtcctcaactgtattcctcttctgaaccatcaagtgcagaaagctgtttgactgacactcagtccttccaagaaagccaggaccgtgctaggtgtagcagagagaagttaccgtgttacatccagtgagggacttctgtacccagggccagtgagaaacaatgcgggatggtcccaggctgtttgtattgtgaaatcatgcagcctgggtaggaaagccatggttaaaataagatacaccacagtggtgacagtggctattactggatggtgaaatgatgggttgttttcttgttatttttttgctcatctcttttctaaatctcctacaatataatcattatttttaaaaacattagaacataagggtgaaagaaaaatgttggtgagagtccattttgctggatcaagtaggcagtaagatactccatgaatgatttttttttttttttttcgagacagagtctcactctatcacccaggctggagtgtggtggtgcggtctcggctcactgcagccttaaactcctggcttaagtgatcctcctgcctcggtctcacaaagcactgggattacaggtgtgagccaccgtgcctggctggaggattttttttttaactaagtctgtggttaactagccctcagaaggcttgctgaggtcagccctacaagcccatgaccctctccccctttgcagtaccacagcagcctggcttcactgaatgggctggaagtccacctgaaagagacgctgcccagggatgaggcagcctccacgagcagcacctacaacttcacacattacgaccgcattcagagcttgctgatgggtaagaaccagccaaggggcctggggcgacggggatgccagattctagatgggtggagatgagaacttgagccccagcatcatgatgacacggctgtgcacagagttgtctgacctgcgttcagggctctcttctcaccgggagcccagtcccactgagtgtggcgttcactgggcagacgcttctctgctcatgtgtctgtttttggcgtttcccagtgttttgagagaagttcatgttcacatatctgtgatagggtttgtctcagaatgttgagatccacacgcagaaaccgggtgctgcatcgcacagcggcggcagccgaagcccaatgccccgggcctttgtctctgccccgggcagccaactcatggccttgagccgtgctcagtccccgtgttcagtactgggcttcatggggtgggagggcagaaggtaactgtctgctcttcacaactctgtgtcctcttctggaagcaaacctgccgcaggtggccaccccgcaggatcgccgcttcctccaggccgtcagcctgatgcatagcgaatttgcccagctgcccgcgctttatgaaatgactgtcaggtgagcctccctgagtcgctccccaacctactctccacggtcctgctcatgggaaccacctgtggggcccaggcagcgccttattcctaagtagatgaaaaacattctagttactctccttaaggccttcctttgtcggttcctattgccgccatcatccactgttgtgcagtcacgtgccatggactttctggttcccttcctactttagacgcttggggtccagcagtgaaggaacctgaggtcctcaccatcatggagctacatccattactagggacggtggctccgtctccttgctagaaacagtgttgaaatattgttgtctttctaattacaaagtaatatggctgggcacagtggctcacacctgtaatctcagcactttgcgaggcagggggatcacttgaggtcagggttcaagaccagcctggccaacctggtgaaaccctgtctctactaaaaatacaaaaaattagctgggcagggtggtgggtgcctgtagtcccagctactcaggaggctgaggcaggagaatcacttgaacccgggtggcagaggttatagtgagctgagatcacaccattgcactccagcctgggcaacagagtgagactgcgtctcagaaaaaaaaaaaaaaaaaaaaaagtaatacgtgctgatcatacagtcatgcagaatgcttggaaatgtatcaagtaaaacattttcctctctcatctccatcacacaccaggaaataaccacattttacagtttggtatatattgctccaggttttattggtttttggtttttattttttgcacatataaattgtatttttaattattttaagtcttctagaaaataggattctactaatgtacaattttacagttgtcttttttcacattatgtcatagcttgaacacctccatgccagaagaaatattatgattattgtaatttacagtatttaaccaaccgaatttgtttttttctttctatatgcttctcttatgaaaccagaaagggagtttgggctttaaagatcactttataaaagcccgaggagactgggacctgagaatttggttgacaactggtaacagaaaataaagcaagttagcaggtcaagggcagtgctggcaatgtgtatattagtccacgtagtccttggaaccatctggtcaagggcattattttttatttatttattttgagatggagtctcactctcgccaggctggagtgcaggggctcagtctcggctcattgcaacctctgtctcctggtttcaagcaattcttctgcctcagcctcctgagtagctgggactacaggcacctgccaccatgcccagctaatttttgtatttttagtagagatagggtttcaccatgttggccaggatagtctcaatgttttgacctagtgatctgcccaccttggccttccaaagtgctgggattacaggcgtgagccaccacgcccggcttcaagggcattttttaaatcctcattttacagatgagaaaattgaagcacaaataggataagcagcttgcccagggttatattcttcttaagtggcagggccaggatttgaagcattttctccaactgttaagcacatgtatgacctttccacacacatttcagtgtcggggcagtgtggtccagtgtgaggggcatgggtggtggactgacagggagcctgggtgggtgattaggatggttctgattccctgtcacccgccacacttgagcgccaggtgttctgctgcctctcagcgtctccagccaatattccaatagatctttctgtcagaaatgtgtcttctctggctttaattcacagctgccccaggctggcaacccagaggcaacttgcatctacagtcactggtttgggaactggctgtgttgggggtgtgtgtgtctgttttgtgggaggtggaaacaagtaaaatgtcagcatctgctccaccaaccaccttgtggccctgcagtatgtcaccttccttagagctgagaggggtttagtgttgagacacatagctcaaggcatttgttgagagattatttcaataacagtaatagaaacaacagctaccatttctttttttttttaattttattattattataagttttagggtacatgtgctgtgcacaacgtgaggtgtgttacatatgtatacatttgccatgttggtgtgctgcacccattaactcgtcatttagcattaggtatatctcctaatgctatccctcccccctccccccaccctacaacaggccccagtgtgtgatgttccccttcctgtgtccatgtattctcattgttcaattcccacctatgagtgagaacatgtggtgtttggttttttgtccttgcaatagtttgctgagaatgatggtttccagtttcatccatgtccctacaaaggacatgaactcatcattttttatggctgcatagtattccatggtgtatatgtgccacattttcttaatccagtctatcgttgttggacatttaggttggttccaaatctttgctattgtgaatagtgccgctataaacatacgtgtgcatgtgtctttatagcagcatgatttataatcctttgggtatatacccagtaatgggttggctgggtcaaatggtatttctagttctagatccctgaggaatcgccacactgacttccacaatggttgaactagtttacagtcccaccaacagtgtaaaagtgttcctatttctccacatcctctccagcacctgttgtttcctgactttttaatgatcgccattctaactgatgtgagatggtatctcattgtggttttgatttgcattgctctgatggccagtgatgatgagcattttttcatgtgttttttggctgcataaatgtcttcttttgagaagtgtctgttcatatccttcgcccactttttgatggggttgtttgtttttttcttgtaaatttgtttgagttcattgtagattctggatattagccctttgtcagatgagtaggttgcgaaaattttctcccgttctgtaggttgcctgttcactctgatggtagtttcttttgctgtgcagaagctctttagtttaattagatcccatttgtcaattttggcttttgttgccattgcttttggtgttttagatgtgaagtccttggccatgcctatgtcctgaatggtattgcctaggttttcttctagggtttttatggttttaggtctaacatgtaagtctttaatccatcttgaattaatttttgtgtaaggtgtaaggaagggatccagtttcagctttctacatatgaacagctaccatttcttaaccactcacaatgtgttaagcactcacttaatctcattctttaaaacaaaacaaaacaaaaacaccaatgaggacacatactgttgcaacaaacactgtacagatgaaaaagctgggactcagaaatgttgaatagcagcccaggacacacactaggaagtaatagggctgggattagcacctgagtgtgtgtgactccagatccatgctcataaccatctggcctcggagccctcccacagggctgtgagaagagattgtcttgctgggccagtgggtgcaggagacactgaagcttggaatagggtgggatttttctcccttacagggaaggagagaattgagtgaggggagccttagcagtccctgactccaccctttctcactagatttgggggaaactgaggcccataatagttggagaggcaggatccagaaaccaggggggtttgtttaccttggcctggagttggctcctcccaggtggctccgcctctgtgtagtgccctcatccctccctctctgtgtccacaggcttcctgtcacttcgtgtcacatcccactcctgtccttcactccctctcagtctatccagccacccccagtgtggagagcagactagactcctttctcggacactgccattgcctcgtcatagaggcagggcagccccagctactcactctgagcctcagggtccttgtctgtgaaatgggaccataccaccactgcagagcttatgtgaggggcaaagcagagactgtatgcagagcacattgcatagctgccagtatgtcaaaaaagccagcactccacagttcctttatgcaatacttataactccaggatctgtggctgctgccactgtggatggtcccgccacggactcttccagcatctagtgagctgaaaggaaggaaagatggtattggcactgaagcctgaaactcagctgaagaaatagaattccgtgccatgacagctgcacatgccacattgggtgtcctgggtcctctgtgacaagaaccttactgaggtctctgtgtggtctgagattagcaccagcagcattggaccgttgccttctttcttcctccaacagaaatgcctccacggctgtgtacgcctgttgcaaccccatccaggagacatatttccagcagctggcacctgcagcacggagctccggcttcccaaaccctcaggatggcgccttcagcctctccggcaaagcaaagcagaagctgctgaagcacggggtgaacttgctctgaactgcacccaggaggtgactgggaaggagaaaaccagcaaaggaagctctgccttttataattgaaaaggcccctctattttatttttcttgaaaacattcccttttttaggaaccaaatgatatttgagtttttgttattccttttgcagattgggatgtgttttgggggcaggggttagttcttcaggtcggcagacccagagcacttgataaagaactgtatttaatcggtagtgttggggccgggacgggcttggctccctctctgccatactgagcctgaggtatttcatatctcctgctgttccatcccagcttgaattggtgccacaagcttccaagttggcattttttctagaacctgatcgtccactagcccagagtgtgtgtgttcaacccccacaccaggtggtggtaggcggtgtgactgcacagcgaggtgccggatctgtgagcaggccgactccactcccacgccgcaggtaggtttctccagtgcgctcttgctgggaggtccggatcgttcctgcagggaagcggcagcacacggagaccacttggttgaattctgttggaactctactcaaatctaggggcgtcttctttggacccacaatgggggcaagccttaataatatggaagggagtttgggctttagagatccctttataaaagctctgggggctgagccctgagaattcagtgacaacaggaccaacctgcgctgcctttgactacaagtgggccgtgcagctggttcctctcgagcgagtgtccctaaataggagtttacaagatgtctgggggtaaaagcactgtgcttttcagtggtggctgcgtgaaagggagcgacactcagctgtgtgttcctgggcttgtgtggtacttagaacctcagttctattacgttatagtcagacatttttttgacagtatgagacagactgcaggatgaaaatatttgtcaaaatcttaactgaatgtttactggaagtacttgagattccatttgagagttgtattgttaataatttcatgtcagtgaactgatatctgatgtttatgatatggtgtctttttcttgaaacaagcttccaagggctagaaataaaatagccaaaaaatgctggagttctgagtaattaaatggcagcatttttttgtgacaaaggtaagggttaagacagtgtgtgtgtgtgtgtgtgtgtgtgtgtgtgtgtgtgtgcgcgcgcgcgcgcgcgcgtaacgtgggcgcatccctcttttccttccctgggttcagtgtggctgggtaaggaccgtctgtttgtagggctgccaggctgcagcctgctgctccagggagcaccagctgcagctgatccaatacaccaagcctgtgtctccctcttctatcacctctctccaggatctctgctgtctcttggatcccatctgcctagatggaagaggatcctatccgaagctaggataaatgttgtcttactcctctgctatgttctcccagaaaaaattgattacaagttctctgctgtggttgctgcagctccaggaagtccccgcaatgtctcacgttgtctttgaccagtggtccccagtaccaggccagcgaagacaactttataatgtcatttgtgttgtgaaaattcttccactgacccaaaatggaaccgtacaaagcctatccgtgtatatggaaaagtctcatgcacctggattaactcagaaaaagtaaagtcctgaaacttcactttgcaggtgtgcccctttctttcctcctttgatcctgcttagtttctgcagtggaggttctgctcagagccccagggcactggcagctgcagccgtcatctctaaagcttggtaactgtggcccagaggctgcagagaagaaacacttaacccgctgttttcccgttttttaatatttcagaggtttcagggggtcactcaggacacggttaatcccacagccccaggcccatcccctcaaaattagcgcccccagagtacgggccaagcgacggacagccaagcagcatgttcttgctggaatgggcaccacaacctcttatggccatgtttcccaagggaaggcagtgtgcaggacagcctgcccaccctggactcctagttgacaccgagtgccactgtcagtgatccaggaccacagattctagtgactcttcagggcagaaaagcctctgttttggcttcctctgtgccagccatctgccacctgtgaactgtaaggataaaggtcgcatgagtgattaatagtggtgtgttagtccgttctcacggttctaataaagacatacccgagactgggtactttataaaggaaagaggtttaactgactcacagttctgcagggctggagagaccttgggaaacttatgatcatggcagaaggggaaccaaacacatccttcttcacatggtggcagcaaagagaagtgcagagtgaaaggggggaaaagccccttatacaaccatcagatctcacgagaactgtcacaagaacagcatggaagtaaccacacccataattcaattacctcccaccaggtccctcccacgacatgtggggactatgagaactacaaaatgagatttgggtgggaacacagccaaaccatatcaagtggcaatcagattcctactgggaaaggacccctagaggggatgtttgagcctgatcaaactgtctcctcccctggagggaagcatctagacttctgggccgttgtcacttcaaccgacagagggtggtagcaagtggagcccaggggctttgttgaagtcgccctccatggtgtctgtcttgcatatttggtggtcttttccaatgtggctaagatgtacttcccatgccgcccagttactgcgttcttaacaccccgccctgctcggggtgggtgagtagcagcagacctttctctggtgtgagcctccctgccacaggccacttccctgtgtgtgcagtgagctgaatggtggcccccaaagatcaggtcccaatccccagaacctgtgaatgttgccttgttggatcggatgtttgcagatgtggttgagtgaaggatcttgagacgaagagatgatcctggcttatcccgtggtccctaaatgccctcacaaatgtgcttttaggagaggggcagggggaggttactcacgtggagaaggccacgtgaagatggcaaagactggagtgatgtggccgccagtcaaggaatgccagcagccaccaggtgccagaaaaggcaagaagtggattctgccctagagtgtgcggagggactgtgactgtcaacgtactgaattcggtcccgtgaaactgatttcagacttcggcctccagaaccgtgagagcatgggtttgtgttgtaagcctctgggtatatgctcatttgttacagcagccagaggaaacaaatccatcctcctgccaacttgctttctccttgtgatgcccagttccctctctctcagtagcgccgagccacagagcacggagggcgtgagaagagctggggccccacatgaggttgccatggcgcggggcacaggggagcctttaagcaggggagtgggatgggcgcggtgtgacgcctgtataatcccagcactttgggaggccgaggcgggtggatcacttgagctcaggagttcaagaccagcctggccaacgtgatgaaaccctgtctctactaaaaatacaaaaattaaccaggtggggtggcgcatgcctgtaatcccagctactcgggaggccgaagccggagaattgcttaaacccaggaggcggaggttgcagtgagccgagctgagattcattgcactccagcctgggtgacagagtgagactctgtctcaaaaaaaaaaaaaaaaaaaaaaaatgcaggggagtgactggagctggttctcatgaggaaggtcactagctcctgagtaggggataagctgggcaacagtggaaaccaccaggaggctatggttgtccaggtgggaagtggaatggctgaagcagagaggaggccagataatgggcagacgagcctgggcactgatgaggtttggggcggggagggacagccccagtggagaaggcagccaaggagatagattcctgccctgaaggagctggcggacggagtgagcaggaaacccacactaatactctcagcctgtgctcccgacacacacactcctctcccaacccctgaacccaccgctgctcctgggaaaagggcagtgggtgtgggaaagcacttgtctcctgctttgcttcttgattctgactgccacccggctctctgtgaggagacaggggagggcaggtgtcagacccactctcagcatcctagcttagaaataaaacatactctagatctttcttcaacatatttgttgagtttgagaagcttacagtgaagattctaagggcttcaaggtgaaaataggacaccttctctgttgatccagtatttaaatgtccaaacctgaaattagctgtacttcccctgagaataaaacccagagagtgctttggaatcctgtcaagagctgggaggtgttttatgattgcctgtgcatgccgaggtataagccgaaaagttgcaacccttctcccctgccctgcctcgctgtcagctgggccaagcaccctgaggaaagggcttgaggcccaggctgccaaacccatggggaggagagggagacaagtcctctaccgagtgtgctgttcaaagacaccttgtgcatccttcctccccacccaggctggactggcttgtgtggctgtggcaggagcacatgggctttggtgtcagacagctgggttcaaatcgcagctctgccacttattgctggaaatcagggcaagttgcttttctgtctctgagcctcagtgtccttttctttaaaatggacaggagaaggaaatggatgtaaggacttggcctatcatgggccctcagcaaatggagggtcctgttgagtgttctgagaaggcaaatggcctcccagcacagggagaaggacctgggggccggaggggtgtggtccttctgcatgttgaggaagtgagtcctggatgtgtgtccagacttcagaagatgcgctgtgctgcgagcctggatactcggcttccaattccagctcgccctgcagctggctgcgtgaccttgttcatgtcagctgcccgctctgagcctgtttcctcatgtgttaaatgtgcaattgacaaggatgaggtaggggaaggaacctcgtagggtgcacagtgctctccatgctcaaagaagcaggtgccctcacctcgaacgtgggggtggctaatgtatgggaagcggggagatatggggaagggcaggtacccagaagttagaagcaacgtgtgtgcctgggaaagaggcggaaagtaaaccaatccctgtgtgtgctccctcctgcctcctaatgctgcaatctgcttgagtgttttccctgccatctgtcagcagttctaaaatatgtggccttattctgtcctgttccctgtgtttacatctggttagcaagattcggctggggagttaaatgttatggaaggttgctggcagcaggcatgacggtcctcaaaaacctcattctgtgcttagcctctgctactcatatttacatcctgacaatgtgtatggagcacctctcccatccacccagaccacgacataatagcatcttaccaaaacctcacttgacactcacagagtggattaggacttttggtggcaaggatagaaaccacaactcaaacttggcttacgaataaaaggcgcacttattggctcatgtaacagaaaagtccagaggtagagctggttttcggcagagctgcgttcaggactcacgtgatctccacagcgcaggccccgcttgcctccgtgggtttctctctcagcttctttcccttcacctccccccaccaccccacctaataaaaagtggcctctctttcacagtcgtcccagaaaaagaacttggatcacgtgtccagccctgacccaatctctcagtggcccagagtttggaagactgattggtcagatctggatcatgggcccagccctggagacccaaggactgagcatggggatgttatggtcttgcaagaggctcatactgttggcaggataggtttaaaagcagtggctgctggccaggcgtggtggctaatgcctgtaataccagcactttgcggggcagaggcaggctgatcacttgaggttaggagttcgagatcagcctggccaacatagtgaaactgtctctactaaaaatacaagaattagccaggcgtggaagcgggcacctgtaagtccagctagtcacgaggctgaggcaggagaatcaccagaaggtggaggttgcagtgagccgagattgcgccactgcactccagcctgggcaacagaggagactctgtctcaaaaaaacaaaaacagataacaaaaaacagtgactgtcctctagagaccaagcttaggtggcctgcccggtgttacacagggccatagctcagactttaatgtccaggctgaatggtttcaaaggccttatcattcttgctactcacagcagcgaccccctcagcctgagctacacgttagaatcatgaccggaaatgagtttaaaacaaagacccgtgcctggaccccactctcggaacaatgaaaaaagatgctttgggagtggggtgtgtgctttggggtttccgacaagttcccgggtgactgcatcgtgcagccacagtcaaggaccagcacaccaggatcactcctctcccccacagtatgctacggagcactcagtgttacaagtttaatcgctgtcaccaaggacagaacccagacaatctgggtgactctaggggctgatgaacaggtgcctgggagaaagggtttgggatcagaagacctggggtgtgaccttctacaaatagtaattggtctggccttgagtacatgggaacagagggagcttgaggccagtccagcctgtctcgggtggaaggcaggattcccatttgcagccggctggctcccctttctcaccttgagcctccagagctacaacacgtaaattagcttagcaatgcctagctggcaatgcacacttgaggagggtgagaaacatcgcgatcccaggtgagtggcgctcttcccttccgcttgttgtggcagcccagcccggacagctggctggaacctcgcttgcaggtggaaacatgcggcagcccggctgcttctagggctcctggctgggagacccccctgtctccctctcttctaaagggaaaaacatgaaaaacacagctactgagggacatgtttcttcctctgtgattagacacaggcaattgaaagtagccactggcttctctggccacacccactgctgtcccgatgtgttttcccatctcttccatttggcggccttcctcttcacctgtttctctactcagctgtggcagaaagggaaacaaggttgttgagtgcccttcatgtgccagatactgcacatacccacagaggagaaactgaggctatgagaggctaagggacttgcccaaggtcccgagggtgcaaactcctggcacggagtcctaaatcctcagcttttctgaagccagggtccttgttcttctttgcccagttagacatctattgctccttaacatatcctagatgtgctcttgtccccaccccactagtcccattgctttgggacattttgcttcattcactatccacgatcaattctagtgacccgcctgtctctgtgacatcactcaaaacacaagagcctcaaagtcacttgcccccttctgcctagcaagtctttttttttggacagggtcttgttctgtcgtcttggctggagtgcactggcgcgacctaggctcactgcagcccccgcctcccaggttcaagtgatcctcccacctcagcctctcaaatagctgggactacaggtgtgcaccaccacactcagctagtttgtttgtttggtagagacaacgcctcactatattactcaggctggtctcaaactccttggctcaagcaatcctccccgctcagcttcccaaagtgctaggattacaggcgtgagccaccgagcctggcctaagtctttctttacaacagatgacctcaccacttcactctggttttcagcaagatcctttatttatcttctgttccccagacatgtcacatgaatgcaggtagctaggtacctgcgcgggctgttggttttgtaaacgcagagcagagcagtcacgatgtgtagaaatcatgcacctcagtgattctttaacaagataatgagtaaaaagacttcaggtatgtttgaaatgtctgccttttcctgcattctcatcactgacaaatatctgtgtagacattttactcaaatgtagacgtgctctttgcacacttgctagtacctgcctggtgcatttcaactgtgttttcttccaacagttgtacctcttagaagctgctgttttccatttggatctaaacactggacctgcacctgcgaccagctgtatattccaaaccactcctcggctttataaatctgacactgctcataatacattattcagaaaaggcatctctagtgtggctggccggctacgctttcacacatcagctaacacaggctatttctagagtgagtgcctcaaactggtctcctgggaccttttccttcgggaagagatccacatgttcttcacaggagaccagaaaaccagcacaacggccacgggtcctctgggcatgtaggtcttctctgtctcctcactagcacacactggcttgggtcattgtcacgcagtgcacacctttgtgccatgacaaagacacagggccaactcttccactatctccaagtctagtgtttgaacatttatgtacagacaaataaatgaaaaaaaaaaaaacataggcaacagaactccaaagcaaaacagaaactttggtcagatctattattccagttttgccagagaaaggctttccccaaatgtcgctgggtgagcgcggtcctatccccctacagctcctatcagccaacctggtggccttaacgttcatcactgtggactcaaaacacctaaaactgggaattttccaggcccagtttggcagtagggcttctgtaggcagtgaggtaagcggatcacacgttccgtggctgatctgtgtgagccgcagcttggtgctgggggacaccagcttcagctttgcaggaaagccatgtttaaagagtagcctccagtcctactggcccaatgcttttgccatcagggacctgacaaggtttagaatgaggtgagcgatggtgacagtatccctgggcctggacactgtgtgccaccctgactgtgtctggcagcccctccacctggctactgaagccagtcaggtgtgggggctgcagactgtccccctgccgtcaggtggctgaagggtccccagtgtgccagcatcagaggccaagttctctagctctctggtttgcagtttttagttttttttttttttttttaagatgaccacaagaagttttacattattatattcagacaaataaccatttagttactctatttcagagcactgaaaaaaacaagtagcaacagaagacagacttacaagggcactaagtctctggtcactcaaggaccaatcaaaggaatgcgctgttaggccagaaaggagtctctgaagcaaatgattggaagg

SEQ ID NO: 12459 - DNA, 471 bp, Homo sapiens
gtgaggatgaatctctacactcactgcgtcaaagggctggtgctgtccctgctggctgaggagccgctgctgggagacagcgcagccatagaggaagtgtaccacagcagcctggcttcactgaatgggctggaagtccacctgaaagagacgctgcccagggatgaggcagcctccacgagcagcacctacaacttcacacattacgaccgcattcagagcttgctgatggcaaacctgccgcaggtggccaccccgcaggatcgccgcttcctccaggccgtcagcctgatgcatagcgaatttgcccagctgcccgcgctttatgaaatgactgtcagagcactgaaaaaaacaagtagcaacagaagacagacttacaagggcactaagtctctggtcactcaaggaccaatcaaaggaatgcgctgttaggccagaaaggagtctctgaagcaaatgattggaagg

SEQ ID NO: 12460 - DNA, 17533 bp, Homo sapiens
gtcacatggggtgcgcgcccagactccgacccggaggcggaaccggcagtgcagcccgaagccccgcagtccccgagcacgcgtggccatgcgtcccctgcgcccccgcgccgcgctgctggcgctcctggcctcgctcctggccgcgcccccggtggccccggccgaggccccgcacctggtgcatgtggacgcggcccgcgcgctgtggcccctgcggcgcttctggaggagcacaggcttctggtgagcgctccgcggcctccgggaccccctggccgcacggggagagctcgggcgccccctgactgcgcactgtgagagcttcagagaccggagctccctcctctggggccctggctctcccgggcccgccccccgccgtgtttgtgggtgggtcctccacctgagtgggcgccggggcgtgagcctgggccgccccctgcagcccaggccgatgcccgggatcctgctctttgaggtaaaccaggagtctcccctgggagtggacggccctgcagcgggacctggcctgcctgtcccattccttccacctagagctgaggtacccgccttcctggcagggccagggccagggctggcgttggcccctcgtcttactgctgctgccgttccccatgaagatgggacctccccacattcctggccctaagggtcattttattagtcactgaacgcacgggcagcgcctggatcctgcgcccgggcagtcctgggcttgaacgtgtgtgtcagccgcgctgccagccatgctgaggctcgggactgagccgcccctttgttgtccccagccccccgctgccacacagccaggctgaccagtacgtcctcagctgggaccagcagctcaacctcgcctatgtgggcgccgtccctcaccgcggcatcaagcaggtccggacccactggctgctggagcttgtcaccaccaggtgggcggcgggcagggtctgggcgtcccagagccccttacagaggcacagatgggaggggagggctgggggctgctcggaagaccccttgttcccccacctcccgccgaagcaccctgttggggagagcgtgtccttgctggctgtgctggggtgagggctgtgtgctggagggagcccctgcatggggcacggtgggcttcctgcaggtctccctgcaggctcagggttggctgcgccgcacctggctcctggtgcacccgtgagcatccctgtgtgtgtctgctggccaggctgggtagggccactgcacctgagggctgagctgaggtctcatcggtcacagcaccctgggccctgacgctggtgcaggtggccaccctgtgagggggaggcacgaggtgtgaggggcacttgggtgtgtggggccttctggaaacacagagaccctcgtgcacttggccagagccgctggctcctaccagcagggtgggcaccgggcaggcctgggcatagggagtcctcttggcaccttggaggctgcatgatggcgggggacccttgttcaaataagatgtcaaccctgagcgtcaggtcaggcccatccctcctgagctgagggacggtgcattggggcccagccagcactgtgggccagcctgtctcggaggcagaggttcttgatttctgagtgtttgggtcctgcgtgtgatcagagggcctcctttcccagttggggttccccggtttccccagggcagctgtggcacaagagtgcagctcttgggtggctcctccctgggaagggtctcagcagtggcttgcagacgtctgctgtgggtccccaggagggagcagaggctgctgggcaggcctggccctgctacagatgggcatcggtggcctccagctccctgtggcgggctcgtgctgtctgcacggcatcgtgcacactgaggaacagctgctcctcctcagccgtgtccccggggccctccccgaggaagcctcctctgctcagaatgtctctcacaggcgggctgcagcaggctagcagcaggctgatgcccagggccccgtagtctcggcgcaggtcctgcagcgtgctcacaccggctgcgtctaggaacagcagcggggcgcagtcgatgaccactgtgtggaagccggccgctgcgggcaccagcgcagccctggtgctaaccgggcccaggtcctcgccctgggcagggcctccctcaccgacccccgtctctgagcccccctccttcctcctggcagccatgcaccctgcgtccagccccgtgaggctgtagagtgactgcaggaagaagtccttgttggcatagtacagcggccccccaaagcggaacacccgcacgccgggctcagggacgaggccctcgaactctgtggcatcctcgtagaaggccgtgtccccgatgcgggccagcagggcggtgcgtgggcgttgggtgcggccggccaggctgagcagcgagaggatgacgccagccagcagcccggcctctgtgctgaccagcatacaggtggccgcggtgcctgcccagaccagcgcgtcagccgggctcatccgccacagccgcgggaggtcccacaccttgcgcagggccccccgcaggctgaccacgatgacgcaggccagcacgcttcgctgtaggtcgtggaacagcggtgccagcgccagcagcaccagcagcaccacggtggcgctgaccacgctggacagctgtgtccggcagccagtggctgtcttcaccaggctcttggccagggcggcgctggtggcgaagcagtggaggaaggcgggtagcacgttgcagcagcccacagccagcagctcctggttggcacgcacagagtagccgtgactgcgggcgaacatctccgccagcgagatggagaaggcggcagccacgagggccagggccacggcatccaaagccacacgctgcatcagcctgggctctgggacctgagggggcatgaaacccgtggggatgtcgccagccacgctcgagccaaagcgcttgtggagctgcccgaagtgcgacacgagtgtggccaccacgatgaccagcagctccgtgggcagcggcaccctcaggcggtgtcggtagcggtctgagagctccttcgcggctagcagcaccgccaggcacaccgtgctggtgaccacgtcgcacacgttggcctgcccggcgccgcgcagcaggctcagccatgtgaggaccaccatgccgggcccctggtgccgcgggatccgcacgcccagcaggtgtttgagctgcgaggtcaggatggtcacggaggcccccatggcaaagccatcgagcagtggctgtgagaggtaggcggacacgaagcccagccggaggacgcccatgaggacctgtggacggagtgcggtcaggccagcaggcgcctggcgggagccacctgcccctcaccagcacctggcatggcccgaggggtggtggtcacggcacaggacctgacaattctgtgttgcggccccgtgtgttccaaaccagactcctcacacgggcctgagttctggttccacgcgtgctcatgcccgcagacaactgtgacatccacgtgagcatcacacgtgcacacagctggccatagacacgtctaacccttgtcacgtgcagcagcccgttttatttcagaattaagacctctggtatcagaaggcaaccccttcctgctgcttcctacacatggtgcccactgccccccatgcagatgtggagccaacgggggccaaggtggacaggccaaggcaggagaccttcgggggtggggaggccatcccccactccacctaggacagaaggcctgggaggccacatggcctcagtccagcaccactgagccacagccacacctggcctgctggtccccaccaaggccatggcccaccggactggctccccgtgcccctcccctcctgcatccacagcctctccgcgtcggtgcctcgccctgggatgccccggcacgccccagctctgcccaagccttgctgtcttgggccagcacctcctctgccaaccctgtgcttgcccccagccttgccctcgtggatggccaaaacctaagggggggtgccctgggcccctccctgtgcccaagcagggctcctcacctggtaaagcccggtcatcagcgtgagggcggtggcgacacggatggcgtagcagtcacgcccgcagtccagcatggcagccgagccgttgagggtgctgctgttggctccgggctgcaggccgtcctgggaggggtcaaagccggccagctggagctcccggtccaccacctgccccaccatgaggcaaagcaggctgaagatgcccacggagacatgccgtgaggtgcccatgaggaagtagatgaggttggcgaagaaggacgtatagaggctgtagatgggctgcagcccggccagcaatgagtaggcgatggcctgcggcaccaggatgatgccgatgaccagcccagacatgacgtcgcctgccaggtactcccgcgggcggtactgacgcagccagcgcgtggcggggagcaggtcctgcaccagcgcccggacgcacagcacactgcacgagcagctgcaccacagcctggccttcagcatctcacgcagaccccggggtgctgggcgctgccgtcggaccggcaccggccctctgccctgctgcagaggctcaggggactcgtccatcctgttgcgtcaggtcccgtggccgacctgcggccgagaagagggcatggtcacaggagcccccggatccagggccaaacgacaaggtccccggcagcaacgggccccttggggcggacccctcgcccacccagggccggggattggtgctgggccttctcctggcagcgcgggccccagccccctgcccggtatggatggacgctgggccctgctggatccagaatccatcgtgaggtgagatgggattacgacaccaagcccatgccatggggtgtgctgaggccagcagtgctgaggggcggcgtggcggcaccctgtccaggctcagctccggcctattggctctgcggttcctggctgaaaaccaccctgtagcctcctgaagctcacctccccaacggggcaggaacaggctgggctgccaccacgcacatgtgcctaccgtcagaatgtcacagtcactggacacaggtgcaggcaagcctgagtccagctgctccgtgtccacctccctggctccccaggttggcaaacggtcctgctgtccaccccatgcccacaccagagccctccctcccccatccaaaccatcgcctgctctcctggagacacctccacccacccctctgtcacctgccctgtgggtcctggggctggcggaagtctcaggaagaggcctcctatgtccctgccaagctttgtgggtactgggaccccaagtctgctgggggagcagcactcagacactagcctagcccatccgcctggacttgggacagaattctgagaatatgcctggacgggggccccatcagggccagctgggaggggaggagggtgactggcgtctgtctcccctgcccagacagttctgggacgtgaggcgccctttttcccaggctgcaccagctcactgtggaacggccatgacacactgtcccgaggcagcaccgagagggcccagcccgctgcacacagtcaccctgggccggcagagccggaagggcacctgacctttcccttgatctcggaaaacaccgtggcgttagggaggcggtgcttagaggcctgactggtcccacgtgaggcctcgggtctgtcctgtttgcagactccaatgtactttcactttaaacattcttctcagcgacgttaggcaaagactttgctcccaggacaccaggtgcccaggacaccctggagcctgggctgagcctgctgtttgcacgctggcccagggtgtgcgagctccagtctcctggcgggtgtgttggggcagtgagcccagcctggtaggttgacacatgcaggctgggcacagcacccctggggcacagagcgggggtcctggccctcaggcaacattgcaagagttgtgtccccttccctggaagaccccaccacactgggtccctggatgccctgaagcccaccccaagcccctggggtccaggtgtgtggaatggggacagtagggccacctgccttgagcctgagggtgcccctaagaaaccacgagtccagggcatttctggcctcggctcccacgcccccctctgctgcagctgagatctgggcccaggatggttcttacctgagggagtcctcacaggcgcggagggccctgggatgacgaggggctggcaagaccaccgaggaccgcagggccctctggctcccgcgagcagcggggagagtgggggtggtggcgccaacctgcaggcagtggtctgtgccctggactctgtagttcaattatttacctacagattgctgagtcatgggtttctccagccatgttacctgatcggctgatccgggagttgaactgtaatcaggggcttgtaggagttagagctgtgtgggcctctgaggagctcccagcctcccaggagccgctgcagctgtggctctgcggccctgccgggggggcttagggaccagcgggaggcgggggctcaggggctgagcacaggtaaaccttcagctctggggtctggggtcgagtgcagcagccttcaaacccaggcggggctgagggaggcttggtctccgtgtccagtcgccggacaccctcctggtcctgcaaggagccagcctggtccaagctggagcagggcagaggctgacagccggctcagcccaaggctgccggtgcgtgcatatgcgtgtgtgctcgcgtaagccctgtgtgtggtgctcaccgcccagggcgaggactgccggggtcaaggtgccgtgactggccaggagtcctggtctgactggacccagcaccgacccacagcgcctggtcaccctcacggctcctctgccctcccctctaccacagaccaggaccggcagtgcctgcctcatagggctggggtgaagataaatgatttttttaagtgaactaaattaggcccacacgtgaaaataagggtaagctgctttttaaaaggaattattagccaggcacgatggttcactcctgtaattccaacactttgggaggcctagacaggaggatcgcttaaggccagcagttcaagaccagcctggtcaacatagtgagacgccccccaccttttctttttttttttttgaggcggagtcttgctctgtcacccaggccggaatgcagtggtgtgatctcggctcactggaagctctgcctcctgggttcacgccattctcctgcctcagcctcctgagtagctgggactacaggcgcccgccaccgcgcccggctaatttttttttttttgagacggagtttcgctctgttgcccaggctggagtacagtggcatgatctcggctcactgcaagctctgtctcccgggttcaagtgattctcctgcctcagcctcccgagtagctgggactacaggcacccgccaccacgcccggctaattttttgtatttttagtagagacggggtttcaccatgttagccaggatggtcttgatctcctgacctcgtgatccacccacctcggcctcccaaagtgctgggattacaggcttgagccactgcacccggccgccccctgccccccaacctttaaaaaattaaaagtaaaaaattagctgggtgtggtggtgtgtgcctgtatcccagctactcaagcggctcaggtgggagcatggcttgagcccaggagtttgaggctgccatgaggtatgattaggccactgcaccctatcctaggccacagagcaagagcccgtctcaaaaacaaacgctgtcattggcccagcactttgggaagctaaggtaggaggattgcttgagccctggaggtccaggctgcagtgaggtatgtttgtagcgcttcactccagcctacaagtcttttttttttttttttgagatggagtctcgctctgttgcccaggctggagtgcagtggcacaatctcggctcactgcagcctctgcctcccgggttcaagcgattctcctgcctcagccgcctgagtagttgggactacaggcgtgtgccaccacgcccggctaatttttgtatttttagtagagacagggtttcactatgttggtcaggctagtcttgaactcctgaccttgtgatccacccgcctcggcctcccaaagtgctgggattacaggcgtgagccaccgtgcccggccagttctgtctcaaaaaaaaaaaaaaaattccttgggagcctcaggtccccccgactttgacagtgagtactgggtgggagcctgcacggggcacctgtggccggagggtgagtgtaacgaggggctgcagccctcagtgctctcccatcccaagggaggccaggaggctgcggtgggtccctcgggtggggctggaaggccaacccggccctggcaccttgggcagcctgactctgtccggggaacagaagccacaggctctacttctcctgtccatgtgggattgaagccgagggtctcgcagaaccagctgatgtgccggggctccatttccccaagacgaggacactgacattgatggggcacagccccggagggaggagaccctggacactcaccccaccaaaggtacctccttgtggaagccgtctgccaagcgctgctagttccccacagccctgggtgagcccagggaagactgggctgcagtgcccccatttggaggtgaaatgggagtggaatgtagttgggatggccagagagtaggagacatcctaagtgtgagatgtggacagggctgaatgctccagggtctcgtaccccagagtgtgagatgcgggcagggctgaacgctctggggtctcgtacccctgagtgtgagattcgggcagagctgaacaggctccagggtctcatacccccatagcctccacctgggatgccctctccaagtctgatttctcctcgaagcccctgccctgtcctccagagtctgagcccttgcttccaccccagcccaacctgggccccagtggtccctgggaagcagctgtttgctcagcagttgggagctgtgctgtaagaagcggttggccagtgggtggggtaaggcagtcacgcagggcctcaggtccctccctgggacagataagggcccctctgggtgcagccaccagcagggttgttggagaactggggagacccagggggctggggttgttccctcaaggtctccctaaaggaggcagggaggacctgggtgctacagcaggggtggggcacctggtgcagacgcctgcatgcagggtggggtgggcagtgccacctggggccacagaaaaacctggagtgggaggtggcccttcccccctcaggaaaggtggtggaggtttccagaggctggcttatggggacctgtggtgaggttttaggcaggtgagcgtagttcaggaacagcctcagccgcactgcaggggcctggcctcaggtcttctgcaggcattgggccttatgcccttttagtccccacctaggctgggtgtctaaagtaggtgaggtcatcactgcaggatccttggggcctgacctgccccctcccacgtgtctctgcctcagtttctctgagcattgaggcagtggctggtgctgtcctgtggccaggcccagaggctgagtgcccagggggtccaggggccttgctggccagagagagtgggtagcccattctaccccgagcctgtgcacgcgcagggctgccaacacctccttccttccccgcttggcccacgcaggacagggggcgtgggggccccagcaactgggacctgcctgaatccgcctccctcctgaacccccctcccgcctgaacccctggccagtcttgtgtcacacgcttacttccttagttttgtctttaaatcagccgttttacattggagtccatttactgggaaaggagaccttgcatccttgcctcccacccgtgggaagaagcccggccgacagggctttgagaccggacccgagtttattcccagagaccctcccgcgggtgggcgagctccgaggtctggagaagaggaggccccggcccgcaccctctagcacctgtgtccccttcgtcccggccacagatgcaggttctcccaagaggcgggtctgtacccgccccgcgcccccagcccagcgggcccggcctccgcccctgccccgcactcccacccccaccctcaggagagcgcggccctgctccccaccccgcgcggtctccccccaccgcctgcgaacccccatgcacgcgcggccccgccccgcgcactcaccaggcccggcagccgcgcggtcttagcggctcacgcgctcgggcccaggggcggggacgtggggacccgggcggccgctcagccgcggccgcgcggtgaatgagcccgttgtgcggccgccgcggccccagcgacaccccgcgcggggtctacaagggctgacgcgcccccgcggcttccgttcccgggctgggcggtggctcgtctgcgtctccggccctgggggtgggctgcgcgctccatctcgccggcccagtcccctccccagcgtcggtctctcaaggcccctcccaatgggggccaggcggagggtgggccctcgggcctgtggactgaccccggggttcctgggcctgggggcggggatccctgtcccgggctcccctcgctgcgaggctggccctgccagatgacactcagaggcgccttgggtgtcaggccagggacatctctgatgctggggctccccccgctagggtcaggggctgccgggctatcgccttggggttctgcagagaaaacctgaagcccagctgggtcttcactttcctccaggtcaccgtgccccgctactccaactccgtgggactttggaatgcaccttctgggcatttaattcttatccaagtgcctcttaagttatacttctttgctaccagtgtgtcctttggatggaggggaggagaggtggtaggggccgggtggggtggaccccagggactcctgctgctcctgctggacacccagcccggggtacaggagcaggtggggaccagcagaggcggggcggagcaggagcccacacccaaaggctgtagactcctgccaaggctctgccttgatcttgtacaccatgggaggaccagaagggaggcgttgaggtgtccagacctttgctgtggagctgggggtgctgtggcatggggagactgacagacggggagctgtatagggccagattccggtccatggtggtaaccccatcccccaccactgcagatgcggcacaaagccagctgccacaggaggtgcactgccccacgggcagctgtgctcacctgcgtggcgtccgcaggaagccctcagaccctggccagcctggtctctgcttctcactccaggctcaaggctggctgctattccattcaccccattccctttccctcaggccagaagcatcactcacaactccagacccttgcacaccaatctcctcactcagttcaccctcagatgtccaactccacatggccaaaaccgagaccagtctcactccaagctcatccacccgcctagctgcccaagctgaaatccacagttgccctgtacgaccccccgaccccccacctcaccccccagctcacctcaaacctcatcagtccctctgctcacagcctgcacagccaccacccagtctgggcaccatacctctctgggcaacccccatggcccccagccagtcttccagctcccaccctgactccagtgagctgccagagggatccttgaaaaatgctctggaagccaaggtgggcggatcacgaggtcaggaaatggaaaccatcctggctaacatggtgaaactccgtctctactaaaaatacaaaaaaattagccgggcgtggtggcgggcgcctgtagtcccagctactcaggaggctgaggcaggagaatggtgtgaacccgggagggggagcttgcagtgagccgagatcgcgccactgcaccccaggctgggcaacagagtgagactctgtctcaaaaaaaaaaaaaagaaaaaagaaaaatgccctggcactgctcagctcagaaccttgaaagggatccttgtttcgctctgggtcagggtcccatcctcaaagcagtcacttccagagccccatggagcctcatatcccatgatatccacccttattctgtctcaggcccaccagctgcctccctgctgcctgattgtcatgtgtgcattcctgttccagagcctttgcactggcgatgccatctgctgcctggatgtcttcctgctggctggtcccgttgcatggtagccttaggtgtctcctcagagaggtccctcgctgaccatcaggctcctcactccctgtcgtatccccttcaccaaagattcccattccctgacgacgcctgtcccctcggaatgcaggcctcgtgggaattcagcccatccgcaagtgcagtggcagggcggcccccttcccccttgacgacgcctgtccccttggaatgcaggcctcgtgggaattcagcccatctgcaagtgcagtggcagggcggcccccttctcccttgaggacgcctgtcccctcgtaatgcaggcctcgtgggaattcagcccatctgcaagtgcagtggcagggcggcccccttctcccttgaggacgcctgtcccctcgtaatgcaggcctcgtgggaattcagcccatctgcaagtgcagtggcagggcggcccccttctcccttgaggacgcctgtcccctcggaatgcaggcctcgtgggaattcagccccatctgcaagtgcagtggcagggcggcccccttctcccttgacgacgcctgtcccctcggaatgcaggcctcgtgggaattcagccccatcggcaagtgcagtggcagggcggcccccttcacccttgacgacgcctgtcccctcggaatgcaggcctcatgggaattcagcccatctgcaagtgcagtggcagggtggcccccttctccctttcctgtgcactcatgttgcctcttggggtgtgggaggggaaatggggcactcctgggcctccaggaggtgcagagaaccagggtgaggtgtccaccaggtcctgcctggctcctgacccctggcccctgctgctcgcgactggcctgcctcgtgccactgagcctcagagccattccgaacccccaccccaagttttccatctcttgatggtgtagggttggggggtctccatgtacagatactctagttcataccaggccttcatagggttattttccaaggggaagggcccctcgggaagccgggatcggagtcctgtgtggcaccttgcaggctcccacatgctccgttgtggccacggttccagcctggagcatggagctgtgtgggcaccctgcttcctgacgctgaccgtccttctgcagggggtccactggacggggcctgagctacaacttcacccacctggacgggtacctggaccttctcagggagaaccagctcctcccaggtgagctgtgggctctgccctcccagcccgcctgcacccccttgccctgcccaccctctccctcacccagcccctctgagtccttggatgtccattcagggctggccttggtgccggagcacaggcctggcagagcatgggtgtggtgtgtggtgggcggtggggcagccctcctgtgttccagggtttgagctgatgggcagcgcctcgggccacttcactgactttgaggacaagcagcaggtgtttgagtggaaggacttggtctccagcctggccaggagatacatcggtgggcgagcgcaggccctggggccctggccggggcgggggtactcctgggcaggttgcacccctatcacgcaggctgctgcctggtcaggagatacattggtgggcaggcgcaggcccttgtggggggatgggggtgacaagggataggttggtggtcggcgcaggccctggggccccaggctggggggtactcctgggcttggtgggtgggcgaaggccctgggcccctggggtggggggtactcctgggcaggctgcacccctatcacccaggccgcacccctatcacccaggccgccgcccaggtcttggacccccttgagccagcgcttcctgatgtggggcgggaggctggcctgcatggagatggggttcatcttgagtcagacgcccttcatcaccttgcaccctccctccgtgggagtcactgaggcgagattcacctgtgctggggggacagcaaggctcctctgcaggtaggtacggactggcgcatgtttccaagtggaacttcgagacgtggaatgagccagaccaccacgactttgacaacgtctccatgaccatgcaaggtgtgcaccgcttcctggggtcctgcccggctgaaagggggcagaggaaggcaggagcagaggctaagccgctcatccccagggcaggtgtagacgcagtgctcccccggcccaggcttcctgaactactacgatgcctgctcggagggtctgcgcgccgccagccccgccctgcggctgggaggccccggcgactccttccacaccccaccgcgatccccgctgagctggggcctcctgcgccactgccacgacggtaccaacttcttcactggggaggcgggcgtgcggctggactacatctccctccacaggaaggtgcgccctgcccctccgtccgccccggtgttctgcgccctcagccgctgtgccccgggccgcgctgaccctggtggtgctgaggcggccccgcccgcagggtgcgcgcagctccatctccatcctggagcaggagaaggtcgtcgcgcagcagatccggcagctcttccccaagttcgcggacacccccatttacaacgacgaggcggacccgctggtgggctggtccctgccacagccgtggagggcggacgtgacctacgcggccatggtggtgaaggtgggccggcccaacgccctgcgcgccccccggccaccttcctcccgagacgggacaggcgagcggtggccgcgccacccggtcccagctgccctggacacccgcaggtcatcgcgcagcatcagaacctgctactggccaacaccacctccgccttcccctacgcgctcctgagcaacgacaatgccttcctgagctaccacccgcaccccttcgcgcagcgcacgctcaccgcgcgcttccaggtcaacaacacccgcccgccgcacgtgcagctgttgcgcaagccggtgctcacggccatggggctgctggcgctgctgggtgagccggggccgctggggtgggccggccagggccctccaggctggggagcggctcctgcgaaggccccgctgcggggagcgcacttcctccagccgcgcgcttcccggggtcggcctccgcgtggcggggcctggggactccttcaccaaggggagggggagcgagtggtgggaggcccggccctgggtcggggggcggctgggcaacgaccccacgcggcgacggcccccccccgccccgcagatgaggagcagctctgggccgaagtgtcgcaggccgggaccgtcctggacagcaaccacacggtgggcgtcctggccagcgcccaccgcccccagggcccggccgacgcctggcgcgccgcggtgctgatctacgcgagcgacgacacccgcgcccaccccaaccgcagcgtcgcggtgaccctgcggctgcgcggggtgccccccggcccgggtaagccggggttccagggaggtctctggccccgctggggctctggagggggcggcccggggagccgaggcctgagtgtcaggccccgcaggcctggtctacgtcacgcgctacctggacaacgggctctgcagccccgacggcgagtggcggcgcctgggccggcccgtcttccccacggcagagcagttccggcgcatgcgcgcggctgaggtaggtgggccgcggaggggcgaggggccgggccgggccggggtcccgggggggtggggtccggggcgggggctccgaggcggtgtgggtgggaggtggagcggtgggccgggggcgttcgccctgaggtcgggccgagcgtccccagctcccctggagaaccctgaggaccggccactgcgcccaggacccggtggccgcggcgccccgccccttacccgccggcggccgcctgaccctgcgccccgcgctgcggctgccgtcgcttttgctggtgcacgtgtgtgcgcgccccgagaagccgcccgggcaggcaagtggcagtcccctaacccgcgccgcggcccggactccccttccccgacgccatcacagcccttccctcccccaggtcacgcggctccgcgccctgcccctgacccaagggcagctggttctggtctggtcggatgaacacgtgggctccaagtgcgtgagtggggccgcccctccctctgcctggtcctaggcaggtccctgggtcccgaccccttcacccatgcggtcactcgggccacttgccgtggcccatcggctccctccctcgccgccctgcgtccctgcccttcaccccacacactgtgggccacgcgccaggccctgccagtggggtgtgggttctcctaggggacatgagatggacattcgggctccagccctctcctgcctgggcaggaagagtgcccaggggctggggaggtgccgccgaggggcttgagggaatgaggctgtgggtccacgcggccgtgccctgcctgctcccacctttgaggactgtcttgaccccagccttgttcttggcctgacctccccaggtgcctgtggacatacgagatccagttctctcaggacggtaaggcgtacaccccggtcagcaggaagccatcgaccttcaacctctttgtgttcagcccaggtgcgcccaccacccgctgccctggactcggccaccccattcttgggcctcagggcagtactgggtgggggcctcgagaagcctggggtcagggggctttcgggtgggggcaggttccggttggcacacatgtccccttgtctccagacacaggtgctgtctctggctcctaccgagttcgagccctggactactgggcccgaccaggccccttctcggaccctgtgccgtacctggaggtccctgtgccaagagggcccccatccccgggcaatccatgagcctgtgctgagccccagtgggttgcacctccaccggcagtcagcgagctggggctgcactgtgcccatgctgccctcccatcaccccctttgcaatatatttttatattttattattttcttttatatcttggta

SEQ ID NO: 12461 - DNA, 2186 bp, Homo sapiens
gtcacatggggtgcgcgcccagactccgacccggaggcggaaccggcagtgcagcccgaagccccgcagtccccgagcacgcgtggccatgcgtcccctgcgcccccgcgccgcgctgctggcgctcctggcctcgctcctggccgcgcccccggtggccccggccgaggccccgcacctggtgcatgtggacgcggcccgcgcgctgtggcccctgcggcgcttctggaggagcacaggcttctgccccccgctgccacacagccaggctgaccagtacgtcctcagctgggaccagcagctcaacctcgcctatgtgggcgccgtccctcaccgcggcatcaagcaggtccggacccactggctgctggagcttgtcaccaccagggggtccactggacggggcctgagctacaacttcacccacctggacgggtacctggaccttctcagggagaaccagctcctcccagggtttgagctgatgggcagcgcctcgggccacttcactgactttgaggacaagcagcaggtgtttgagtggaaggacttggtctccagcctggccaggagatacatcggtaggtacggactggcgcatgtttccaagtggaacttcgagacgtggaatgagccagaccaccacgactttgacaacgtctccatgaccatgcaaggcttcctgaactactacgatgcctgctcggagggtctgcgcgccgccagccccgccctgcggctgggaggccccggcgactccttccacaccccaccgcgatccccgctgagctggggcctcctgcgccactgccacgacggtaccaacttcttcactggggaggcgggcgtgcggctggactacatctccctccacaggaagggtgcgcgcagctccatctccatcctggagcaggagaaggtcgtcgcgcagcagatccggcagctcttccccaagttcgcggacacccccatttacaacgacgaggcggacccgctggtgggctggtccctgccacagccgtggagggcggacgtgacctacgcggccatggtggtgaaggtcatcgcgcagcatcagaacctgctactggccaacaccacctccgccttcccctacgcgctcctgagcaacgacaatgccttcctgagctaccacccgcaccccttcgcgcagcgcacgctcaccgcgcgcttccaggtcaacaacacccgcccgccgcacgtgcagctgttgcgcaagccggtgctcacggccatggggctgctggcgctgctggatgaggagcagctctgggccgaagtgtcgcaggccgggaccgtcctggacagcaaccacacggtgggcgtcctggccagcgcccaccgcccccagggcccggccgacgcctggcgcgccgcggtgctgatctacgcgagcgacgacacccgcgcccaccccaaccgcagcgtcgcggtgaccctgcggctgcgcggggtgccccccggcccgggcctggtctacgtcacgcgctacctggacaacgggctctgcagccccgacggcgagtggcggcgcctgggccggcccgtcttccccacggcagagcagttccggcgcatgcgcgcggctgaggacccggtggccgcggcgccccgccccttacccgccggcggccgcctgaccctgcgccccgcgctgcggctgccgtcgcttttgctggtgcacgtgtgtgcgcgccccgagaagccgcccgggcaggtcacgcggctccgcgccctgcccctgacccaagggcagctggttctggtctggtcggatgaacacgtgggctccaagtgcctgtggacatacgagatccagttctctcaggacggtaaggcgtacaccccggtcagcaggaagccatcgaccttcaacctctttgtgttcagcccagacacaggtgctgtctctggctcctaccgagttcgagccctggactactgggcccgaccaggccccttctcggaccctgtgccgtacctggaggtccctgtgccaagagggcccccatccccgggcaatccatgagcctgtgctgagccccagtgggttgcacctccaccggcagtcagcgagctggggctgcactgtgcccatgctgccctcccatcaccccctttgcaatatatttttatattttattattttcttttatatcttggta

SEQ ID NO: 12462 - DNA, 649 bp, Homo sapiens
agctctgggccgaagtgtcgcaggccgggaccgtcctggacagcaaccacacggtgggcgtcctggccagcgcccaccgcccccagggcccggccgacgcctggcgcgccgcggtgctgatctacgcgagcgacgacacccgcgcccaccccaaccgcagcgtcgcggtgaccctgcggctgcgcggggtgccccccggcccgggtaagccggggttccagggaggtctctggccccgctggggctctggagggggcggcccggggagccgaggcctgagtgtcaggccccgcaggcctggtctacgtcacgcgctacctggacaacgggctctgcagccccgacggcgagtggcggcgcctgggccggcccgtcttccccacggcagagcagttccggcgcatgcgcgcggctgaggtaggtgggccgcggaggggcgaggggccgggccgggccggggtcccgggggggtggggtccggggcgggggctccgaggcggtgtgggtgggaggtggagcggtgggccgggggcgttcgccctgaggtcgggccgagcgtccccagctcccctggagaaccctgaggaccggccactgcgcccaggacccggtggccgcggcgccccgccccttacccgccggcggccgc

SEQ ID NO: 12463 - DNA, 558 bp, Homo sapiens
agctctgggccgaagtgtcgcaggccgggaccgtcctggacagcaaccacacggtgggcgtcctggccagcgcccaccgcccccagggcccggccgacgcctggcgcgccgcggtgctgatctacgcgagcgacgacacccgcgcccaccccaaccgcagcgtcgcggtgaccctgcggctgcgcggggtgccccccggcccgggcctggtctacgtcacgcgctacctggacaacgggctctgcagccccgacggcgagtggcggcgcctgggccggcccgtcttccccacggcagagcagttccggcgcatgcgcgcggctgaggtaggtgggccgcggaggggcgaggggccgggccgggccggggtcccgggggggtggggtccggggcgggggctccgaggcggtgtgggtgggaggtggagcggtgggccgggggcgttcgccctgaggtcgggccgagcgtccccagctcccctggagaaccctgaggaccggccactgcgcccaggacccggtggccgcggcgccccgccccttacccgccggcggccgc

SEQ ID NO: 12464 - DNA, 14960 bp, Homo sapiens
agtgcagcccgaagccccgcagtccccgagcacgcgtggccatgcgtcccctgcgcccccgcgccgcgctgctggcgctcctggcctcgctcctggccgcgcccccggtggccccggccgaggccccgcacctggtgcatgtggacgcggcccgcgcgctgtggcccctgcggcgcttctggaggagcacaggcttctggtgagcgctccgcggcctccgggaccccctggccgcacggggagagctcgggcgccccctgactgcgcactgtgagagcttcagagaccggagctccctcctctggggccctggctctcccgggcccgccccccgccgtgtttgtgggtgggtcctccacctgagtgggcgccggggcgtgagcctgggccgccccctgcagcccaggccgatgcccgggatcctgctctttgaggtaaaccaggagtctcccctgggagtggacggccctgcagcgggacctggcctgcctgtcccattccttccacctagagctgaggtacccgccttcctggcagggccagggccagggctggcgttggcccctcgtcttactgctgctgccgttccccatgaagatgggacctccccacattcctggccctaagggtcattttattagtcactgaacgcacgggcagcgcctggatcctgcgcccgggcagtcctgggcttgaacgtgtgtgtcagccgcgctgccagccatgctgaggctcgggactgagccgcccctttgttgtccccagccccccgctgccacacagccaggctgaccagtacgtcctcagctgggaccagcagctcaacctcgcctatgtgggcgccgtccctcaccgcggcatcaagcaggtccggacccactggctgctggagcttgtcaccaccaggtgggcggcgggcagggtctgggcgtcccagagccccttacagaggcacagatgggaggggagggctgggggctgctcggaagaccccttgttcccccacctcccgccgaagcaccctgttggggagagcgtgtccttgctggctgtgctggggtgagggctgtgtgctggagggagcccctgcatggggcacggtgggcttcctgcaggtctccctgcaggctcagggttggctgcgccgcacctggctcctggtgcacccgtgagcatccctgtgtgtgtctgctggccaggctgggtagggccactgcacctgagggctgagctgaggtctcatcggtcacagcaccctgggccctgacgctggtgcaggtggccaccctgtgagggggaggcacgaggtgtgaggggcacttgggtgtgtggggccttctggaaacacagagaccctcgtgcacttggccagagccgctggctcctaccagcagggtgggcaccgggcaggcctgggcatagggagtcctcttggcaccttggaggctgcatgatggcgggggacccttgttcaaataagatgtcaaccctgagcgtcaggtcaggcccatccctcctgagctgagggacggtgcattggggcccagccagcactgtgggccagcctgtctcggaggcagaggttcttgatttctgagtgtttgggtcctgcgtgtgatcagagggcctcctttcccagttggggttccccggtttccccagggcagctgtggcacaagagtgcagctcttgggtggctcctccctgggaagggtctcagcagtggcttgcagacgtctgctgtgggtccccaggagggagcagaggctgctgggcaggcctggccctgctacagatgggcatcggtggcctccagctccctgtggcgggctcgtgctgtctgcacggcatcgtgcacactgaggaacagctgctcctcctcagccgtgtccccggggccctccccgaggaagcctcctctgctcagaatgtctctcacaggcgggctgcagcaggctagcagcaggctgatgcccagggccccgtagtctcggcgcaggtcctgcagcgtgctcacaccggctgcgtctaggaacagcagcggggcgcagtcgatgaccactgtgtggaagccggccgctgcgggcaccagcgcagccctggtgctaaccgggcccaggtcctcgccctgggcagggcctccctcaccgacccccgtctctgagcccccctccttcctcctggcagccatgcaccctgcgtccagccccgtgaggctgtagagtgactgcaggaagaagtccttgttggcatagtacagcggccccccaaagcggaacacccgcacgccgggctcagggacgaggccctcgaactctgtggcatcctcgtagaaggccgtgtccccgatgcgggccagcagggcggtgcgtgggcgttgggtgcggccggccaggctgagcagcgagaggatgacgccagccagcagcccggcctctgtgctgaccagcatacaggtggccgcggtgcctgcccagaccagcgcgtcagccgggctcatccgccacagccgcgggaggtcccacaccttgcgcagggccccccgcaggctgaccacgatgacgcaggccagcacgcttcgctgtaggtcgtggaacagcggtgccagcgccagcagcaccagcagcaccacggtggcgctgaccacgctggacagctgtgtccggcagccagtggctgtcttcaccaggctcttggccagggcggcgctggtggcgaagcagtggaggaaggcgggtagcacgttgcagcagcccacagccagcagctcctggttggcacgcacagagtagccgtgactgcgggcgaacatctccgccagcgagatggagaaggcggcagccacgagggccagggccacggcatccaaagccacacgctgcatcagcctgggctctgggacctgagggggcatgaaacccgtggggatgtcgccagccacgctcgagccaaagcgcttgtggagctgcccgaagtgcgacacgagtgtggccaccacgatgaccagcagctccgtgggcagcggcaccctcaggcggtgtcggtagcggtctgagagctccttcgcggctagcagcaccgccaggcacaccgtgctggtgaccacgtcgcacacgttggcctgcccggcgccgcgcagcaggctcagccatgtgaggaccaccatgccgggcccctggtgccgcgggatccgcacgcccagcaggtgtttgagctgcgaggtcaggatggtcacggaggcccccatggcaaagccatcgagcagtggctgtgagaggtaggcggacacgaagcccagccggaggacgcccatgaggacctgtggacggagtgcggtcaggccagcaggcgcctggcgggagccacctgcccctcaccagcacctggcatggcccgaggggtggtggtcacggcacaggacctgacaattctgtgttgcggccccgtgtgttccaaaccagactcctcacacgggcctgagttctggttccacgcgtgctcatgcccgcagacaactgtgacatccacgtgagcatcacacgtgcacacagctggccatagacacgtctaacccttgtcacgtgcagcagcccgttttatttcagaattaagacctctggtatcagaaggcaaccccttcctgctgcttcctacacatggtgcccactgccccccatgcagatgtggagccaacgggggccaaggtggacaggccaaggcaggagaccttcgggggtggggaggccatcccccactccacctaggacagaaggcctgggaggccacatggcctcagtccagcaccactgagccacagccacacctggcctgctggtccccaccaaggccatggcccaccggactggctccccgtgcccctcccctcctgcatccacagcctctccgcgtcggtgcctcgccctgggatgccccggcacgccccagctctgcccaagccttgctgtcttgggccagcacctcctctgccaaccctgtgcttgcccccagccttgccctcgtggatggccaaaacctaagggggggtgccctgggcccctccctgtgcccaagcagggctcctcacctggtaaagcccggtcatcagcgtgagggcggtggcgacacggatggcgtagcagtcacgcccgcagtccagcatggcagccgagccgttgagggtgctgctgttggctccgggctgcaggccgtcctgggaggggtcaaagccggccagctggagctcccggtccaccacctgccccaccatgaggcaaagcaggctgaagatgcccacggagacatgccgtgaggtgcccatgaggaagtagatgaggttggcgaagaaggacgtatagaggctgtagatgggctgcagcccggccagcaatgagtaggcgatggcctgcggcaccaggatgatgccgatgaccagcccagacatgacgtcgcctgccaggtactcccgcgggcggtactgacgcagccagcgcgtggcggggagcaggtcctgcaccagcgcccggacgcacagcacactgcacgagcagctgcaccacagcctggccttcagcatctcacgcagaccccggggtgctgggcgctgccgtcggaccggcaccggccctctgccctgctgcagaggctcaggggactcgtccatcctgttgcgtcaggtcccgtggccgacctgcggccgagaagagggcatggtcacaggagcccccggatccagggccaaacgacaaggtccccggcagcaacgggccccttggggcggacccctcgcccacccagggccggggattggtgctgggccttctcctggcagcgcgggccccagccccctgcccggtatggatggacgctgggccctgctggatccagaatccatcgtgaggtgagatgggattacgacaccaagcccatgccatggggtgtgctgaggccagcagtgctgaggggcggcgtggcggcaccctgtccaggctcagctccggcctattggctctgcggttcctggctgaaaaccaccctgtagcctcctgaagctcacctccccaacggggcaggaacaggctgggctgccaccacgcacatgtgcctaccgtcagaatgtcacagtcactggacacaggtgcaggcaagcctgagtccagctgctccgtgtccacctccctggctccccaggttggcaaacggtcctgctgtccaccccatgcccacaccagagccctccctcccccatccaaaccatcgcctgctctcctggagacacctccacccacccctctgtcacctgccctgtgggtcctggggctggcggaagtctcaggaagaggcctcctatgtccctgccaagctttgtgggtactgggaccccaagtctgctgggggagcagcactcagacactagcctagcccatccgcctggacttgggacagaattctgagaatatgcctggacgggggccccatcagggccagctgggaggggaggagggtgactggcgtctgtctcccctgcccagacagttctgggacgtgaggcgccctttttcccaggctgcaccagctcactgtggaacggccatgacacactgtcccgaggcagcaccgagagggcccagcccgctgcacacagtcaccctgggccggcagagccggaagggcacctgacctttcccttgatctcggaaaacaccgtggcgttagggaggcggtgcttagaggcctgactggtcccacgtgaggcctcgggtctgtcctgtttgcagactccaatgtactttcactttaaacattcttctcagcgacgttaggcaaagactttgctcccaggacaccaggtgcccaggacaccctggagcctgggctgagcctgctgtttgcacgctggcccagggtgtgcgagctccagtctcctggcgggtgtgttggggcagtgagcccagcctggtaggttgacacatgcaggctgggcacagcacccctggggcacagagcgggggtcctggccctcaggcaacattgcaagagttgtgtccccttccctggaagaccccaccacactgggtccctggatgccctgaagcccaccccaagcccctggggtccaggtgtgtggaatggggacagtagggccacctgccttgagcctgagggtgcccctaagaaaccacgagtccagggcatttctggcctcggctcccacgcccccctctgctgcagctgagatctgggcccaggatggttcttacctgagggagtcctcacaggcgcggagggccctgggatgacgaggggctggcaagaccaccgaggaccgcagggccctctggctcccgcgagcagcggggagagtgggggtggtggcgccaacctgcaggcagtggtctgtgccctggactctgtagttcaattatttacctacagattgctgagtcatgggtttctccagccatgttacctgatcggctgatccgggagttgaactgtaatcaggggcttgtaggagttagagctgtgtgggcctctgaggagctcccagcctcccaggagccgctgcagctgtggctctgcggccctgccgggggggcttagggaccagcgggaggcgggggctcaggggctgagcacaggtaaaccttcagctctggggtctggggtcgagtgcagcagccttcaaacccaggcggggctgagggaggcttggtctccgtgtccagtcgccggacaccctcctggtcctgcaaggagccagcctggtccaagctggagcagggcagaggctgacagccggctcagcccaaggctgccggtgcgtgcatatgcgtgtgtgctcgcgtaagccctgtgtgtggtgctcaccgcccagggcgaggactgccggggtcaaggtgccgtgactggccaggagtcctggtctgactggacccagcaccgacccacagcgcctggtcaccctcacggctcctctgccctcccctctaccacagaccaggaccggcagtgcctgcctcatagggctggggtgaagataaatgatttttttaagtgaactaaattaggcccacacgtgaaaataagggtaagctgctttttaaaaggaattattagccaggcacgatggttcactcctgtaattccaacactttgggaggcctagacaggaggatcgcttaaggccagcagttcaagaccagcctggtcaacatagtgagacgccccccaccttttctttttttttttttgaggcggagtcttgctctgtcacccaggccggaatgcagtggtgtgatctcggctcactggaagctctgcctcctgggttcacgccattctcctgcctcagcctcctgagtagctgggactacaggcgcccgccaccgcgcccggctaatttttttttttttgagacggagtttcgctctgttgcccaggctggagtacagtggcatgatctcggctcactgcaagctctgtctcccgggttcaagtgattctcctgcctcagcctcccgagtagctgggactacaggcacccgccaccacgcccggctaattttttgtatttttagtagagacggggtttcaccatgttagccaggatggtcttgatctcctgacctcgtgatccacccacctcggcctcccaaagtgctgggattacaggcttgagccactgcacccggccgccccctgccccccaacctttaaaaaattaaaagtaaaaaattagctgggtgtggtggtgtgtgcctgtatcccagctactcaagcggctcaggtgggagcatggcttgagcccaggagtttgaggctgccatgaggtatgattaggccactgcaccctatcctaggccacagagcaagagcccgtctcaaaaacaaacgctgtcattggcccagcactttgggaagctaaggtaggaggattgcttgagccctggaggtccaggctgcagtgaggtatgtttgtagcgcttcactccagcctacaagtcttttttttttttttttgagatggagtctcgctctgttgcccaggctggagtgcagtggcacaatctcggctcactgcagcctctgcctcccgggttcaagcgattctcctgcctcagccgcctgagtagttgggactacaggcgtgtgccaccacgcccggctaatttttgtatttttagtagagacagggtttcactatgttggtcaggctagtcttgaactcctgaccttgtgatccacccgcctcggcctcccaaagtgctgggattacaggcgtgagccaccgtgcccggccagttctgtctcaaaaaaaaaaaaaaaattccttgggagcctcaggtccccccgactttgacagtgagtactgggtgggagcctgcacggggcacctgtggccggagggtgagtgtaacgaggggctgcagccctcagtgctctcccatcccaagggaggccaggaggctgcggtgggtccctcgggtggggctggaaggccaacccggccctggcaccttgggcagcctgactctgtccggggaacagaagccacaggctctacttctcctgtccatgtgggattgaagccgagggtctcgcagaaccagctgatgtgccggggctccatttccccaagacgaggacactgacattgatggggcacagccccggagggaggagaccctggacactcaccccaccaaaggtacctccttgtggaagccgtctgccaagcgctgctagttccccacagccctgggtgagcccagggaagactgggctgcagtgcccccatttggaggtgaaatgggagtggaatgtagttgggatggccagagagtaggagacatcctaagtgtgagatgtggacagggctgaatgctccagggtctcgtaccccagagtgtgagatgcgggcagggctgaacgctctggggtctcgtacccctgagtgtgagattcgggcagagctgaacaggctccagggtctcatacccccatagcctccacctgggatgccctctccaagtctgatttctcctcgaagcccctgccctgtcctccagagtctgagcccttgcttccaccccagcccaacctgggccccagtggtccctgggaagcagctgtttgctcagcagttgggagctgtgctgtaagaagcggttggccagtgggtggggtaaggcagtcacgcagggcctcaggtccctccctgggacagataagggcccctctgggtgcagccaccagcagggttgttggagaactggggagacccagggggctggggttgttccctcaaggtctccctaaaggaggcagggaggacctgggtgctacagcaggggtggggcacctggtgcagacgcctgcatgcagggtggggtgggcagtgccacctggggccacagaaaaacctggagtgggaggtggcccttcccccctcaggaaaggtggtggaggtttccagaggctggcttatggggacctgtggtgaggttttaggcaggtgagcgtagttcaggaacagcctcagccgcactgcaggggcctggcctcaggtcttctgcaggcattgggccttatgcccttttagtccccacctaggctgggtgtctaaagtaggtgaggtcatcactgcaggatccttggggcctgacctgccccctcccacgtgtctctgcctcagtttctctgagcattgaggcagtggctggtgctgtcctgtggccaggcccagaggctgagtgcccagggggtccaggggccttgctggccagagagagtgggtagcccattctaccccgagcctgtgcacgcgcagggctgccaacacctccttccttccccgcttggcccacgcaggacagggggcgtgggggccccagcaactgggacctgcctgaatccgcctccctcctgaacccccctcccgcctgaacccctggccagtcttgtgtcacacgcttacttccttagttttgtctttaaatcagccgttttacattggagtccatttactgggaaaggagaccttgcatccttgcctcccacccgtgggaagaagcccggccgacagggctttgagaccggacccgagtttattcccagagaccctcccgcgggtgggcgagctccgaggtctggagaagaggaggccccggcccgcaccctctagcacctgtgtccccttcgtcccggccacagatgcaggttctcccaagaggcgggtctgtacccgccccgcgcccccagcccagcgggcccggcctccgcccctgccccgcactcccacccccaccctcaggagagcgcggccctgctccccaccccgcgcggtctccccccaccgcctgcgaacccccatgcacgcgcggccccgccccgcgcactcaccaggcccggcagccgcgcggtcttagcggctcacgcgctcgggcccaggggcggggacgtggggacccgggcggccgctcagccgcggccgcgcggtgaatgagcccgttgtgcggccgccgcggccccagcgacaccccgcgcggggtctacaagggctgacgcgcccccgcggcttccgttcccgggctgggcggtggctcgtctgcgtctccggccctgggggtgggctgcgcgctccatctcgccggcccagtcccctccccagcgtcggtctctcaaggcccctcccaatgggggccaggcggagggtgggccctcgggcctgtggactgaccccggggttcctgggcctgggggcggggatccctgtcccgggctcccctcgctgcgaggctggccctgccagatgacactcagaggcgccttgggtgtcaggccagggacatctctgatgctggggctccccccgctagggtcaggggctgccgggctatcgccttggggttctgcagagaaaacctgaagcccagctgggtcttcactttcctccaggtcaccgtgccccgctactccaactccgtgggactttggaatgcaccttctgggcatttaattcttatccaagtgcctcttaagttatacttctttgctaccagtgtgtcctttggatggaggggaggagaggtggtaggggccgggtggggtggaccccagggactcctgctgctcctgctggacacccagcccggggtacaggagcaggtggggaccagcagaggcggggcggagcaggagcccacacccaaaggctgtagactcctgccaaggctctgccttgatcttgtacaccatgggaggaccagaagggaggcgttgaggtgtccagacctttgctgtggagctgggggtgctgtggcatggggagactgacagacggggagctgtatagggccagattccggtccatggtggtaaccccatcccccaccactgcagatgcggcacaaagccagctgccacaggaggtgcactgccccacgggcagctgtgctcacctgcgtggcgtccgcaggaagccctcagaccctggccagcctggtctctgcttctcactccaggctcaaggctggctgctattccattcaccccattccctttccctcaggccagaagcatcactcacaactccagacccttgcacaccaatctcctcactcagttcaccctcagatgtccaactccacatggccaaaaccgagaccagtctcactccaagctcatccacccgcctagctgcccaagctgaaatccacagttgccctgtacgaccccccgaccccccacctcaccccccagctcacctcaaacctcatcagtccctctgctcacagcctgcacagccaccacccagtctgggcaccatacctctctgggcaacccccatggcccccagccagtcttccagctcccaccctgactccagtgagctgccagagggatccttgaaaaatgctctggaagccaaggtgggcggatcacgaggtcaggaaatggaaaccatcctggctaacatggtgaaactccgtctctactaaaaatacaaaaaaattagccgggcgtggtggcgggcgcctgtagtcccagctactcaggaggctgaggcaggagaatggtgtgaacccgggagggggagcttgcagtgagccgagatcgcgccactgcaccccaggctgggcaacagagtgagactctgtctcaaaaaaaaaaaaaagaaaaaagaaaaatgccctggcactgctcagctcagaaccttgaaagggatccttgtttcgctctgggtcagggtcccatcctcaaagcagtcacttccagagccccatggagcctcatatcccatgatatccacccttattctgtctcaggcccaccagctgcctccctgctgcctgattgtcatgtgtgcattcctgttccagagcctttgcactggcgatgccatctgctgcctggatgtcttcctgctggctggtcccgttgcatggtagccttaggtgtctcctcagagaggtccctcgctgaccatcaggctcctcactccctgtcgtatccccttcaccaaagattcccattccctgacgacgcctgtcccctcggaatgcaggcctcgtgggaattcagcccatccgcaagtgcagtggcagggcggcccccttcccccttgacgacgcctgtccccttggaatgcaggcctcgtgggaattcagcccatctgcaagtgcagtggcagggcggcccccttctcccttgaggacgcctgtcccctcgtaatgcaggcctcgtgggaattcagcccatctgcaagtgcagtggcagggcggcccccttctcccttgaggacgcctgtcccctcgtaatgcaggcctcgtgggaattcagcccatctgcaagtgcagtggcagggcggcccccttctcccttgaggacgcctgtcccctcggaatgcaggcctcgtgggaattcagccccatctgcaagtgcagtggcagggcggcccccttctcccttgacgacgcctgtcccctcggaatgcaggcctcgtgggaattcagccccatcggcaagtgcagtggcagggcggcccccttcacccttgacgacgcctgtcccctcggaatgcaggcctcatgggaattcagcccatctgcaagtgcagtggcagggtggcccccttctccctttcctgtgcactcatgttgcctcttggggtgtgggaggggaaatggggcactcctgggcctccaggaggtgcagagaaccagggtgaggtgtccaccaggtcctgcctggctcctgacccctggcccctgctgctcgcgactggcctgcctcgtgccactgagcctcagagccattccgaacccccaccccaagttttccatctcttgatggtgtagggttggggggtctccatgtacagatactctagttcataccaggccttcatagggttattttccaaggggaagggcccctcgggaagccgggatcggagtcctgtgtggcaccttgcaggctcccacatgctccgttgtggccacggttccagcctggagcatggagctgtgtgggcaccctgcttcctgacgctgaccgtccttctgcagggggtccactggacggggcctgagctacaacttcacccacctggacgggtacctggaccttctcagggagaaccagctcctcccaggtgagctgtgggctctgccctcccagcccgcctgcacccccttgccctgcccaccctctccctcacccagcccctctgagtccttggatgtccattcagggctggccttggtgccggagcacaggcctggcagagcatgggtgtggtgtgtggtgggcggtggggcagccctcctgtgttccagggtttgagctgatgggcagcgcctcgggccacttcactgactttgaggacaagcagcaggtgtttgagtggaaggacttggtctccagcctggccaggagatacatcggtgggcgagcgcaggccctggggccctggccggggcgggggtactcctgggcaggttgcacccctatcacgcaggctgctgcctggtcaggagatacattggtgggcaggcgcaggcccttgtggggggatgggggtgacaagggataggttggtggtcggcgcaggccctggggccccaggctggggggtactcctgggcttggtgggtgggcgaaggccctgggcccctggggtggggggtactcctgggcaggctgcacccctatcacccaggccgcacccctatcacccaggccgccgcccaggtcttggacccccttgagccagcgcttcctgatgtggggcgggaggctggcctgcatggagatggggttcatcttgagtcagacgcccttcatcaccttgcaccctccctccgtgggagtcactgaggcgagattcacctgtgctggggggacagcaaggctcctctgcaggtaggtacggactggcgcatgtttccaagtggaacttcgagacgtggaatgagccagaccaccacgactttgacaacgtctccatgaccatgcaaggtgtgcaccgcttcctggggtcctgcccggctgaaagggggcagaggaaggcaggagcagaggctaagccgctcatccccagggcaggtgtagacgcagtgctcccccggcccaggcttcctgaactactacgatgcctgctcggagggtctgcgcgccgccagccccgccctgcggctgggaggccccggcgactccttccacaccccaccgcgatccccgctgagctggggcctcctgcgccactgccacgacggtaccaacttcttcactggggaggcgggcgtgcggctggactacatctccctccacaggaaggtgcgccctgcccctccgtccgccccggtgttctgcgccctcagccgctgtgccccgggccgcgctgaccctggtggtgctgaggcggccccgcccgcagggtgcgcgcagctccatctcca

SEQ ID NO: 12465 - DNA, 714 bp, Homo sapiens
agtgcagcccgaagccccgcagtccccgagcacgcgtggccatgcgtcccctgcgcccccgcgccgcgctgctggcgctcctggcctcgctcctggccgcgcccccggtggccccggccgaggccccgcacctggtgcatgtggacgcggcccgcgcgctgtggcccctgcggcgcttctggaggagcacaggcttctgggggtccactggacggggcctgagctacaacttcacccacctggacgggtacctggaccttctcagggagaaccagctcctcccagggtttgagctgatgggcagcgcctcgggccacttcactgactttgaggacaagcagcaggtgtttgagtggaaggacttggtctccagcctggccaggagatacatcggtaggtacggactggcgcatgtttccaagtggaacttcgagacgtggaatgagccagaccaccacgactttgacaacgtctccatgaccatgcaaggcttcctgaactactacgatgcctgctcggagggtctgcgcgccgccagccccgccctgcggctgggaggccccggcgactccttccacaccccaccgcgatccccgctgagctggggcctcctgcgccactgccacgacggtaccaacttcttcactggggaggcgggcgtgcggctggactacatctccctccacaggaagggtgcgcgcagctccatctcca

SEQ ID NO: 12466 - DNA, 14629 bp, Homo sapiens
gcgtcccctgcgcccccgcgccgcgctgctggcgctcctggcctcgctcctggccgcgcccccggtggccccggccgaggccccgcacctggtgcatgtggacgcggcccgcgcgctgtggcccctgcggcgcttctggaggagcacaggcttctggtgagcgctccgcggcctccgggaccccctggccgcacggggagagctcgggcgccccctgactgcgcactgtgagagcttcagagaccggagctccctcctctggggccctggctctcccgggcccgccccccgccgtgtttgtgggtgggtcctccacctgagtgggcgccggggcgtgagcctgggccgccccctgcagcccaggccgatgcccgggatcctgctctttgaggtaaaccaggagtctcccctgggagtggacggccctgcagcgggacctggcctgcctgtcccattccttccacctagagctgaggtacccgccttcctggcagggccagggccagggctggcgttggcccctcgtcttactgctgctgccgttccccatgaagatgggacctccccacattcctggccctaagggtcattttattagtcactgaacgcacgggcagcgcctggatcctgcgcccgggcagtcctgggcttgaacgtgtgtgtcagccgcgctgccagccatgctgaggctcgggactgagccgcccctttgttgtccccagccccccgctgccacacagccaggctgaccagtacgtcctcagctgggaccagcagctcaacctcgcctatgtgggcgccgtccctcaccgcggcatcaagcaggtccggacccactggctgctggagcttgtcaccaccaggtgggcggcgggcagggtctgggcgtcccagagccccttacagaggcacagatgggaggggagggctgggggctgctcggaagaccccttgttcccccacctcccgccgaagcaccctgttggggagagcgtgtccttgctggctgtgctggggtgagggctgtgtgctggagggagcccctgcatggggcacggtgggcttcctgcaggtctccctgcaggctcagggttggctgcgccgcacctggctcctggtgcacccgtgagcatccctgtgtgtgtctgctggccaggctgggtagggccactgcacctgagggctgagctgaggtctcatcggtcacagcaccctgggccctgacgctggtgcaggtggccaccctgtgagggggaggcacgaggtgtgaggggcacttgggtgtgtggggccttctggaaacacagagaccctcgtgcacttggccagagccgctggctcctaccagcagggtgggcaccgggcaggcctgggcatagggagtcctcttggcaccttggaggctgcatgatggcgggggacccttgttcaaataagatgtcaaccctgagcgtcaggtcaggcccatccctcctgagctgagggacggtgcattggggcccagccagcactgtgggccagcctgtctcggaggcagaggttcttgatttctgagtgtttgggtcctgcgtgtgatcagagggcctcctttcccagttggggttccccggtttccccagggcagctgtggcacaagagtgcagctcttgggtggctcctccctgggaagggtctcagcagtggcttgcagacgtctgctgtgggtccccaggagggagcagaggctgctgggcaggcctggccctgctacagatgggcatcggtggcctccagctccctgtggcgggctcgtgctgtctgcacggcatcgtgcacactgaggaacagctgctcctcctcagccgtgtccccggggccctccccgaggaagcctcctctgctcagaatgtctctcacaggcgggctgcagcaggctagcagcaggctgatgcccagggccccgtagtctcggcgcaggtcctgcagcgtgctcacaccggctgcgtctaggaacagcagcggggcgcagtcgatgaccactgtgtggaagccggccgctgcgggcaccagcgcagccctggtgctaaccgggcccaggtcctcgccctgggcagggcctccctcaccgacccccgtctctgagcccccctccttcctcctggcagccatgcaccctgcgtccagccccgtgaggctgtagagtgactgcaggaagaagtccttgttggcatagtacagcggccccccaaagcggaacacccgcacgccgggctcagggacgaggccctcgaactctgtggcatcctcgtagaaggccgtgtccccgatgcgggccagcagggcggtgcgtgggcgttgggtgcggccggccaggctgagcagcgagaggatgacgccagccagcagcccggcctctgtgctgaccagcatacaggtggccgcggtgcctgcccagaccagcgcgtcagccgggctcatccgccacagccgcgggaggtcccacaccttgcgcagggccccccgcaggctgaccacgatgacgcaggccagcacgcttcgctgtaggtcgtggaacagcggtgccagcgccagcagcaccagcagcaccacggtggcgctgaccacgctggacagctgtgtccggcagccagtggctgtcttcaccaggctcttggccagggcggcgctggtggcgaagcagtggaggaaggcgggtagcacgttgcagcagcccacagccagcagctcctggttggcacgcacagagtagccgtgactgcgggcgaacatctccgccagcgagatggagaaggcggcagccacgagggccagggccacggcatccaaagccacacgctgcatcagcctgggctctgggacctgagggggcatgaaacccgtggggatgtcgccagccacgctcgagccaaagcgcttgtggagctgcccgaagtgcgacacgagtgtggccaccacgatgaccagcagctccgtgggcagcggcaccctcaggcggtgtcggtagcggtctgagagctccttcgcggctagcagcaccgccaggcacaccgtgctggtgaccacgtcgcacacgttggcctgcccggcgccgcgcagcaggctcagccatgtgaggaccaccatgccgggcccctggtgccgcgggatccgcacgcccagcaggtgtttgagctgcgaggtcaggatggtcacggaggcccccatggcaaagccatcgagcagtggctgtgagaggtaggcggacacgaagcccagccggaggacgcccatgaggacctgtggacggagtgcggtcaggccagcaggcgcctggcgggagccacctgcccctcaccagcacctggcatggcccgaggggtggtggtcacggcacaggacctgacaattctgtgttgcggccccgtgtgttccaaaccagactcctcacacgggcctgagttctggttccacgcgtgctcatgcccgcagacaactgtgacatccacgtgagcatcacacgtgcacacagctggccatagacacgtctaacccttgtcacgtgcagcagcccgttttatttcagaattaagacctctggtatcagaaggcaaccccttcctgctgcttcctacacatggtgcccactgccccccatgcagatgtggagccaacgggggccaaggtggacaggccaaggcaggagaccttcgggggtggggaggccatcccccactccacctaggacagaaggcctgggaggccacatggcctcagtccagcaccactgagccacagccacacctggcctgctggtccccaccaaggccatggcccaccggactggctccccgtgcccctcccctcctgcatccacagcctctccgcgtcggtgcctcgccctgggatgccccggcacgccccagctctgcccaagccttgctgtcttgggccagcacctcctctgccaaccctgtgcttgcccccagccttgccctcgtggatggccaaaacctaagggggggtgccctgggcccctccctgtgcccaagcagggctcctcacctggtaaagcccggtcatcagcgtgagggcggtggcgacacggatggcgtagcagtcacgcccgcagtccagcatggcagccgagccgttgagggtgctgctgttggctccgggctgcaggccgtcctgggaggggtcaaagccggccagctggagctcccggtccaccacctgccccaccatgaggcaaagcaggctgaagatgcccacggagacatgccgtgaggtgcccatgaggaagtagatgaggttggcgaagaaggacgtatagaggctgtagatgggctgcagcccggccagcaatgagtaggcgatggcctgcggcaccaggatgatgccgatgaccagcccagacatgacgtcgcctgccaggtactcccgcgggcggtactgacgcagccagcgcgtggcggggagcaggtcctgcaccagcgcccggacgcacagcacactgcacgagcagctgcaccacagcctggccttcagcatctcacgcagaccccggggtgctgggcgctgccgtcggaccggcaccggccctctgccctgctgcagaggctcaggggactcgtccatcctgttgcgtcaggtcccgtggccgacctgcggccgagaagagggcatggtcacaggagcccccggatccagggccaaacgacaaggtccccggcagcaacgggccccttggggcggacccctcgcccacccagggccggggattggtgctgggccttctcctggcagcgcgggccccagccccctgcccggtatggatggacgctgggccctgctggatccagaatccatcgtgaggtgagatgggattacgacaccaagcccatgccatggggtgtgctgaggccagcagtgctgaggggcggcgtggcggcaccctgtccaggctcagctccggcctattggctctgcggttcctggctgaaaaccaccctgtagcctcctgaagctcacctccccaacggggcaggaacaggctgggctgccaccacgcacatgtgcctaccgtcagaatgtcacagtcactggacacaggtgcaggcaagcctgagtccagctgctccgtgtccacctccctggctccccaggttggcaaacggtcctgctgtccaccccatgcccacaccagagccctccctcccccatccaaaccatcgcctgctctcctggagacacctccacccacccctctgtcacctgccctgtgggtcctggggctggcggaagtctcaggaagaggcctcctatgtccctgccaagctttgtgggtactgggaccccaagtctgctgggggagcagcactcagacactagcctagcccatccgcctggacttgggacagaattctgagaatatgcctggacgggggccccatcagggccagctgggaggggaggagggtgactggcgtctgtctcccctgcccagacagttctgggacgtgaggcgccctttttcccaggctgcaccagctcactgtggaacggccatgacacactgtcccgaggcagcaccgagagggcccagcccgctgcacacagtcaccctgggccggcagagccggaagggcacctgacctttcccttgatctcggaaaacaccgtggcgttagggaggcggtgcttagaggcctgactggtcccacgtgaggcctcgggtctgtcctgtttgcagactccaatgtactttcactttaaacattcttctcagcgacgttaggcaaagactttgctcccaggacaccaggtgcccaggacaccctggagcctgggctgagcctgctgtttgcacgctggcccagggtgtgcgagctccagtctcctggcgggtgtgttggggcagtgagcccagcctggtaggttgacacatgcaggctgggcacagcacccctggggcacagagcgggggtcctggccctcaggcaacattgcaagagttgtgtccccttccctggaagaccccaccacactgggtccctggatgccctgaagcccaccccaagcccctggggtccaggtgtgtggaatggggacagtagggccacctgccttgagcctgagggtgcccctaagaaaccacgagtccagggcatttctggcctcggctcccacgcccccctctgctgcagctgagatctgggcccaggatggttcttacctgagggagtcctcacaggcgcggagggccctgggatgacgaggggctggcaagaccaccgaggaccgcagggccctctggctcccgcgagcagcggggagagtgggggtggtggcgccaacctgcaggcagtggtctgtgccctggactctgtagttcaattatttacctacagattgctgagtcatgggtttctccagccatgttacctgatcggctgatccgggagttgaactgtaatcaggggcttgtaggagttagagctgtgtgggcctctgaggagctcccagcctcccaggagccgctgcagctgtggctctgcggccctgccgggggggcttagggaccagcgggaggcgggggctcaggggctgagcacaggtaaaccttcagctctggggtctggggtcgagtgcagcagccttcaaacccaggcggggctgagggaggcttggtctccgtgtccagtcgccggacaccctcctggtcctgcaaggagccagcctggtccaagctggagcagggcagaggctgacagccggctcagcccaaggctgccggtgcgtgcatatgcgtgtgtgctcgcgtaagccctgtgtgtggtgctcaccgcccagggcgaggactgccggggtcaaggtgccgtgactggccaggagtcctggtctgactggacccagcaccgacccacagcgcctggtcaccctcacggctcctctgccctcccctctaccacagaccaggaccggcagtgcctgcctcatagggctggggtgaagataaatgatttttttaagtgaactaaattaggcccacacgtgaaaataagggtaagctgctttttaaaaggaattattagccaggcacgatggttcactcctgtaattccaacactttgggaggcctagacaggaggatcgcttaaggccagcagttcaagaccagcctggtcaacatagtgagacgccccccaccttttctttttttttttttgaggcggagtcttgctctgtcacccaggccggaatgcagtggtgtgatctcggctcactggaagctctgcctcctgggttcacgccattctcctgcctcagcctcctgagtagctgggactacaggcgcccgccaccgcgcccggctaatttttttttttttgagacggagtttcgctctgttgcccaggctggagtacagtggcatgatctcggctcactgcaagctctgtctcccgggttcaagtgattctcctgcctcagcctcccgagtagctgggactacaggcacccgccaccacgcccggctaattttttgtatttttagtagagacggggtttcaccatgttagccaggatggtcttgatctcctgacctcgtgatccacccacctcggcctcccaaagtgctgggattacaggcttgagccactgcacccggccgccccctgccccccaacctttaaaaaattaaaagtaaaaaattagctgggtgtggtggtgtgtgcctgtatcccagctactcaagcggctcaggtgggagcatggcttgagcccaggagtttgaggctgccatgaggtatgattaggccactgcaccctatcctaggccacagagcaagagcccgtctcaaaaacaaacgctgtcattggcccagcactttgggaagctaaggtaggaggattgcttgagccctggaggtccaggctgcagtgaggtatgtttgtagcgcttcactccagcctacaagtcttttttttttttttttgagatggagtctcgctctgttgcccaggctggagtgcagtggcacaatctcggctcactgcagcctctgcctcccgggttcaagcgattctcctgcctcagccgcctgagtagttgggactacaggcgtgtgccaccacgcccggctaatttttgtatttttagtagagacagggtttcactatgttggtcaggctagtcttgaactcctgaccttgtgatccacccgcctcggcctcccaaagtgctgggattacaggcgtgagccaccgtgcccggccagttctgtctcaaaaaaaaaaaaaaaattccttgggagcctcaggtccccccgactttgacagtgagtactgggtgggagcctgcacggggcacctgtggccggagggtgagtgtaacgaggggctgcagccctcagtgctctcccatcccaagggaggccaggaggctgcggtgggtccctcgggtggggctggaaggccaacccggccctggcaccttgggcagcctgactctgtccggggaacagaagccacaggctctacttctcctgtccatgtgggattgaagccgagggtctcgcagaaccagctgatgtgccggggctccatttccccaagacgaggacactgacattgatggggcacagccccggagggaggagaccctggacactcaccccaccaaaggtacctccttgtggaagccgtctgccaagcgctgctagttccccacagccctgggtgagcccagggaagactgggctgcagtgcccccatttggaggtgaaatgggagtggaatgtagttgggatggccagagagtaggagacatcctaagtgtgagatgtggacagggctgaatgctccagggtctcgtaccccagagtgtgagatgcgggcagggctgaacgctctggggtctcgtacccctgagtgtgagattcgggcagagctgaacaggctccagggtctcatacccccatagcctccacctgggatgccctctccaagtctgatttctcctcgaagcccctgccctgtcctccagagtctgagcccttgcttccaccccagcccaacctgggccccagtggtccctgggaagcagctgtttgctcagcagttgggagctgtgctgtaagaagcggttggccagtgggtggggtaaggcagtcacgcagggcctcaggtccctccctgggacagataagggcccctctgggtgcagccaccagcagggttgttggagaactggggagacccagggggctggggttgttccctcaaggtctccctaaaggaggcagggaggacctgggtgctacagcaggggtggggcacctggtgcagacgcctgcatgcagggtggggtgggcagtgccacctggggccacagaaaaacctggagtgggaggtggcccttcccccctcaggaaaggtggtggaggtttccagaggctggcttatggggacctgtggtgaggttttaggcaggtgagcgtagttcaggaacagcctcagccgcactgcaggggcctggcctcaggtcttctgcaggcattgggccttatgcccttttagtccccacctaggctgggtgtctaaagtaggtgaggtcatcactgcaggatccttggggcctgacctgccccctcccacgtgtctctgcctcagtttctctgagcattgaggcagtggctggtgctgtcctgtggccaggcccagaggctgagtgcccagggggtccaggggccttgctggccagagagagtgggtagcccattctaccccgagcctgtgcacgcgcagggctgccaacacctccttccttccccgcttggcccacgcaggacagggggcgtgggggccccagcaactgggacctgcctgaatccgcctccctcctgaacccccctcccgcctgaacccctggccagtcttgtgtcacacgcttacttccttagttttgtctttaaatcagccgttttacattggagtccatttactgggaaaggagaccttgcatccttgcctcccacccgtgggaagaagcccggccgacagggctttgagaccggacccgagtttattcccagagaccctcccgcgggtgggcgagctccgaggtctggagaagaggaggccccggcccgcaccctctagcacctgtgtccccttcgtcccggccacagatgcaggttctcccaagaggcgggtctgtacccgccccgcgcccccagcccagcgggcccggcctccgcccctgccccgcactcccacccccaccctcaggagagcgcggccctgctccccaccccgcgcggtctccccccaccgcctgcgaacccccatgcacgcgcggccccgccccgcgcactcaccaggcccggcagccgcgcggtcttagcggctcacgcgctcgggcccaggggcggggacgtggggacccgggcggccgctcagccgcggccgcgcggtgaatgagcccgttgtgcggccgccgcggccccagcgacaccccgcgcggggtctacaagggctgacgcgcccccgcggcttccgttcccgggctgggcggtggctcgtctgcgtctccggccctgggggtgggctgcgcgctccatctcgccggcccagtcccctccccagcgtcggtctctcaaggcccctcccaatgggggccaggcggagggtgggccctcgggcctgtggactgaccccggggttcctgggcctgggggcggggatccctgtcccgggctcccctcgctgcgaggctggccctgccagatgacactcagaggcgccttgggtgtcaggccagggacatctctgatgctggggctccccccgctagggtcaggggctgccgggctatcgccttggggttctgcagagaaaacctgaagcccagctgggtcttcactttcctccaggtcaccgtgccccgctactccaactccgtgggactttggaatgcaccttctgggcatttaattcttatccaagtgcctcttaagttatacttctttgctaccagtgtgtcctttggatggaggggaggagaggtggtaggggccgggtggggtggaccccagggactcctgctgctcctgctggacacccagcccggggtacaggagcaggtggggaccagcagaggcggggcggagcaggagcccacacccaaaggctgtagactcctgccaaggctctgccttgatcttgtacaccatgggaggaccagaagggaggcgttgaggtgtccagacctttgctgtggagctgggggtgctgtggcatggggagactgacagacggggagctgtatagggccagattccggtccatggtggtaaccccatcccccaccactgcagatgcggcacaaagccagctgccacaggaggtgcactgccccacgggcagctgtgctcacctgcgtggcgtccgcaggaagccctcagaccctggccagcctggtctctgcttctcactccaggctcaaggctggctgctattccattcaccccattccctttccctcaggccagaagcatcactcacaactccagacccttgcacaccaatctcctcactcagttcaccctcagatgtccaactccacatggccaaaaccgagaccagtctcactccaagctcatccacccgcctagctgcccaagctgaaatccacagttgccctgtacgaccccccgaccccccacctcaccccccagctcacctcaaacctcatcagtccctctgctcacagcctgcacagccaccacccagtctgggcaccatacctctctgggcaacccccatggcccccagccagtcttccagctcccaccctgactccagtgagctgccagagggatccttgaaaaatgctctggaagccaaggtgggcggatcacgaggtcaggaaatggaaaccatcctggctaacatggtgaaactccgtctctactaaaaatacaaaaaaattagccgggcgtggtggcgggcgcctgtagtcccagctactcaggaggctgaggcaggagaatggtgtgaacccgggagggggagcttgcagtgagccgagatcgcgccactgcaccccaggctgggcaacagagtgagactctgtctcaaaaaaaaaaaaaagaaaaaagaaaaatgccctggcactgctcagctcagaaccttgaaagggatccttgtttcgctctgggtcagggtcccatcctcaaagcagtcacttccagagccccatggagcctcatatcccatgatatccacccttattctgtctcaggcccaccagctgcctccctgctgcctgattgtcatgtgtgcattcctgttccagagcctttgcactggcgatgccatctgctgcctggatgtcttcctgctggctggtcccgttgcatggtagccttaggtgtctcctcagagaggtccctcgctgaccatcaggctcctcactccctgtcgtatccccttcaccaaagattcccattccctgacgacgcctgtcccctcggaatgcaggcctcgtgggaattcagcccatccgcaagtgcagtggcagggcggcccccttcccccttgacgacgcctgtccccttggaatgcaggcctcgtgggaattcagcccatctgcaagtgcagtggcagggcggcccccttctcccttgaggacgcctgtcccctcgtaatgcaggcctcgtgggaattcagcccatctgcaagtgcagtggcagggcggcccccttctcccttgaggacgcctgtcccctcgtaatgcaggcctcgtgggaattcagcccatctgcaagtgcagtggcagggcggcccccttctcccttgaggacgcctgtcccctcggaatgcaggcctcgtgggaattcagccccatctgcaagtgcagtggcagggcggcccccttctcccttgacgacgcctgtcccctcggaatgcaggcctcgtgggaattcagccccatcggcaagtgcagtggcagggcggcccccttcacccttgacgacgcctgtcccctcggaatgcaggcctcatgggaattcagcccatctgcaagtgcagtggcagggtggcccccttctccctttcctgtgcactcatgttgcctcttggggtgtgggaggggaaatggggcactcctgggcctccaggaggtgcagagaaccagggtgaggtgtccaccaggtcctgcctggctcctgacccctggcccctgctgctcgcgactggcctgcctcgtgccactgagcctcagagccattccgaacccccaccccaagttttccatctcttgatggtgtagggttggggggtctccatgtacagatactctagttcataccaggccttcatagggttattttccaaggggaagggcccctcgggaagccgggatcggagtcctgtgtggcaccttgcaggctcccacatgctccgttgtggccacggttccagcctggagcatggagctgtgtgggcaccctgcttcctgacgctgaccgtccttctgcagggggtccactggacggggcctgagctacaacttcacccacctggacgggtacctggaccttctcagggagaaccagctcctcccaggtgagctgtgggctctgccctcccagcccgcctgcacccccttgccctgcccaccctctccctcacccagcccctctgagtccttggatgtccattcagggctggccttggtgccggagcacaggcctggcagagcatgggtgtggtgtgtggtgggcggtggggcagccctcctgtgttccagggtttgagctgatgggcagcgcctcgggccacttcactgactttgaggacaagcagcaggtgtttgagtggaaggacttggtctccagcctggccaggagatacatcggtgggcgagcgcaggccctggggccctggccggggcgggggtactcctgggcaggttgcacccctatcacgcaggctgctgcctggtcaggagatacattggtgggcaggcgcaggcccttgtggggggatgggggtgacaagggataggttggtggtcggcgcaggccctggggccccaggctggggggtactcctgggcttggtgggtgggcgaaggccctgggcccctggggtggggggtactcctgggcaggctgcacccctatcacccaggccgcacccctatcacccaggccgccgcccaggtcttggacccccttgagccagcgcttcctgatgtggggcgggaggctggcctgcatggagatggggttcatcttgagtcagacgcccttcatcaccttgcaccctccctccgtgggagtcactgaggcgagattcacctgtgctggggggacagcaaggctcctctgcaggtaggtacggactggcgcatgtttccaagtggaacttcgagacgtggaatgagccagaccaccacgactttgacaacgtctccatgaccatgcaaggtgtgcaccgcttcctggggtcctgcccggctgaaagggggcagaggaaggcaggagcagaggctaagccgctcatccccagggcaggtgtagacgcagtgctcccccggcccaggcttcctgaactactacgatgcctgctcggagggtct

SEQ ID NO: 12467 - DNA, 586 bp, Homo sapiens
gcgtcccctgcgcccccgcgccgcgctgctggcgctcctggcctcgctcctggccgcgcccccggtggccccggccgaggccccgcacctggtgcatgtggacgcggcccgcgcgctgtggcccctgcggcgcttctggaggagcacaggcttctgccccccgctgccacacagccaggctgaccagtacgtcctcagctgggaccagcagctcaacctcgcctatgtgggcgccgtccctcaccgcggcatcaagcagggggtccactggacggggcctgagctacaacttcacccacctggacgggtacctggaccttctcagggagaaccagctcctcccagggtttgagctgatgggcagcgcctcgggccacttcactgactttgaggacaagcagcaggtgtttgagtggaaggacttggtctccagcctggccaggagatacatcggtaggtacggactggcgcatgtttccaagtggaacttcgagacgtggaatgagccagaccaccacgactttgacaacgtctccatgaccatgcaaggcttcctgaactactacgatgcctgctcggagggtct

SEQ ID NO: 12468 - DNA, 14104 bp, Homo sapiens
cgcgtggccatgcgtcccctgcgcccccgcgccgcgctgctggcgctcctggcctcgctcctggccgcgcccccggtggccccggccgaggccccgcacctggtgcatgtggacgcggcccgcgcgctgtggcccctgcggcgcttctggaggagcacaggcttctggtgagcgctccgcggcctccgggaccccctggccgcacggggagagctcgggcgccccctgactgcgcactgtgagagcttcagagaccggagctccctcctctggggccctggctctcccgggcccgccccccgccgtgtttgtgggtgggtcctccacctgagtgggcgccggggcgtgagcctgggccgccccctgcagcccaggccgatgcccgggatcctgctctttgaggtaaaccaggagtctcccctgggagtggacggccctgcagcgggacctggcctgcctgtcccattccttccacctagagctgaggtacccgccttcctggcagggccagggccagggctggcgttggcccctcgtcttactgctgctgccgttccccatgaagatgggacctccccacattcctggccctaagggtcattttattagtcactgaacgcacgggcagcgcctggatcctgcgcccgggcagtcctgggcttgaacgtgtgtgtcagccgcgctgccagccatgctgaggctcgggactgagccgcccctttgttgtccccagccccccgctgccacacagccaggctgaccagtacgtcctcagctgggaccagcagctcaacctcgcctatgtgggcgccgtccctcaccgcggcatcaagcaggtccggacccactggctgctggagcttgtcaccaccaggtgggcggcgggcagggtctgggcgtcccagagccccttacagaggcacagatgggaggggagggctgggggctgctcggaagaccccttgttcccccacctcccgccgaagcaccctgttggggagagcgtgtccttgctggctgtgctggggtgagggctgtgtgctggagggagcccctgcatggggcacggtgggcttcctgcaggtctccctgcaggctcagggttggctgcgccgcacctggctcctggtgcacccgtgagcatccctgtgtgtgtctgctggccaggctgggtagggccactgcacctgagggctgagctgaggtctcatcggtcacagcaccctgggccctgacgctggtgcaggtggccaccctgtgagggggaggcacgaggtgtgaggggcacttgggtgtgtggggccttctggaaacacagagaccctcgtgcacttggccagagccgctggctcctaccagcagggtgggcaccgggcaggcctgggcatagggagtcctcttggcaccttggaggctgcatgatggcgggggacccttgttcaaataagatgtcaaccctgagcgtcaggtcaggcccatccctcctgagctgagggacggtgcattggggcccagccagcactgtgggccagcctgtctcggaggcagaggttcttgatttctgagtgtttgggtcctgcgtgtgatcagagggcctcctttcccagttggggttccccggtttccccagggcagctgtggcacaagagtgcagctcttgggtggctcctccctgggaagggtctcagcagtggcttgcagacgtctgctgtgggtccccaggagggagcagaggctgctgggcaggcctggccctgctacagatgggcatcggtggcctccagctccctgtggcgggctcgtgctgtctgcacggcatcgtgcacactgaggaacagctgctcctcctcagccgtgtccccggggccctccccgaggaagcctcctctgctcagaatgtctctcacaggcgggctgcagcaggctagcagcaggctgatgcccagggccccgtagtctcggcgcaggtcctgcagcgtgctcacaccggctgcgtctaggaacagcagcggggcgcagtcgatgaccactgtgtggaagccggccgctgcgggcaccagcgcagccctggtgctaaccgggcccaggtcctcgccctgggcagggcctccctcaccgacccccgtctctgagcccccctccttcctcctggcagccatgcaccctgcgtccagccccgtgaggctgtagagtgactgcaggaagaagtccttgttggcatagtacagcggccccccaaagcggaacacccgcacgccgggctcagggacgaggccctcgaactctgtggcatcctcgtagaaggccgtgtccccgatgcgggccagcagggcggtgcgtgggcgttgggtgcggccggccaggctgagcagcgagaggatgacgccagccagcagcccggcctctgtgctgaccagcatacaggtggccgcggtgcctgcccagaccagcgcgtcagccgggctcatccgccacagccgcgggaggtcccacaccttgcgcagggccccccgcaggctgaccacgatgacgcaggccagcacgcttcgctgtaggtcgtggaacagcggtgccagcgccagcagcaccagcagcaccacggtggcgctgaccacgctggacagctgtgtccggcagccagtggctgtcttcaccaggctcttggccagggcggcgctggtggcgaagcagtggaggaaggcgggtagcacgttgcagcagcccacagccagcagctcctggttggcacgcacagagtagccgtgactgcgggcgaacatctccgccagcgagatggagaaggcggcagccacgagggccagggccacggcatccaaagccacacgctgcatcagcctgggctctgggacctgagggggcatgaaacccgtggggatgtcgccagccacgctcgagccaaagcgcttgtggagctgcccgaagtgcgacacgagtgtggccaccacgatgaccagcagctccgtgggcagcggcaccctcaggcggtgtcggtagcggtctgagagctccttcgcggctagcagcaccgccaggcacaccgtgctggtgaccacgtcgcacacgttggcctgcccggcgccgcgcagcaggctcagccatgtgaggaccaccatgccgggcccctggtgccgcgggatccgcacgcccagcaggtgtttgagctgcgaggtcaggatggtcacggaggcccccatggcaaagccatcgagcagtggctgtgagaggtaggcggacacgaagcccagccggaggacgcccatgaggacctgtggacggagtgcggtcaggccagcaggcgcctggcgggagccacctgcccctcaccagcacctggcatggcccgaggggtggtggtcacggcacaggacctgacaattctgtgttgcggccccgtgtgttccaaaccagactcctcacacgggcctgagttctggttccacgcgtgctcatgcccgcagacaactgtgacatccacgtgagcatcacacgtgcacacagctggccatagacacgtctaacccttgtcacgtgcagcagcccgttttatttcagaattaagacctctggtatcagaaggcaaccccttcctgctgcttcctacacatggtgcccactgccccccatgcagatgtggagccaacgggggccaaggtggacaggccaaggcaggagaccttcgggggtggggaggccatcccccactccacctaggacagaaggcctgggaggccacatggcctcagtccagcaccactgagccacagccacacctggcctgctggtccccaccaaggccatggcccaccggactggctccccgtgcccctcccctcctgcatccacagcctctccgcgtcggtgcctcgccctgggatgccccggcacgccccagctctgcccaagccttgctgtcttgggccagcacctcctctgccaaccctgtgcttgcccccagccttgccctcgtggatggccaaaacctaagggggggtgccctgggcccctccctgtgcccaagcagggctcctcacctggtaaagcccggtcatcagcgtgagggcggtggcgacacggatggcgtagcagtcacgcccgcagtccagcatggcagccgagccgttgagggtgctgctgttggctccgggctgcaggccgtcctgggaggggtcaaagccggccagctggagctcccggtccaccacctgccccaccatgaggcaaagcaggctgaagatgcccacggagacatgccgtgaggtgcccatgaggaagtagatgaggttggcgaagaaggacgtatagaggctgtagatgggctgcagcccggccagcaatgagtaggcgatggcctgcggcaccaggatgatgccgatgaccagcccagacatgacgtcgcctgccaggtactcccgcgggcggtactgacgcagccagcgcgtggcggggagcaggtcctgcaccagcgcccggacgcacagcacactgcacgagcagctgcaccacagcctggccttcagcatctcacgcagaccccggggtgctgggcgctgccgtcggaccggcaccggccctctgccctgctgcagaggctcaggggactcgtccatcctgttgcgtcaggtcccgtggccgacctgcggccgagaagagggcatggtcacaggagcccccggatccagggccaaacgacaaggtccccggcagcaacgggccccttggggcggacccctcgcccacccagggccggggattggtgctgggccttctcctggcagcgcgggccccagccccctgcccggtatggatggacgctgggccctgctggatccagaatccatcgtgaggtgagatgggattacgacaccaagcccatgccatggggtgtgctgaggccagcagtgctgaggggcggcgtggcggcaccctgtccaggctcagctccggcctattggctctgcggttcctggctgaaaaccaccctgtagcctcctgaagctcacctccccaacggggcaggaacaggctgggctgccaccacgcacatgtgcctaccgtcagaatgtcacagtcactggacacaggtgcaggcaagcctgagtccagctgctccgtgtccacctccctggctccccaggttggcaaacggtcctgctgtccaccccatgcccacaccagagccctccctcccccatccaaaccatcgcctgctctcctggagacacctccacccacccctctgtcacctgccctgtgggtcctggggctggcggaagtctcaggaagaggcctcctatgtccctgccaagctttgtgggtactgggaccccaagtctgctgggggagcagcactcagacactagcctagcccatccgcctggacttgggacagaattctgagaatatgcctggacgggggccccatcagggccagctgggaggggaggagggtgactggcgtctgtctcccctgcccagacagttctgggacgtgaggcgccctttttcccaggctgcaccagctcactgtggaacggccatgacacactgtcccgaggcagcaccgagagggcccagcccgctgcacacagtcaccctgggccggcagagccggaagggcacctgacctttcccttgatctcggaaaacaccgtggcgttagggaggcggtgcttagaggcctgactggtcccacgtgaggcctcgggtctgtcctgtttgcagactccaatgtactttcactttaaacattcttctcagcgacgttaggcaaagactttgctcccaggacaccaggtgcccaggacaccctggagcctgggctgagcctgctgtttgcacgctggcccagggtgtgcgagctccagtctcctggcgggtgtgttggggcagtgagcccagcctggtaggttgacacatgcaggctgggcacagcacccctggggcacagagcgggggtcctggccctcaggcaacattgcaagagttgtgtccccttccctggaagaccccaccacactgggtccctggatgccctgaagcccaccccaagcccctggggtccaggtgtgtggaatggggacagtagggccacctgccttgagcctgagggtgcccctaagaaaccacgagtccagggcatttctggcctcggctcccacgcccccctctgctgcagctgagatctgggcccaggatggttcttacctgagggagtcctcacaggcgcggagggccctgggatgacgaggggctggcaagaccaccgaggaccgcagggccctctggctcccgcgagcagcggggagagtgggggtggtggcgccaacctgcaggcagtggtctgtgccctggactctgtagttcaattatttacctacagattgctgagtcatgggtttctccagccatgttacctgatcggctgatccgggagttgaactgtaatcaggggcttgtaggagttagagctgtgtgggcctctgaggagctcccagcctcccaggagccgctgcagctgtggctctgcggccctgccgggggggcttagggaccagcgggaggcgggggctcaggggctgagcacaggtaaaccttcagctctggggtctggggtcgagtgcagcagccttcaaacccaggcggggctgagggaggcttggtctccgtgtccagtcgccggacaccctcctggtcctgcaaggagccagcctggtccaagctggagcagggcagaggctgacagccggctcagcccaaggctgccggtgcgtgcatatgcgtgtgtgctcgcgtaagccctgtgtgtggtgctcaccgcccagggcgaggactgccggggtcaaggtgccgtgactggccaggagtcctggtctgactggacccagcaccgacccacagcgcctggtcaccctcacggctcctctgccctcccctctaccacagaccaggaccggcagtgcctgcctcatagggctggggtgaagataaatgatttttttaagtgaactaaattaggcccacacgtgaaaataagggtaagctgctttttaaaaggaattattagccaggcacgatggttcactcctgtaattccaacactttgggaggcctagacaggaggatcgcttaaggccagcagttcaagaccagcctggtcaacatagtgagacgccccccaccttttctttttttttttttgaggcggagtcttgctctgtcacccaggccggaatgcagtggtgtgatctcggctcactggaagctctgcctcctgggttcacgccattctcctgcctcagcctcctgagtagctgggactacaggcgcccgccaccgcgcccggctaatttttttttttttgagacggagtttcgctctgttgcccaggctggagtacagtggcatgatctcggctcactgcaagctctgtctcccgggttcaagtgattctcctgcctcagcctcccgagtagctgggactacaggcacccgccaccacgcccggctaattttttgtatttttagtagagacggggtttcaccatgttagccaggatggtcttgatctcctgacctcgtgatccacccacctcggcctcccaaagtgctgggattacaggcttgagccactgcacccggccgccccctgccccccaacctttaaaaaattaaaagtaaaaaattagctgggtgtggtggtgtgtgcctgtatcccagctactcaagcggctcaggtgggagcatggcttgagcccaggagtttgaggctgccatgaggtatgattaggccactgcaccctatcctaggccacagagcaagagcccgtctcaaaaacaaacgctgtcattggcccagcactttgggaagctaaggtaggaggattgcttgagccctggaggtccaggctgcagtgaggtatgtttgtagcgcttcactccagcctacaagtcttttttttttttttttgagatggagtctcgctctgttgcccaggctggagtgcagtggcacaatctcggctcactgcagcctctgcctcccgggttcaagcgattctcctgcctcagccgcctgagtagttgggactacaggcgtgtgccaccacgcccggctaatttttgtatttttagtagagacagggtttcactatgttggtcaggctagtcttgaactcctgaccttgtgatccacccgcctcggcctcccaaagtgctgggattacaggcgtgagccaccgtgcccggccagttctgtctcaaaaaaaaaaaaaaaattccttgggagcctcaggtccccccgactttgacagtgagtactgggtgggagcctgcacggggcacctgtggccggagggtgagtgtaacgaggggctgcagccctcagtgctctcccatcccaagggaggccaggaggctgcggtgggtccctcgggtggggctggaaggccaacccggccctggcaccttgggcagcctgactctgtccggggaacagaagccacaggctctacttctcctgtccatgtgggattgaagccgagggtctcgcagaaccagctgatgtgccggggctccatttccccaagacgaggacactgacattgatggggcacagccccggagggaggagaccctggacactcaccccaccaaaggtacctccttgtggaagccgtctgccaagcgctgctagttccccacagccctgggtgagcccagggaagactgggctgcagtgcccccatttggaggtgaaatgggagtggaatgtagttgggatggccagagagtaggagacatcctaagtgtgagatgtggacagggctgaatgctccagggtctcgtaccccagagtgtgagatgcgggcagggctgaacgctctggggtctcgtacccctgagtgtgagattcgggcagagctgaacaggctccagggtctcatacccccatagcctccacctgggatgccctctccaagtctgatttctcctcgaagcccctgccctgtcctccagagtctgagcccttgcttccaccccagcccaacctgggccccagtggtccctgggaagcagctgtttgctcagcagttgggagctgtgctgtaagaagcggttggccagtgggtggggtaaggcagtcacgcagggcctcaggtccctccctgggacagataagggcccctctgggtgcagccaccagcagggttgttggagaactggggagacccagggggctggggttgttccctcaaggtctccctaaaggaggcagggaggacctgggtgctacagcaggggtggggcacctggtgcagacgcctgcatgcagggtggggtgggcagtgccacctggggccacagaaaaacctggagtgggaggtggcccttcccccctcaggaaaggtggtggaggtttccagaggctggcttatggggacctgtggtgaggttttaggcaggtgagcgtagttcaggaacagcctcagccgcactgcaggggcctggcctcaggtcttctgcaggcattgggccttatgcccttttagtccccacctaggctgggtgtctaaagtaggtgaggtcatcactgcaggatccttggggcctgacctgccccctcccacgtgtctctgcctcagtttctctgagcattgaggcagtggctggtgctgtcctgtggccaggcccagaggctgagtgcccagggggtccaggggccttgctggccagagagagtgggtagcccattctaccccgagcctgtgcacgcgcagggctgccaacacctccttccttccccgcttggcccacgcaggacagggggcgtgggggccccagcaactgggacctgcctgaatccgcctccctcctgaacccccctcccgcctgaacccctggccagtcttgtgtcacacgcttacttccttagttttgtctttaaatcagccgttttacattggagtccatttactgggaaaggagaccttgcatccttgcctcccacccgtgggaagaagcccggccgacagggctttgagaccggacccgagtttattcccagagaccctcccgcgggtgggcgagctccgaggtctggagaagaggaggccccggcccgcaccctctagcacctgtgtccccttcgtcccggccacagatgcaggttctcccaagaggcgggtctgtacccgccccgcgcccccagcccagcgggcccggcctccgcccctgccccgcactcccacccccaccctcaggagagcgcggccctgctccccaccccgcgcggtctccccccaccgcctgcgaacccccatgcacgcgcggccccgccccgcgcactcaccaggcccggcagccgcgcggtcttagcggctcacgcgctcgggcccaggggcggggacgtggggacccgggcggccgctcagccgcggccgcgcggtgaatgagcccgttgtgcggccgccgcggccccagcgacaccccgcgcggggtctacaagggctgacgcgcccccgcggcttccgttcccgggctgggcggtggctcgtctgcgtctccggccctgggggtgggctgcgcgctccatctcgccggcccagtcccctccccagcgtcggtctctcaaggcccctcccaatgggggccaggcggagggtgggccctcgggcctgtggactgaccccggggttcctgggcctgggggcggggatccctgtcccgggctcccctcgctgcgaggctggccctgccagatgacactcagaggcgccttgggtgtcaggccagggacatctctgatgctggggctccccccgctagggtcaggggctgccgggctatcgccttggggttctgcagagaaaacctgaagcccagctgggtcttcactttcctccaggtcaccgtgccccgctactccaactccgtgggactttggaatgcaccttctgggcatttaattcttatccaagtgcctcttaagttatacttctttgctaccagtgtgtcctttggatggaggggaggagaggtggtaggggccgggtggggtggaccccagggactcctgctgctcctgctggacacccagcccggggtacaggagcaggtggggaccagcagaggcggggcggagcaggagcccacacccaaaggctgtagactcctgccaaggctctgccttgatcttgtacaccatgggaggaccagaagggaggcgttgaggtgtccagacctttgctgtggagctgggggtgctgtggcatggggagactgacagacggggagctgtatagggccagattccggtccatggtggtaaccccatcccccaccactgcagatgcggcacaaagccagctgccacaggaggtgcactgccccacgggcagctgtgctcacctgcgtggcgtccgcaggaagccctcagaccctggccagcctggtctctgcttctcactccaggctcaaggctggctgctattccattcaccccattccctttccctcaggccagaagcatcactcacaactccagacccttgcacaccaatctcctcactcagttcaccctcagatgtccaactccacatggccaaaaccgagaccagtctcactccaagctcatccacccgcctagctgcccaagctgaaatccacagttgccctgtacgaccccccgaccccccacctcaccccccagctcacctcaaacctcatcagtccctctgctcacagcctgcacagccaccacccagtctgggcaccatacctctctgggcaacccccatggcccccagccagtcttccagctcccaccctgactccagtgagctgccagagggatccttgaaaaatgctctggaagccaaggtgggcggatcacgaggtcaggaaatggaaaccatcctggctaacatggtgaaactccgtctctactaaaaatacaaaaaaattagccgggcgtggtggcgggcgcctgtagtcccagctactcaggaggctgaggcaggagaatggtgtgaacccgggagggggagcttgcagtgagccgagatcgcgccactgcaccccaggctgggcaacagagtgagactctgtctcaaaaaaaaaaaaaagaaaaaagaaaaatgccctggcactgctcagctcagaaccttgaaagggatccttgtttcgctctgggtcagggtcccatcctcaaagcagtcacttccagagccccatggagcctcatatcccatgatatccacccttattctgtctcaggcccaccagctgcctccctgctgcctgattgtcatgtgtgcattcctgttccagagcctttgcactggcgatgccatctgctgcctggatgtcttcctgctggctggtcccgttgcatggtagccttaggtgtctcctcagagaggtccctcgctgaccatcaggctcctcactccctgtcgtatccccttcaccaaagattcccattccctgacgacgcctgtcccctcggaatgcaggcctcgtgggaattcagcccatccgcaagtgcagtggcagggcggcccccttcccccttgacgacgcctgtccccttggaatgcaggcctcgtgggaattcagcccatctgcaagtgcagtggcagggcggcccccttctcccttgaggacgcctgtcccctcgtaatgcaggcctcgtgggaattcagcccatctgcaagtgcagtggcagggcggcccccttctcccttgaggacgcctgtcccctcgtaatgcaggcctcgtgggaattcagcccatctgcaagtgcagtggcagggcggcccccttctcccttgaggacgcctgtcccctcggaatgcaggcctcgtgggaattcagccccatctgcaagtgcagtggcagggcggcccccttctcccttgacgacgcctgtcccctcggaatgcaggcctcgtgggaattcagccccatcggcaagtgcagtggcagggcggcccccttcacccttgacgacgcctgtcccctcggaatgcaggcctcatgggaattcagcccatctgcaagtgcagtggcagggtggcccccttctccctttcctgtgcactcatgttgcctcttggggtgtgggaggggaaatggggcactcctgggcctccaggaggtgcagagaaccagggtgaggtgtccaccaggtcctgcctggctcctgacccctggcccctgctgctcgcgactggcctgcctcgtgccactgagcctcagagccattccgaacccccaccccaagttttccatctcttgatggtgtagggttggggggtctccatgtacagatactctagttcataccaggccttcatagggttattttccaaggggaagggcccctcgggaagccgggatcggagtcctgtgtggcaccttgcaggctcccacatgctccgttgtggccacggttccagcctggagcatggagctgtgtgggcaccctgcttcctgacgctgaccgtccttctgcagggggtccactggacggggcctgagctacaacttcacccacctggacgggtacctggaccttctcagggagaaccagctcctcccaggtgagctgtgggctctgccctcccagcccgcctgcacccccttgccctgcccaccctctccctcacccagcccctctgagtccttggatgtccattcagggctggccttggtgccggagcacaggcctggcagagcatgggtgtggtgtgtggtgggcggtggggcagccctcctgtgttccagggtttgagctgatgggcagcgcctcgggccacttcactgactttgaggacaagcagcaggtgtttgagtggaaggacttggtctccagcctggccaggagatacatcggtgggcgagcgcaggccctggggccctggccggggcgggggtactcctgggcaggttgcacccctatcacgcaggctgctgcctggtcaggagatacattggtgggcaggcgcaggcccttgtggggggatgggggtgacaagggataggttggtggtcggcgcaggccctggggccccaggctgggggg

SEQ ID NO: 12469 - DNA, 692 bp, Homo sapiens
cgcgtggccatgcgtcccctgcgcccccgcgccgcgctgctggcgctcctggcctcgctcctggccgcgcccccggtggccccggccgaggccccgcacctggtgcatgtggacgcggcccgcgcgctgtggcccctgcggcgcttctggaggagcacaggcttctgccccccgctgccacacagccaggctgaccagtacgtcctcagctgggaccagcagctcaacctcgcctatgtgggcgccgtccctcaccgcggcatcaagcaggtccggacccactggctgctggagcttgtcaccaccagggggtccactggacggggcctgagctacaacttcacccacctggacgggtacctggaccttctcagggagaaccagctcctcccagggtttgagctgatgggcagcgcctcgggccacttcactgactttgaggacaagcagcaggtgtttgagtggaaggacttggtctccagcctggccaggagatacatcggtgggcgagcgcaggccctggggccctggccggggcgggggtactcctgggcaggttgcacccctatcacgcaggctgctgcctggtcaggagatacattggtgggcaggcgcaggcccttgtggggggatgggggtgacaagggataggttggtggtcggcgcaggccctggggccccaggctgggggg

SEQ ID NO: 12470 - DNA, 14073 bp, Homo sapiens
tccccgagcacgcgtggccatgcgtcccctgcgcccccgcgccgcgctgctggcgctcctggcctcgctcctggccgcgcccccggtggccccggccgaggccccgcacctggtgcatgtggacgcggcccgcgcgctgtggcccctgcggcgcttctggaggagcacaggcttctggtgagcgctccgcggcctccgggaccccctggccgcacggggagagctcgggcgccccctgactgcgcactgtgagagcttcagagaccggagctccctcctctggggccctggctctcccgggcccgccccccgccgtgtttgtgggtgggtcctccacctgagtgggcgccggggcgtgagcctgggccgccccctgcagcccaggccgatgcccgggatcctgctctttgaggtaaaccaggagtctcccctgggagtggacggccctgcagcgggacctggcctgcctgtcccattccttccacctagagctgaggtacccgccttcctggcagggccagggccagggctggcgttggcccctcgtcttactgctgctgccgttccccatgaagatgggacctccccacattcctggccctaagggtcattttattagtcactgaacgcacgggcagcgcctggatcctgcgcccgggcagtcctgggcttgaacgtgtgtgtcagccgcgctgccagccatgctgaggctcgggactgagccgcccctttgttgtccccagccccccgctgccacacagccaggctgaccagtacgtcctcagctgggaccagcagctcaacctcgcctatgtgggcgccgtccctcaccgcggcatcaagcaggtccggacccactggctgctggagcttgtcaccaccaggtgggcggcgggcagggtctgggcgtcccagagccccttacagaggcacagatgggaggggagggctgggggctgctcggaagaccccttgttcccccacctcccgccgaagcaccctgttggggagagcgtgtccttgctggctgtgctggggtgagggctgtgtgctggagggagcccctgcatggggcacggtgggcttcctgcaggtctccctgcaggctcagggttggctgcgccgcacctggctcctggtgcacccgtgagcatccctgtgtgtgtctgctggccaggctgggtagggccactgcacctgagggctgagctgaggtctcatcggtcacagcaccctgggccctgacgctggtgcaggtggccaccctgtgagggggaggcacgaggtgtgaggggcacttgggtgtgtggggccttctggaaacacagagaccctcgtgcacttggccagagccgctggctcctaccagcagggtgggcaccgggcaggcctgggcatagggagtcctcttggcaccttggaggctgcatgatggcgggggacccttgttcaaataagatgtcaaccctgagcgtcaggtcaggcccatccctcctgagctgagggacggtgcattggggcccagccagcactgtgggccagcctgtctcggaggcagaggttcttgatttctgagtgtttgggtcctgcgtgtgatcagagggcctcctttcccagttggggttccccggtttccccagggcagctgtggcacaagagtgcagctcttgggtggctcctccctgggaagggtctcagcagtggcttgcagacgtctgctgtgggtccccaggagggagcagaggctgctgggcaggcctggccctgctacagatgggcatcggtggcctccagctccctgtggcgggctcgtgctgtctgcacggcatcgtgcacactgaggaacagctgctcctcctcagccgtgtccccggggccctccccgaggaagcctcctctgctcagaatgtctctcacaggcgggctgcagcaggctagcagcaggctgatgcccagggccccgtagtctcggcgcaggtcctgcagcgtgctcacaccggctgcgtctaggaacagcagcggggcgcagtcgatgaccactgtgtggaagccggccgctgcgggcaccagcgcagccctggtgctaaccgggcccaggtcctcgccctgggcagggcctccctcaccgacccccgtctctgagcccccctccttcctcctggcagccatgcaccctgcgtccagccccgtgaggctgtagagtgactgcaggaagaagtccttgttggcatagtacagcggccccccaaagcggaacacccgcacgccgggctcagggacgaggccctcgaactctgtggcatcctcgtagaaggccgtgtccccgatgcgggccagcagggcggtgcgtgggcgttgggtgcggccggccaggctgagcagcgagaggatgacgccagccagcagcccggcctctgtgctgaccagcatacaggtggccgcggtgcctgcccagaccagcgcgtcagccgggctcatccgccacagccgcgggaggtcccacaccttgcgcagggccccccgcaggctgaccacgatgacgcaggccagcacgcttcgctgtaggtcgtggaacagcggtgccagcgccagcagcaccagcagcaccacggtggcgctgaccacgctggacagctgtgtccggcagccagtggctgtcttcaccaggctcttggccagggcggcgctggtggcgaagcagtggaggaaggcgggtagcacgttgcagcagcccacagccagcagctcctggttggcacgcacagagtagccgtgactgcgggcgaacatctccgccagcgagatggagaaggcggcagccacgagggccagggccacggcatccaaagccacacgctgcatcagcctgggctctgggacctgagggggcatgaaacccgtggggatgtcgccagccacgctcgagccaaagcgcttgtggagctgcccgaagtgcgacacgagtgtggccaccacgatgaccagcagctccgtgggcagcggcaccctcaggcggtgtcggtagcggtctgagagctccttcgcggctagcagcaccgccaggcacaccgtgctggtgaccacgtcgcacacgttggcctgcccggcgccgcgcagcaggctcagccatgtgaggaccaccatgccgggcccctggtgccgcgggatccgcacgcccagcaggtgtttgagctgcgaggtcaggatggtcacggaggcccccatggcaaagccatcgagcagtggctgtgagaggtaggcggacacgaagcccagccggaggacgcccatgaggacctgtggacggagtgcggtcaggccagcaggcgcctggcgggagccacctgcccctcaccagcacctggcatggcccgaggggtggtggtcacggcacaggacctgacaattctgtgttgcggccccgtgtgttccaaaccagactcctcacacgggcctgagttctggttccacgcgtgctcatgcccgcagacaactgtgacatccacgtgagcatcacacgtgcacacagctggccatagacacgtctaacccttgtcacgtgcagcagcccgttttatttcagaattaagacctctggtatcagaaggcaaccccttcctgctgcttcctacacatggtgcccactgccccccatgcagatgtggagccaacgggggccaaggtggacaggccaaggcaggagaccttcgggggtggggaggccatcccccactccacctaggacagaaggcctgggaggccacatggcctcagtccagcaccactgagccacagccacacctggcctgctggtccccaccaaggccatggcccaccggactggctccccgtgcccctcccctcctgcatccacagcctctccgcgtcggtgcctcgccctgggatgccccggcacgccccagctctgcccaagccttgctgtcttgggccagcacctcctctgccaaccctgtgcttgcccccagccttgccctcgtggatggccaaaacctaagggggggtgccctgggcccctccctgtgcccaagcagggctcctcacctggtaaagcccggtcatcagcgtgagggcggtggcgacacggatggcgtagcagtcacgcccgcagtccagcatggcagccgagccgttgagggtgctgctgttggctccgggctgcaggccgtcctgggaggggtcaaagccggccagctggagctcccggtccaccacctgccccaccatgaggcaaagcaggctgaagatgcccacggagacatgccgtgaggtgcccatgaggaagtagatgaggttggcgaagaaggacgtatagaggctgtagatgggctgcagcccggccagcaatgagtaggcgatggcctgcggcaccaggatgatgccgatgaccagcccagacatgacgtcgcctgccaggtactcccgcgggcggtactgacgcagccagcgcgtggcggggagcaggtcctgcaccagcgcccggacgcacagcacactgcacgagcagctgcaccacagcctggccttcagcatctcacgcagaccccggggtgctgggcgctgccgtcggaccggcaccggccctctgccctgctgcagaggctcaggggactcgtccatcctgttgcgtcaggtcccgtggccgacctgcggccgagaagagggcatggtcacaggagcccccggatccagggccaaacgacaaggtccccggcagcaacgggccccttggggcggacccctcgcccacccagggccggggattggtgctgggccttctcctggcagcgcgggccccagccccctgcccggtatggatggacgctgggccctgctggatccagaatccatcgtgaggtgagatgggattacgacaccaagcccatgccatggggtgtgctgaggccagcagtgctgaggggcggcgtggcggcaccctgtccaggctcagctccggcctattggctctgcggttcctggctgaaaaccaccctgtagcctcctgaagctcacctccccaacggggcaggaacaggctgggctgccaccacgcacatgtgcctaccgtcagaatgtcacagtcactggacacaggtgcaggcaagcctgagtccagctgctccgtgtccacctccctggctccccaggttggcaaacggtcctgctgtccaccccatgcccacaccagagccctccctcccccatccaaaccatcgcctgctctcctggagacacctccacccacccctctgtcacctgccctgtgggtcctggggctggcggaagtctcaggaagaggcctcctatgtccctgccaagctttgtgggtactgggaccccaagtctgctgggggagcagcactcagacactagcctagcccatccgcctggacttgggacagaattctgagaatatgcctggacgggggccccatcagggccagctgggaggggaggagggtgactggcgtctgtctcccctgcccagacagttctgggacgtgaggcgccctttttcccaggctgcaccagctcactgtggaacggccatgacacactgtcccgaggcagcaccgagagggcccagcccgctgcacacagtcaccctgggccggcagagccggaagggcacctgacctttcccttgatctcggaaaacaccgtggcgttagggaggcggtgcttagaggcctgactggtcccacgtgaggcctcgggtctgtcctgtttgcagactccaatgtactttcactttaaacattcttctcagcgacgttaggcaaagactttgctcccaggacaccaggtgcccaggacaccctggagcctgggctgagcctgctgtttgcacgctggcccagggtgtgcgagctccagtctcctggcgggtgtgttggggcagtgagcccagcctggtaggttgacacatgcaggctgggcacagcacccctggggcacagagcgggggtcctggccctcaggcaacattgcaagagttgtgtccccttccctggaagaccccaccacactgggtccctggatgccctgaagcccaccccaagcccctggggtccaggtgtgtggaatggggacagtagggccacctgccttgagcctgagggtgcccctaagaaaccacgagtccagggcatttctggcctcggctcccacgcccccctctgctgcagctgagatctgggcccaggatggttcttacctgagggagtcctcacaggcgcggagggccctgggatgacgaggggctggcaagaccaccgaggaccgcagggccctctggctcccgcgagcagcggggagagtgggggtggtggcgccaacctgcaggcagtggtctgtgccctggactctgtagttcaattatttacctacagattgctgagtcatgggtttctccagccatgttacctgatcggctgatccgggagttgaactgtaatcaggggcttgtaggagttagagctgtgtgggcctctgaggagctcccagcctcccaggagccgctgcagctgtggctctgcggccctgccgggggggcttagggaccagcgggaggcgggggctcaggggctgagcacaggtaaaccttcagctctggggtctggggtcgagtgcagcagccttcaaacccaggcggggctgagggaggcttggtctccgtgtccagtcgccggacaccctcctggtcctgcaaggagccagcctggtccaagctggagcagggcagaggctgacagccggctcagcccaaggctgccggtgcgtgcatatgcgtgtgtgctcgcgtaagccctgtgtgtggtgctcaccgcccagggcgaggactgccggggtcaaggtgccgtgactggccaggagtcctggtctgactggacccagcaccgacccacagcgcctggtcaccctcacggctcctctgccctcccctctaccacagaccaggaccggcagtgcctgcctcatagggctggggtgaagataaatgatttttttaagtgaactaaattaggcccacacgtgaaaataagggtaagctgctttttaaaaggaattattagccaggcacgatggttcactcctgtaattccaacactttgggaggcctagacaggaggatcgcttaaggccagcagttcaagaccagcctggtcaacatagtgagacgccccccaccttttctttttttttttttgaggcggagtcttgctctgtcacccaggccggaatgcagtggtgtgatctcggctcactggaagctctgcctcctgggttcacgccattctcctgcctcagcctcctgagtagctgggactacaggcgcccgccaccgcgcccggctaatttttttttttttgagacggagtttcgctctgttgcccaggctggagtacagtggcatgatctcggctcactgcaagctctgtctcccgggttcaagtgattctcctgcctcagcctcccgagtagctgggactacaggcacccgccaccacgcccggctaattttttgtatttttagtagagacggggtttcaccatgttagccaggatggtcttgatctcctgacctcgtgatccacccacctcggcctcccaaagtgctgggattacaggcttgagccactgcacccggccgccccctgccccccaacctttaaaaaattaaaagtaaaaaattagctgggtgtggtggtgtgtgcctgtatcccagctactcaagcggctcaggtgggagcatggcttgagcccaggagtttgaggctgccatgaggtatgattaggccactgcaccctatcctaggccacagagcaagagcccgtctcaaaaacaaacgctgtcattggcccagcactttgggaagctaaggtaggaggattgcttgagccctggaggtccaggctgcagtgaggtatgtttgtagcgcttcactccagcctacaagtcttttttttttttttttgagatggagtctcgctctgttgcccaggctggagtgcagtggcacaatctcggctcactgcagcctctgcctcccgggttcaagcgattctcctgcctcagccgcctgagtagttgggactacaggcgtgtgccaccacgcccggctaatttttgtatttttagtagagacagggtttcactatgttggtcaggctagtcttgaactcctgaccttgtgatccacccgcctcggcctcccaaagtgctgggattacaggcgtgagccaccgtgcccggccagttctgtctcaaaaaaaaaaaaaaaattccttgggagcctcaggtccccccgactttgacagtgagtactgggtgggagcctgcacggggcacctgtggccggagggtgagtgtaacgaggggctgcagccctcagtgctctcccatcccaagggaggccaggaggctgcggtgggtccctcgggtggggctggaaggccaacccggccctggcaccttgggcagcctgactctgtccggggaacagaagccacaggctctacttctcctgtccatgtgggattgaagccgagggtctcgcagaaccagctgatgtgccggggctccatttccccaagacgaggacactgacattgatggggcacagccccggagggaggagaccctggacactcaccccaccaaaggtacctccttgtggaagccgtctgccaagcgctgctagttccccacagccctgggtgagcccagggaagactgggctgcagtgcccccatttggaggtgaaatgggagtggaatgtagttgggatggccagagagtaggagacatcctaagtgtgagatgtggacagggctgaatgctccagggtctcgtaccccagagtgtgagatgcgggcagggctgaacgctctggggtctcgtacccctgagtgtgagattcgggcagagctgaacaggctccagggtctcatacccccatagcctccacctgggatgccctctccaagtctgatttctcctcgaagcccctgccctgtcctccagagtctgagcccttgcttccaccccagcccaacctgggccccagtggtccctgggaagcagctgtttgctcagcagttgggagctgtgctgtaagaagcggttggccagtgggtggggtaaggcagtcacgcagggcctcaggtccctccctgggacagataagggcccctctgggtgcagccaccagcagggttgttggagaactggggagacccagggggctggggttgttccctcaaggtctccctaaaggaggcagggaggacctgggtgctacagcaggggtggggcacctggtgcagacgcctgcatgcagggtggggtgggcagtgccacctggggccacagaaaaacctggagtgggaggtggcccttcccccctcaggaaaggtggtggaggtttccagaggctggcttatggggacctgtggtgaggttttaggcaggtgagcgtagttcaggaacagcctcagccgcactgcaggggcctggcctcaggtcttctgcaggcattgggccttatgcccttttagtccccacctaggctgggtgtctaaagtaggtgaggtcatcactgcaggatccttggggcctgacctgccccctcccacgtgtctctgcctcagtttctctgagcattgaggcagtggctggtgctgtcctgtggccaggcccagaggctgagtgcccagggggtccaggggccttgctggccagagagagtgggtagcccattctaccccgagcctgtgcacgcgcagggctgccaacacctccttccttccccgcttggcccacgcaggacagggggcgtgggggccccagcaactgggacctgcctgaatccgcctccctcctgaacccccctcccgcctgaacccctggccagtcttgtgtcacacgcttacttccttagttttgtctttaaatcagccgttttacattggagtccatttactgggaaaggagaccttgcatccttgcctcccacccgtgggaagaagcccggccgacagggctttgagaccggacccgagtttattcccagagaccctcccgcgggtgggcgagctccgaggtctggagaagaggaggccccggcccgcaccctctagcacctgtgtccccttcgtcccggccacagatgcaggttctcccaagaggcgggtctgtacccgccccgcgcccccagcccagcgggcccggcctccgcccctgccccgcactcccacccccaccctcaggagagcgcggccctgctccccaccccgcgcggtctccccccaccgcctgcgaacccccatgcacgcgcggccccgccccgcgcactcaccaggcccggcagccgcgcggtcttagcggctcacgcgctcgggcccaggggcggggacgtggggacccgggcggccgctcagccgcggccgcgcggtgaatgagcccgttgtgcggccgccgcggccccagcgacaccccgcgcggggtctacaagggctgacgcgcccccgcggcttccgttcccgggctgggcggtggctcgtctgcgtctccggccctgggggtgggctgcgcgctccatctcgccggcccagtcccctccccagcgtcggtctctcaaggcccctcccaatgggggccaggcggagggtgggccctcgggcctgtggactgaccccggggttcctgggcctgggggcggggatccctgtcccgggctcccctcgctgcgaggctggccctgccagatgacactcagaggcgccttgggtgtcaggccagggacatctctgatgctggggctccccccgctagggtcaggggctgccgggctatcgccttggggttctgcagagaaaacctgaagcccagctgggtcttcactttcctccaggtcaccgtgccccgctactccaactccgtgggactttggaatgcaccttctgggcatttaattcttatccaagtgcctcttaagttatacttctttgctaccagtgtgtcctttggatggaggggaggagaggtggtaggggccgggtggggtggaccccagggactcctgctgctcctgctggacacccagcccggggtacaggagcaggtggggaccagcagaggcggggcggagcaggagcccacacccaaaggctgtagactcctgccaaggctctgccttgatcttgtacaccatgggaggaccagaagggaggcgttgaggtgtccagacctttgctgtggagctgggggtgctgtggcatggggagactgacagacggggagctgtatagggccagattccggtccatggtggtaaccccatcccccaccactgcagatgcggcacaaagccagctgccacaggaggtgcactgccccacgggcagctgtgctcacctgcgtggcgtccgcaggaagccctcagaccctggccagcctggtctctgcttctcactccaggctcaaggctggctgctattccattcaccccattccctttccctcaggccagaagcatcactcacaactccagacccttgcacaccaatctcctcactcagttcaccctcagatgtccaactccacatggccaaaaccgagaccagtctcactccaagctcatccacccgcctagctgcccaagctgaaatccacagttgccctgtacgaccccccgaccccccacctcaccccccagctcacctcaaacctcatcagtccctctgctcacagcctgcacagccaccacccagtctgggcaccatacctctctgggcaacccccatggcccccagccagtcttccagctcccaccctgactccagtgagctgccagagggatccttgaaaaatgctctggaagccaaggtgggcggatcacgaggtcaggaaatggaaaccatcctggctaacatggtgaaactccgtctctactaaaaatacaaaaaaattagccgggcgtggtggcgggcgcctgtagtcccagctactcaggaggctgaggcaggagaatggtgtgaacccgggagggggagcttgcagtgagccgagatcgcgccactgcaccccaggctgggcaacagagtgagactctgtctcaaaaaaaaaaaaaagaaaaaagaaaaatgccctggcactgctcagctcagaaccttgaaagggatccttgtttcgctctgggtcagggtcccatcctcaaagcagtcacttccagagccccatggagcctcatatcccatgatatccacccttattctgtctcaggcccaccagctgcctccctgctgcctgattgtcatgtgtgcattcctgttccagagcctttgcactggcgatgccatctgctgcctggatgtcttcctgctggctggtcccgttgcatggtagccttaggtgtctcctcagagaggtccctcgctgaccatcaggctcctcactccctgtcgtatccccttcaccaaagattcccattccctgacgacgcctgtcccctcggaatgcaggcctcgtgggaattcagcccatccgcaagtgcagtggcagggcggcccccttcccccttgacgacgcctgtccccttggaatgcaggcctcgtgggaattcagcccatctgcaagtgcagtggcagggcggcccccttctcccttgaggacgcctgtcccctcgtaatgcaggcctcgtgggaattcagcccatctgcaagtgcagtggcagggcggcccccttctcccttgaggacgcctgtcccctcgtaatgcaggcctcgtgggaattcagcccatctgcaagtgcagtggcagggcggcccccttctcccttgaggacgcctgtcccctcggaatgcaggcctcgtgggaattcagccccatctgcaagtgcagtggcagggcggcccccttctcccttgacgacgcctgtcccctcggaatgcaggcctcgtgggaattcagccccatcggcaagtgcagtggcagggcggcccccttcacccttgacgacgcctgtcccctcggaatgcaggcctcatgggaattcagcccatctgcaagtgcagtggcagggtggcccccttctccctttcctgtgcactcatgttgcctcttggggtgtgggaggggaaatggggcactcctgggcctccaggaggtgcagagaaccagggtgaggtgtccaccaggtcctgcctggctcctgacccctggcccctgctgctcgcgactggcctgcctcgtgccactgagcctcagagccattccgaacccccaccccaagttttccatctcttgatggtgtagggttggggggtctccatgtacagatactctagttcataccaggccttcatagggttattttccaaggggaagggcccctcgggaagccgggatcggagtcctgtgtggcaccttgcaggctcccacatgctccgttgtggccacggttccagcctggagcatggagctgtgtgggcaccctgcttcctgacgctgaccgtccttctgcagggggtccactggacggggcctgagctacaacttcacccacctggacgggtacctggaccttctcagggagaaccagctcctcccaggtgagctgtgggctctgccctcccagcccgcctgcacccccttgccctgcccaccctctccctcacccagcccctctgagtccttggatgtccattcagggctggccttggtgccggagcacaggcctggcagagcatgggtgtggtgtgtggtgggcggtggggcagccctcctgtgttccagggtttgagctgatgggcagcgcctcgggccacttcactgactttgaggacaagcagcaggtgtttgagtggaaggacttggtctccagcctggccaggagatacatcggtgggcgagcgcaggccctggggccctggccggggcgggggtactcctgggcaggttgcacccctatcacgcaggctgctgcctggtcaggagatacattggtgggcaggcgcaggcccttgtggggggatgggggtgacaagggatag

SEQ ID NO: 12471 - DNA, 520 bp, Homo sapiens
tccccgagcacgcgtggccatgcgtcccctgcgcccccgcgccgcgctgctggcgctcctggcctcgctcctggccgcgcccccggtggccccggccgaggccccgcacctggtgcatgtggacgcggcccgcgcgctgtggcccctgcggcgcttctggaggagcacaggcttctgggggtccactggacggggcctgagctacaacttcacccacctggacgggtacctggaccttctcagggagaaccagctcctcccagggtttgagctgatgggcagcgcctcgggccacttcactgactttgaggacaagcagcaggtgtttgagtggaaggacttggtctccagcctggccaggagatacatcggtgggcgagcgcaggccctggggccctggccggggcgggggtactcctgggcaggttgcacccctatcacgcaggctgctgcctggtcaggagatacattggtgggcaggcgcaggcccttgtggggggatgggggtgacaagggatag

SEQ ID NO: 12472 - DNA, 1709 bp, Homo sapiens
cggacccactggctgctggagcttgtcaccaccaggtgggcggcgggcagggtctgggcgtcccagagccccttacagaggcacagatgggaggggagggctgggggctgctcggaagaccccttgttcccccacctcccgccgaagcaccctgttggggagagcgtgtccttgctggctgtgctggggtgagggctgtgtgctggagggagcccctgcatggggcacggtgggcttcctgcaggtctccctgcaggctcagggttggctgcgccgcacctggctcctggtgcacccgtgagcatccctgtgtgtgtctgctggccaggctgggtagggccactgcacctgagggctgagctgaggtctcatcggtcacagcaccctgggccctgacgctggtgcaggtggccaccctgtgagggggaggcacgaggtgtgaggggcacttgggtgtgtggggccttctggaaacacagagaccctcgtgcacttggccagagccgctggctcctaccagcagggtgggcaccgggcaggcctgggcatagggagtcctcttggcaccttggaggctgcatgatggcgggggacccttgttcaaataagatgtcaaccctgagcgtcaggtcaggcccatccctcctgagctgagggacggtgcattggggcccagccagcactgtgggccagcctgtctcggaggcagaggttcttgatttctgagtgtttgggtcctgcgtgtgatcagagggcctcctttcccagttggggttccccggtttccccagggcagctgtggcacaagagtgcagctcttgggtggctcctccctgggaagggtctcagcagtggcttgcagacgtctgctgtgggtccccaggagggagcagaggctgctgggcaggcctggccctgctacagatgggcatcggtggcctccagctccctgtggcgggctcgtgctgtctgcacggcatcgtgcacactgaggaacagctgctcctcctcagccgtgtccccggggccctccccgaggaagcctcctctgctcagaatgtctctcacaggcgggctgcagcaggctagcagcaggctgatgcccagggccccgtagtctcggcgcaggtcctgcagcgtgctcacaccggctgcgtctaggaacagcagcggggcgcagtcgatgaccactgtgtggaagccggccgctgcgggcaccagcgcagccctggtgctaaccgggcccaggtcctcgccctgggcagggcctccctcaccgacccccgtctctgagcccccctccttcctcctggcagccatgcaccctgcgtccagccccgtgaggctgtagagtgactgcaggaagaagtccttgttggcatagtacagcggccccccaaagcggaacacccgcacgccgggctcagggacgaggccctcgaactctgtggcatcctcgtagaaggccgtgtccccgatgcgggccagcagggcggtgcgtgggcgttgggtgcggccggccaggctgagcagcgagaggatgacgccagccagcagcccggcctctgtgctgaccagcatacaggtggccgcggtgcctgcccagaccagcgcgtcagccgggctcatccgccacagccgcgggaggtcccacaccttgcgcagggccccccgcaggctgaccacgatgacgcaggccagcacgcttc

SEQ ID NO: 12473 - DNA, 428 bp, Homo sapiens
cggacccactggctgctggagcttgtcaccaccagccatgcaccctgcgtccagccccgtgaggctgtagagtgactgcaggaagaagtccttgttggcatagtacagcggccccccaaagcggaacacccgcacgccgggctcagggacgaggccctcgaactctgtggcatcctcgtagaaggccgtgtccccgatgcgggccagcagggcggtgcgtgggcgttgggtgcggccggccaggctgagcagcgagaggatgacgccagccagcagcccggcctctgtgctgaccagcatacaggtggccgcggtgcctgcccagaccagcgcgtcagccgggctcatccgccacagccgcgggaggtcccacaccttgcgcagggccccccgcaggctgaccacgatgacgcaggccagcacgcttc

SEQ ID NO: 12474 - DNA, 9954 bp, Homo sapiens
cgcgggccccagccccctgcccggtatggatggacgctgggccctgctggatccagaatccatcgtgaggtgagatgggattacgacaccaagcccatgccatggggtgtgctgaggccagcagtgctgaggggcggcgtggcggcaccctgtccaggctcagctccggcctattggctctgcggttcctggctgaaaaccaccctgtagcctcctgaagctcacctccccaacggggcaggaacaggctgggctgccaccacgcacatgtgcctaccgtcagaatgtcacagtcactggacacaggtgcaggcaagcctgagtccagctgctccgtgtccacctccctggctccccaggttggcaaacggtcctgctgtccaccccatgcccacaccagagccctccctcccccatccaaaccatcgcctgctctcctggagacacctccacccacccctctgtcacctgccctgtgggtcctggggctggcggaagtctcaggaagaggcctcctatgtccctgccaagctttgtgggtactgggaccccaagtctgctgggggagcagcactcagacactagcctagcccatccgcctggacttgggacagaattctgagaatatgcctggacgggggccccatcagggccagctgggaggggaggagggtgactggcgtctgtctcccctgcccagacagttctgggacgtgaggcgccctttttcccaggctgcaccagctcactgtggaacggccatgacacactgtcccgaggcagcaccgagagggcccagcccgctgcacacagtcaccctgggccggcagagccggaagggcacctgacctttcccttgatctcggaaaacaccgtggcgttagggaggcggtgcttagaggcctgactggtcccacgtgaggcctcgggtctgtcctgtttgcagactccaatgtactttcactttaaacattcttctcagcgacgttaggcaaagactttgctcccaggacaccaggtgcccaggacaccctggagcctgggctgagcctgctgtttgcacgctggcccagggtgtgcgagctccagtctcctggcgggtgtgttggggcagtgagcccagcctggtaggttgacacatgcaggctgggcacagcacccctggggcacagagcgggggtcctggccctcaggcaacattgcaagagttgtgtccccttccctggaagaccccaccacactgggtccctggatgccctgaagcccaccccaagcccctggggtccaggtgtgtggaatggggacagtagggccacctgccttgagcctgagggtgcccctaagaaaccacgagtccagggcatttctggcctcggctcccacgcccccctctgctgcagctgagatctgggcccaggatggttcttacctgagggagtcctcacaggcgcggagggccctgggatgacgaggggctggcaagaccaccgaggaccgcagggccctctggctcccgcgagcagcggggagagtgggggtggtggcgccaacctgcaggcagtggtctgtgccctggactctgtagttcaattatttacctacagattgctgagtcatgggtttctccagccatgttacctgatcggctgatccgggagttgaactgtaatcaggggcttgtaggagttagagctgtgtgggcctctgaggagctcccagcctcccaggagccgctgcagctgtggctctgcggccctgccgggggggcttagggaccagcgggaggcgggggctcaggggctgagcacaggtaaaccttcagctctggggtctggggtcgagtgcagcagccttcaaacccaggcggggctgagggaggcttggtctccgtgtccagtcgccggacaccctcctggtcctgcaaggagccagcctggtccaagctggagcagggcagaggctgacagccggctcagcccaaggctgccggtgcgtgcatatgcgtgtgtgctcgcgtaagccctgtgtgtggtgctcaccgcccagggcgaggactgccggggtcaaggtgccgtgactggccaggagtcctggtctgactggacccagcaccgacccacagcgcctggtcaccctcacggctcctctgccctcccctctaccacagaccaggaccggcagtgcctgcctcatagggctggggtgaagataaatgatttttttaagtgaactaaattaggcccacacgtgaaaataagggtaagctgctttttaaaaggaattattagccaggcacgatggttcactcctgtaattccaacactttgggaggcctagacaggaggatcgcttaaggccagcagttcaagaccagcctggtcaacatagtgagacgccccccaccttttctttttttttttttgaggcggagtcttgctctgtcacccaggccggaatgcagtggtgtgatctcggctcactggaagctctgcctcctgggttcacgccattctcctgcctcagcctcctgagtagctgggactacaggcgcccgccaccgcgcccggctaatttttttttttttgagacggagtttcgctctgttgcccaggctggagtacagtggcatgatctcggctcactgcaagctctgtctcccgggttcaagtgattctcctgcctcagcctcccgagtagctgggactacaggcacccgccaccacgcccggctaattttttgtatttttagtagagacggggtttcaccatgttagccaggatggtcttgatctcctgacctcgtgatccacccacctcggcctcccaaagtgctgggattacaggcttgagccactgcacccggccgccccctgccccccaacctttaaaaaattaaaagtaaaaaattagctgggtgtggtggtgtgtgcctgtatcccagctactcaagcggctcaggtgggagcatggcttgagcccaggagtttgaggctgccatgaggtatgattaggccactgcaccctatcctaggccacagagcaagagcccgtctcaaaaacaaacgctgtcattggcccagcactttgggaagctaaggtaggaggattgcttgagccctggaggtccaggctgcagtgaggtatgtttgtagcgcttcactccagcctacaagtcttttttttttttttttgagatggagtctcgctctgttgcccaggctggagtgcagtggcacaatctcggctcactgcagcctctgcctcccgggttcaagcgattctcctgcctcagccgcctgagtagttgggactacaggcgtgtgccaccacgcccggctaatttttgtatttttagtagagacagggtttcactatgttggtcaggctagtcttgaactcctgaccttgtgatccacccgcctcggcctcccaaagtgctgggattacaggcgtgagccaccgtgcccggccagttctgtctcaaaaaaaaaaaaaaaattccttgggagcctcaggtccccccgactttgacagtgagtactgggtgggagcctgcacggggcacctgtggccggagggtgagtgtaacgaggggctgcagccctcagtgctctcccatcccaagggaggccaggaggctgcggtgggtccctcgggtggggctggaaggccaacccggccctggcaccttgggcagcctgactctgtccggggaacagaagccacaggctctacttctcctgtccatgtgggattgaagccgagggtctcgcagaaccagctgatgtgccggggctccatttccccaagacgaggacactgacattgatggggcacagccccggagggaggagaccctggacactcaccccaccaaaggtacctccttgtggaagccgtctgccaagcgctgctagttccccacagccctgggtgagcccagggaagactgggctgcagtgcccccatttggaggtgaaatgggagtggaatgtagttgggatggccagagagtaggagacatcctaagtgtgagatgtggacagggctgaatgctccagggtctcgtaccccagagtgtgagatgcgggcagggctgaacgctctggggtctcgtacccctgagtgtgagattcgggcagagctgaacaggctccagggtctcatacccccatagcctccacctgggatgccctctccaagtctgatttctcctcgaagcccctgccctgtcctccagagtctgagcccttgcttccaccccagcccaacctgggccccagtggtccctgggaagcagctgtttgctcagcagttgggagctgtgctgtaagaagcggttggccagtgggtggggtaaggcagtcacgcagggcctcaggtccctccctgggacagataagggcccctctgggtgcagccaccagcagggttgttggagaactggggagacccagggggctggggttgttccctcaaggtctccctaaaggaggcagggaggacctgggtgctacagcaggggtggggcacctggtgcagacgcctgcatgcagggtggggtgggcagtgccacctggggccacagaaaaacctggagtgggaggtggcccttcccccctcaggaaaggtggtggaggtttccagaggctggcttatggggacctgtggtgaggttttaggcaggtgagcgtagttcaggaacagcctcagccgcactgcaggggcctggcctcaggtcttctgcaggcattgggccttatgcccttttagtccccacctaggctgggtgtctaaagtaggtgaggtcatcactgcaggatccttggggcctgacctgccccctcccacgtgtctctgcctcagtttctctgagcattgaggcagtggctggtgctgtcctgtggccaggcccagaggctgagtgcccagggggtccaggggccttgctggccagagagagtgggtagcccattctaccccgagcctgtgcacgcgcagggctgccaacacctccttccttccccgcttggcccacgcaggacagggggcgtgggggccccagcaactgggacctgcctgaatccgcctccctcctgaacccccctcccgcctgaacccctggccagtcttgtgtcacacgcttacttccttagttttgtctttaaatcagccgttttacattggagtccatttactgggaaaggagaccttgcatccttgcctcccacccgtgggaagaagcccggccgacagggctttgagaccggacccgagtttattcccagagaccctcccgcgggtgggcgagctccgaggtctggagaagaggaggccccggcccgcaccctctagcacctgtgtccccttcgtcccggccacagatgcaggttctcccaagaggcgggtctgtacccgccccgcgcccccagcccagcgggcccggcctccgcccctgccccgcactcccacccccaccctcaggagagcgcggccctgctccccaccccgcgcggtctccccccaccgcctgcgaacccccatgcacgcgcggccccgccccgcgcactcaccaggcccggcagccgcgcggtcttagcggctcacgcgctcgggcccaggggcggggacgtggggacccgggcggccgctcagccgcggccgcgcggtgaatgagcccgttgtgcggccgccgcggccccagcgacaccccgcgcggggtctacaagggctgacgcgcccccgcggcttccgttcccgggctgggcggtggctcgtctgcgtctccggccctgggggtgggctgcgcgctccatctcgccggcccagtcccctccccagcgtcggtctctcaaggcccctcccaatgggggccaggcggagggtgggccctcgggcctgtggactgaccccggggttcctgggcctgggggcggggatccctgtcccgggctcccctcgctgcgaggctggccctgccagatgacactcagaggcgccttgggtgtcaggccagggacatctctgatgctggggctccccccgctagggtcaggggctgccgggctatcgccttggggttctgcagagaaaacctgaagcccagctgggtcttcactttcctccaggtcaccgtgccccgctactccaactccgtgggactttggaatgcaccttctgggcatttaattcttatccaagtgcctcttaagttatacttctttgctaccagtgtgtcctttggatggaggggaggagaggtggtaggggccgggtggggtggaccccagggactcctgctgctcctgctggacacccagcccggggtacaggagcaggtggggaccagcagaggcggggcggagcaggagcccacacccaaaggctgtagactcctgccaaggctctgccttgatcttgtacaccatgggaggaccagaagggaggcgttgaggtgtccagacctttgctgtggagctgggggtgctgtggcatggggagactgacagacggggagctgtatagggccagattccggtccatggtggtaaccccatcccccaccactgcagatgcggcacaaagccagctgccacaggaggtgcactgccccacgggcagctgtgctcacctgcgtggcgtccgcaggaagccctcagaccctggccagcctggtctctgcttctcactccaggctcaaggctggctgctattccattcaccccattccctttccctcaggccagaagcatcactcacaactccagacccttgcacaccaatctcctcactcagttcaccctcagatgtccaactccacatggccaaaaccgagaccagtctcactccaagctcatccacccgcctagctgcccaagctgaaatccacagttgccctgtacgaccccccgaccccccacctcaccccccagctcacctcaaacctcatcagtccctctgctcacagcctgcacagccaccacccagtctgggcaccatacctctctgggcaacccccatggcccccagccagtcttccagctcccaccctgactccagtgagctgccagagggatccttgaaaaatgctctggaagccaaggtgggcggatcacgaggtcaggaaatggaaaccatcctggctaacatggtgaaactccgtctctactaaaaatacaaaaaaattagccgggcgtggtggcgggcgcctgtagtcccagctactcaggaggctgaggcaggagaatggtgtgaacccgggagggggagcttgcagtgagccgagatcgcgccactgcaccccaggctgggcaacagagtgagactctgtctcaaaaaaaaaaaaaagaaaaaagaaaaatgccctggcactgctcagctcagaaccttgaaagggatccttgtttcgctctgggtcagggtcccatcctcaaagcagtcacttccagagccccatggagcctcatatcccatgatatccacccttattctgtctcaggcccaccagctgcctccctgctgcctgattgtcatgtgtgcattcctgttccagagcctttgcactggcgatgccatctgctgcctggatgtcttcctgctggctggtcccgttgcatggtagccttaggtgtctcctcagagaggtccctcgctgaccatcaggctcctcactccctgtcgtatccccttcaccaaagattcccattccctgacgacgcctgtcccctcggaatgcaggcctcgtgggaattcagcccatccgcaagtgcagtggcagggcggcccccttcccccttgacgacgcctgtccccttggaatgcaggcctcgtgggaattcagcccatctgcaagtgcagtggcagggcggcccccttctcccttgaggacgcctgtcccctcgtaatgcaggcctcgtgggaattcagcccatctgcaagtgcagtggcagggcggcccccttctcccttgaggacgcctgtcccctcgtaatgcaggcctcgtgggaattcagcccatctgcaagtgcagtggcagggcggcccccttctcccttgaggacgcctgtcccctcggaatgcaggcctcgtgggaattcagccccatctgcaagtgcagtggcagggcggcccccttctcccttgacgacgcctgtcccctcggaatgcaggcctcgtgggaattcagccccatcggcaagtgcagtggcagggcggcccccttcacccttgacgacgcctgtcccctcggaatgcaggcctcatgggaattcagcccatctgcaagtgcagtggcagggtggcccccttctccctttcctgtgcactcatgttgcctcttggggtgtgggaggggaaatggggcactcctgggcctccaggaggtgcagagaaccagggtgaggtgtccaccaggtcctgcctggctcctgacccctggcccctgctgctcgcgactggcctgcctcgtgccactgagcctcagagccattccgaacccccaccccaagttttccatctcttgatggtgtagggttggggggtctccatgtacagatactctagttcataccaggccttcatagggttattttccaaggggaagggcccctcgggaagccgggatcggagtcctgtgtggcaccttgcaggctcccacatgctccgttgtggccacggttccagcctggagcatggagctgtgtgggcaccctgcttcctgacgctgaccgtccttctgcagggggtccactggacggggcctgagctacaacttcacccacctggacgggtacctggaccttctcagggagaaccagctcctcccaggtgagctgtgggctctgccctcccagcccgcctgcacccccttgccctgcccaccctctccctcacccagcccctctgagtccttggatgtccattcagggctggccttggtgccggagcacaggcctggcagagcatgggtgtggtgtgtggtgggcggtggggcagccctcctgtgttccagggtttgagctgatgggcagcgcctcgggccacttcactgactttgaggacaagcagcaggtgtttgagtggaaggacttggtctccagcctggccaggagatacatcggtgggcgagcgcaggccctggggccctggccggggcgggggtactcctgggcaggttgcacccctatcacgcaggctgctgcctggtcaggagatacattggtgggcaggcgcaggcccttgtggggggatgggggtgacaagggataggttggtggtcggcgcaggccctggggccccaggctggggggtactcctgggcttggtgggtgggcgaaggccctgggcccctggggtggggggtactcctgggcaggctgcacccctatcacccaggccgcacccctatcacccaggccgccgcccaggtcttggacccccttgagccagcgcttcctgatgtggggcgggaggctggcctgcatggagatggggttcatcttgagtcagacgcccttcatcaccttgcaccctccctccgtgggagtcactgaggcgagattcacctgtgctggggggacagcaaggctcctctgcaggtaggtacggactggcgcatgtttccaagtggaacttcgagacgtggaatgagccagaccaccacgactttgacaacgtctccatgaccatgcaaggtgtgcaccgcttcctggggtcctgcccggctgaaagggggcagaggaaggcaggagcagaggctaagccgctcatccccagggcaggtgtagacgcagtgctcccccggcccaggcttcctgaactactacgatgcctgctcggagggtctgcgcgccgccagccccgccctgcggctgggaggccccggcgactccttccacaccccaccgcgatccccgctgagctggggcctcctgcgccactgccacgacggtacca

SEQ ID NO: 12475 - DNA, 796 bp, Homo sapiens
cgcgggccccagccccctgcccggtatggatggacgctgggccctgctggatccagaatccatcgtgaggtgagatgggattacgacaccaagcccatgccatggggtgtgctgaggccagcagtgctgaggggcggcgtggcggcaccctgtccaggctcagctccggcctattggctctgcggttcctggctgaaaaccaccctgtagcctcctgaagctcacctccccaacggggcaggaacaggctgggctgccaccacgcacatgtgcctaccgtcagaatgtcacagtcactggacacaggtgcaggcaagcctgagtccagctgctccgtgtccacctccctggctccccagggggtccactggacggggcctgagctacaacttcacccacctggacgggtacctggaccttctcagggagaaccagctcctcccagggtttgagctgatgggcagcgcctcgggccacttcactgactttgaggacaagcagcaggtgtttgagtggaaggacttggtctccagcctggccaggagatacatcggtaggtacggactggcgcatgtttccaagtggaacttcgagacgtggaatgagccagaccaccacgactttgacaacgtctccatgaccatgcaaggcttcctgaactactacgatgcctgctcggagggtctgcgcgccgccagccccgccctgcggctgggaggccccggcgactccttccacaccccaccgcgatccccgctgagctggggcctcctgcgccactgccacgacggtacca

SEQ ID NO: 12476 - DNA, 10245 bp, Homo sapiens
ctcgcccacccagggccggggattggtgctgggccttctcctggcagcgcgggccccagccccctgcccggtatggatggacgctgggccctgctggatccagaatccatcgtgaggtgagatgggattacgacaccaagcccatgccatggggtgtgctgaggccagcagtgctgaggggcggcgtggcggcaccctgtccaggctcagctccggcctattggctctgcggttcctggctgaaaaccaccctgtagcctcctgaagctcacctccccaacggggcaggaacaggctgggctgccaccacgcacatgtgcctaccgtcagaatgtcacagtcactggacacaggtgcaggcaagcctgagtccagctgctccgtgtccacctccctggctccccaggttggcaaacggtcctgctgtccaccccatgcccacaccagagccctccctcccccatccaaaccatcgcctgctctcctggagacacctccacccacccctctgtcacctgccctgtgggtcctggggctggcggaagtctcaggaagaggcctcctatgtccctgccaagctttgtgggtactgggaccccaagtctgctgggggagcagcactcagacactagcctagcccatccgcctggacttgggacagaattctgagaatatgcctggacgggggccccatcagggccagctgggaggggaggagggtgactggcgtctgtctcccctgcccagacagttctgggacgtgaggcgccctttttcccaggctgcaccagctcactgtggaacggccatgacacactgtcccgaggcagcaccgagagggcccagcccgctgcacacagtcaccctgggccggcagagccggaagggcacctgacctttcccttgatctcggaaaacaccgtggcgttagggaggcggtgcttagaggcctgactggtcccacgtgaggcctcgggtctgtcctgtttgcagactccaatgtactttcactttaaacattcttctcagcgacgttaggcaaagactttgctcccaggacaccaggtgcccaggacaccctggagcctgggctgagcctgctgtttgcacgctggcccagggtgtgcgagctccagtctcctggcgggtgtgttggggcagtgagcccagcctggtaggttgacacatgcaggctgggcacagcacccctggggcacagagcgggggtcctggccctcaggcaacattgcaagagttgtgtccccttccctggaagaccccaccacactgggtccctggatgccctgaagcccaccccaagcccctggggtccaggtgtgtggaatggggacagtagggccacctgccttgagcctgagggtgcccctaagaaaccacgagtccagggcatttctggcctcggctcccacgcccccctctgctgcagctgagatctgggcccaggatggttcttacctgagggagtcctcacaggcgcggagggccctgggatgacgaggggctggcaagaccaccgaggaccgcagggccctctggctcccgcgagcagcggggagagtgggggtggtggcgccaacctgcaggcagtggtctgtgccctggactctgtagttcaattatttacctacagattgctgagtcatgggtttctccagccatgttacctgatcggctgatccgggagttgaactgtaatcaggggcttgtaggagttagagctgtgtgggcctctgaggagctcccagcctcccaggagccgctgcagctgtggctctgcggccctgccgggggggcttagggaccagcgggaggcgggggctcaggggctgagcacaggtaaaccttcagctctggggtctggggtcgagtgcagcagccttcaaacccaggcggggctgagggaggcttggtctccgtgtccagtcgccggacaccctcctggtcctgcaaggagccagcctggtccaagctggagcagggcagaggctgacagccggctcagcccaaggctgccggtgcgtgcatatgcgtgtgtgctcgcgtaagccctgtgtgtggtgctcaccgcccagggcgaggactgccggggtcaaggtgccgtgactggccaggagtcctggtctgactggacccagcaccgacccacagcgcctggtcaccctcacggctcctctgccctcccctctaccacagaccaggaccggcagtgcctgcctcatagggctggggtgaagataaatgatttttttaagtgaactaaattaggcccacacgtgaaaataagggtaagctgctttttaaaaggaattattagccaggcacgatggttcactcctgtaattccaacactttgggaggcctagacaggaggatcgcttaaggccagcagttcaagaccagcctggtcaacatagtgagacgccccccaccttttctttttttttttttgaggcggagtcttgctctgtcacccaggccggaatgcagtggtgtgatctcggctcactggaagctctgcctcctgggttcacgccattctcctgcctcagcctcctgagtagctgggactacaggcgcccgccaccgcgcccggctaatttttttttttttgagacggagtttcgctctgttgcccaggctggagtacagtggcatgatctcggctcactgcaagctctgtctcccgggttcaagtgattctcctgcctcagcctcccgagtagctgggactacaggcacccgccaccacgcccggctaattttttgtatttttagtagagacggggtttcaccatgttagccaggatggtcttgatctcctgacctcgtgatccacccacctcggcctcccaaagtgctgggattacaggcttgagccactgcacccggccgccccctgccccccaacctttaaaaaattaaaagtaaaaaattagctgggtgtggtggtgtgtgcctgtatcccagctactcaagcggctcaggtgggagcatggcttgagcccaggagtttgaggctgccatgaggtatgattaggccactgcaccctatcctaggccacagagcaagagcccgtctcaaaaacaaacgctgtcattggcccagcactttgggaagctaaggtaggaggattgcttgagccctggaggtccaggctgcagtgaggtatgtttgtagcgcttcactccagcctacaagtcttttttttttttttttgagatggagtctcgctctgttgcccaggctggagtgcagtggcacaatctcggctcactgcagcctctgcctcccgggttcaagcgattctcctgcctcagccgcctgagtagttgggactacaggcgtgtgccaccacgcccggctaatttttgtatttttagtagagacagggtttcactatgttggtcaggctagtcttgaactcctgaccttgtgatccacccgcctcggcctcccaaagtgctgggattacaggcgtgagccaccgtgcccggccagttctgtctcaaaaaaaaaaaaaaaattccttgggagcctcaggtccccccgactttgacagtgagtactgggtgggagcctgcacggggcacctgtggccggagggtgagtgtaacgaggggctgcagccctcagtgctctcccatcccaagggaggccaggaggctgcggtgggtccctcgggtggggctggaaggccaacccggccctggcaccttgggcagcctgactctgtccggggaacagaagccacaggctctacttctcctgtccatgtgggattgaagccgagggtctcgcagaaccagctgatgtgccggggctccatttccccaagacgaggacactgacattgatggggcacagccccggagggaggagaccctggacactcaccccaccaaaggtacctccttgtggaagccgtctgccaagcgctgctagttccccacagccctgggtgagcccagggaagactgggctgcagtgcccccatttggaggtgaaatgggagtggaatgtagttgggatggccagagagtaggagacatcctaagtgtgagatgtggacagggctgaatgctccagggtctcgtaccccagagtgtgagatgcgggcagggctgaacgctctggggtctcgtacccctgagtgtgagattcgggcagagctgaacaggctccagggtctcatacccccatagcctccacctgggatgccctctccaagtctgatttctcctcgaagcccctgccctgtcctccagagtctgagcccttgcttccaccccagcccaacctgggccccagtggtccctgggaagcagctgtttgctcagcagttgggagctgtgctgtaagaagcggttggccagtgggtggggtaaggcagtcacgcagggcctcaggtccctccctgggacagataagggcccctctgggtgcagccaccagcagggttgttggagaactggggagacccagggggctggggttgttccctcaaggtctccctaaaggaggcagggaggacctgggtgctacagcaggggtggggcacctggtgcagacgcctgcatgcagggtggggtgggcagtgccacctggggccacagaaaaacctggagtgggaggtggcccttcccccctcaggaaaggtggtggaggtttccagaggctggcttatggggacctgtggtgaggttttaggcaggtgagcgtagttcaggaacagcctcagccgcactgcaggggcctggcctcaggtcttctgcaggcattgggccttatgcccttttagtccccacctaggctgggtgtctaaagtaggtgaggtcatcactgcaggatccttggggcctgacctgccccctcccacgtgtctctgcctcagtttctctgagcattgaggcagtggctggtgctgtcctgtggccaggcccagaggctgagtgcccagggggtccaggggccttgctggccagagagagtgggtagcccattctaccccgagcctgtgcacgcgcagggctgccaacacctccttccttccccgcttggcccacgcaggacagggggcgtgggggccccagcaactgggacctgcctgaatccgcctccctcctgaacccccctcccgcctgaacccctggccagtcttgtgtcacacgcttacttccttagttttgtctttaaatcagccgttttacattggagtccatttactgggaaaggagaccttgcatccttgcctcccacccgtgggaagaagcccggccgacagggctttgagaccggacccgagtttattcccagagaccctcccgcgggtgggcgagctccgaggtctggagaagaggaggccccggcccgcaccctctagcacctgtgtccccttcgtcccggccacagatgcaggttctcccaagaggcgggtctgtacccgccccgcgcccccagcccagcgggcccggcctccgcccctgccccgcactcccacccccaccctcaggagagcgcggccctgctccccaccccgcgcggtctccccccaccgcctgcgaacccccatgcacgcgcggccccgccccgcgcactcaccaggcccggcagccgcgcggtcttagcggctcacgcgctcgggcccaggggcggggacgtggggacccgggcggccgctcagccgcggccgcgcggtgaatgagcccgttgtgcggccgccgcggccccagcgacaccccgcgcggggtctacaagggctgacgcgcccccgcggcttccgttcccgggctgggcggtggctcgtctgcgtctccggccctgggggtgggctgcgcgctccatctcgccggcccagtcccctccccagcgtcggtctctcaaggcccctcccaatgggggccaggcggagggtgggccctcgggcctgtggactgaccccggggttcctgggcctgggggcggggatccctgtcccgggctcccctcgctgcgaggctggccctgccagatgacactcagaggcgccttgggtgtcaggccagggacatctctgatgctggggctccccccgctagggtcaggggctgccgggctatcgccttggggttctgcagagaaaacctgaagcccagctgggtcttcactttcctccaggtcaccgtgccccgctactccaactccgtgggactttggaatgcaccttctgggcatttaattcttatccaagtgcctcttaagttatacttctttgctaccagtgtgtcctttggatggaggggaggagaggtggtaggggccgggtggggtggaccccagggactcctgctgctcctgctggacacccagcccggggtacaggagcaggtggggaccagcagaggcggggcggagcaggagcccacacccaaaggctgtagactcctgccaaggctctgccttgatcttgtacaccatgggaggaccagaagggaggcgttgaggtgtccagacctttgctgtggagctgggggtgctgtggcatggggagactgacagacggggagctgtatagggccagattccggtccatggtggtaaccccatcccccaccactgcagatgcggcacaaagccagctgccacaggaggtgcactgccccacgggcagctgtgctcacctgcgtggcgtccgcaggaagccctcagaccctggccagcctggtctctgcttctcactccaggctcaaggctggctgctattccattcaccccattccctttccctcaggccagaagcatcactcacaactccagacccttgcacaccaatctcctcactcagttcaccctcagatgtccaactccacatggccaaaaccgagaccagtctcactccaagctcatccacccgcctagctgcccaagctgaaatccacagttgccctgtacgaccccccgaccccccacctcaccccccagctcacctcaaacctcatcagtccctctgctcacagcctgcacagccaccacccagtctgggcaccatacctctctgggcaacccccatggcccccagccagtcttccagctcccaccctgactccagtgagctgccagagggatccttgaaaaatgctctggaagccaaggtgggcggatcacgaggtcaggaaatggaaaccatcctggctaacatggtgaaactccgtctctactaaaaatacaaaaaaattagccgggcgtggtggcgggcgcctgtagtcccagctactcaggaggctgaggcaggagaatggtgtgaacccgggagggggagcttgcagtgagccgagatcgcgccactgcaccccaggctgggcaacagagtgagactctgtctcaaaaaaaaaaaaaagaaaaaagaaaaatgccctggcactgctcagctcagaaccttgaaagggatccttgtttcgctctgggtcagggtcccatcctcaaagcagtcacttccagagccccatggagcctcatatcccatgatatccacccttattctgtctcaggcccaccagctgcctccctgctgcctgattgtcatgtgtgcattcctgttccagagcctttgcactggcgatgccatctgctgcctggatgtcttcctgctggctggtcccgttgcatggtagccttaggtgtctcctcagagaggtccctcgctgaccatcaggctcctcactccctgtcgtatccccttcaccaaagattcccattccctgacgacgcctgtcccctcggaatgcaggcctcgtgggaattcagcccatccgcaagtgcagtggcagggcggcccccttcccccttgacgacgcctgtccccttggaatgcaggcctcgtgggaattcagcccatctgcaagtgcagtggcagggcggcccccttctcccttgaggacgcctgtcccctcgtaatgcaggcctcgtgggaattcagcccatctgcaagtgcagtggcagggcggcccccttctcccttgaggacgcctgtcccctcgtaatgcaggcctcgtgggaattcagcccatctgcaagtgcagtggcagggcggcccccttctcccttgaggacgcctgtcccctcggaatgcaggcctcgtgggaattcagccccatctgcaagtgcagtggcagggcggcccccttctcccttgacgacgcctgtcccctcggaatgcaggcctcgtgggaattcagccccatcggcaagtgcagtggcagggcggcccccttcacccttgacgacgcctgtcccctcggaatgcaggcctcatgggaattcagcccatctgcaagtgcagtggcagggtggcccccttctccctttcctgtgcactcatgttgcctcttggggtgtgggaggggaaatggggcactcctgggcctccaggaggtgcagagaaccagggtgaggtgtccaccaggtcctgcctggctcctgacccctggcccctgctgctcgcgactggcctgcctcgtgccactgagcctcagagccattccgaacccccaccccaagttttccatctcttgatggtgtagggttggggggtctccatgtacagatactctagttcataccaggccttcatagggttattttccaaggggaagggcccctcgggaagccgggatcggagtcctgtgtggcaccttgcaggctcccacatgctccgttgtggccacggttccagcctggagcatggagctgtgtgggcaccctgcttcctgacgctgaccgtccttctgcagggggtccactggacggggcctgagctacaacttcacccacctggacgggtacctggaccttctcagggagaaccagctcctcccaggtgagctgtgggctctgccctcccagcccgcctgcacccccttgccctgcccaccctctccctcacccagcccctctgagtccttggatgtccattcagggctggccttggtgccggagcacaggcctggcagagcatgggtgtggtgtgtggtgggcggtggggcagccctcctgtgttccagggtttgagctgatgggcagcgcctcgggccacttcactgactttgaggacaagcagcaggtgtttgagtggaaggacttggtctccagcctggccaggagatacatcggtgggcgagcgcaggccctggggccctggccggggcgggggtactcctgggcaggttgcacccctatcacgcaggctgctgcctggtcaggagatacattggtgggcaggcgcaggcccttgtggggggatgggggtgacaagggataggttggtggtcggcgcaggccctggggccccaggctggggggtactcctgggcttggtgggtgggcgaaggccctgggcccctggggtggggggtactcctgggcaggctgcacccctatcacccaggccgcacccctatcacccaggccgccgcccaggtcttggacccccttgagccagcgcttcctgatgtggggcgggaggctggcctgcatggagatggggttcatcttgagtcagacgcccttcatcaccttgcaccctccctccgtgggagtcactgaggcgagattcacctgtgctggggggacagcaaggctcctctgcaggtaggtacggactggcgcatgtttccaagtggaacttcgagacgtggaatgagccagaccaccacgactttgacaacgtctccatgaccatgcaaggtgtgcaccgcttcctggggtcctgcccggctgaaagggggcagaggaaggcaggagcagaggctaagccgctcatccccagggcaggtgtagacgcagtgctcccccggcccaggcttcctgaactactacgatgcctgctcggagggtctgcgcgccgccagccccgccctgcggctgggaggccccggcgactccttccacaccccaccgcgatccccgctgagctggggcctcctgcgccactgccacgacggtaccaacttcttcactggggaggcgggcgtgcggctggactacatctccctccacaggaaggtgcgccctgcccctccgtccgccccggtgttctgcgccctcagccgctgtgccccgggccgcgctgaccctggtggtgctgaggcggccccgcccgcagggtgcgcgcagctccatctccatcctggagcaggagaaggtcgtcgcgcagcagatccggcagctcttccccaagttcgcggacaccc

SEQ ID NO: 12477 - DNA, 697 bp, Homo sapiens
ctcgcccacccagggccggggattggtgctgggccttctcctggcagcgcgggccccagccccctgcccggtatggatggacgctgggccctgctggatccagaatccatcgtgagggggtccactggacggggcctgagctacaacttcacccacctggacgggtacctggaccttctcagggagaaccagctcctcccagggtttgagctgatgggcagcgcctcgggccacttcactgactttgaggacaagcagcaggtgtttgagtggaaggacttggtctccagcctggccaggagatacatcggtaggtacggactggcgcatgtttccaagtggaacttcgagacgtggaatgagccagaccaccacgactttgacaacgtctccatgaccatgcaaggcttcctgaactactacgatgcctgctcggagggtctgcgcgccgccagccccgccctgcggctgggaggccccggcgactccttccacaccccaccgcgatccccgctgagctggggcctcctgcgccactgccacgacggtaccaacttcttcactggggaggcgggcgtgcggctggactacatctccctccacaggaagggtgcgcgcagctccatctccatcctggagcaggagaaggtcgtcgcgcagcagatccggcagctcttccccaagttcgcggacaccc

SEQ ID NO: 12478 - DNA, 17521 bp, Homo sapiens
agtgcagcccgaagccccgcagtccccgagcacgcgtggccatgcgtcccctgcgcccccgcgccgcgctgctggcgctcctggcctcgctcctggccgcgcccccggtggccccggccgaggccccgcacctggtgcatgtggacgcggcccgcgcgctgtggcccctgcggcgcttctggaggagcacaggcttctggtgagcgctccgcggcctccgggaccccctggccgcacggggagagctcgggcgccccctgactgcgcactgtgagagcttcagagaccggagctccctcctctggggccctggctctcccgggcccgccccccgccgtgtttgtgggtgggtcctccacctgagtgggcgccggggcgtgagcctgggccgccccctgcagcccaggccgatgcccgggatcctgctctttgaggtaaaccaggagtctcccctgggagtggacggccctgcagcgggacctggcctgcctgtcccattccttccacctagagctgaggtacccgccttcctggcagggccagggccagggctggcgttggcccctcgtcttactgctgctgccgttccccatgaagatgggacctccccacattcctggccctaagggtcattttattagtcactgaacgcacgggcagcgcctggatcctgcgcccgggcagtcctgggcttgaacgtgtgtgtcagccgcgctgccagccatgctgaggctcgggactgagccgcccctttgttgtccccagccccccgctgccacacagccaggctgaccagtacgtcctcagctgggaccagcagctcaacctcgcctatgtgggcgccgtccctcaccgcggcatcaagcaggtccggacccactggctgctggagcttgtcaccaccaggtgggcggcgggcagggtctgggcgtcccagagccccttacagaggcacagatgggaggggagggctgggggctgctcggaagaccccttgttcccccacctcccgccgaagcaccctgttggggagagcgtgtccttgctggctgtgctggggtgagggctgtgtgctggagggagcccctgcatggggcacggtgggcttcctgcaggtctccctgcaggctcagggttggctgcgccgcacctggctcctggtgcacccgtgagcatccctgtgtgtgtctgctggccaggctgggtagggccactgcacctgagggctgagctgaggtctcatcggtcacagcaccctgggccctgacgctggtgcaggtggccaccctgtgagggggaggcacgaggtgtgaggggcacttgggtgtgtggggccttctggaaacacagagaccctcgtgcacttggccagagccgctggctcctaccagcagggtgggcaccgggcaggcctgggcatagggagtcctcttggcaccttggaggctgcatgatggcgggggacccttgttcaaataagatgtcaaccctgagcgtcaggtcaggcccatccctcctgagctgagggacggtgcattggggcccagccagcactgtgggccagcctgtctcggaggcagaggttcttgatttctgagtgtttgggtcctgcgtgtgatcagagggcctcctttcccagttggggttccccggtttccccagggcagctgtggcacaagagtgcagctcttgggtggctcctccctgggaagggtctcagcagtggcttgcagacgtctgctgtgggtccccaggagggagcagaggctgctgggcaggcctggccctgctacagatgggcatcggtggcctccagctccctgtggcgggctcgtgctgtctgcacggcatcgtgcacactgaggaacagctgctcctcctcagccgtgtccccggggccctccccgaggaagcctcctctgctcagaatgtctctcacaggcgggctgcagcaggctagcagcaggctgatgcccagggccccgtagtctcggcgcaggtcctgcagcgtgctcacaccggctgcgtctaggaacagcagcggggcgcagtcgatgaccactgtgtggaagccggccgctgcgggcaccagcgcagccctggtgctaaccgggcccaggtcctcgccctgggcagggcctccctcaccgacccccgtctctgagcccccctccttcctcctggcagccatgcaccctgcgtccagccccgtgaggctgtagagtgactgcaggaagaagtccttgttggcatagtacagcggccccccaaagcggaacacccgcacgccgggctcagggacgaggccctcgaactctgtggcatcctcgtagaaggccgtgtccccgatgcgggccagcagggcggtgcgtgggcgttgggtgcggccggccaggctgagcagcgagaggatgacgccagccagcagcccggcctctgtgctgaccagcatacaggtggccgcggtgcctgcccagaccagcgcgtcagccgggctcatccgccacagccgcgggaggtcccacaccttgcgcagggccccccgcaggctgaccacgatgacgcaggccagcacgcttcgctgtaggtcgtggaacagcggtgccagcgccagcagcaccagcagcaccacggtggcgctgaccacgctggacagctgtgtccggcagccagtggctgtcttcaccaggctcttggccagggcggcgctggtggcgaagcagtggaggaaggcgggtagcacgttgcagcagcccacagccagcagctcctggttggcacgcacagagtagccgtgactgcgggcgaacatctccgccagcgagatggagaaggcggcagccacgagggccagggccacggcatccaaagccacacgctgcatcagcctgggctctgggacctgagggggcatgaaacccgtggggatgtcgccagccacgctcgagccaaagcgcttgtggagctgcccgaagtgcgacacgagtgtggccaccacgatgaccagcagctccgtgggcagcggcaccctcaggcggtgtcggtagcggtctgagagctccttcgcggctagcagcaccgccaggcacaccgtgctggtgaccacgtcgcacacgttggcctgcccggcgccgcgcagcaggctcagccatgtgaggaccaccatgccgggcccctggtgccgcgggatccgcacgcccagcaggtgtttgagctgcgaggtcaggatggtcacggaggcccccatggcaaagccatcgagcagtggctgtgagaggtaggcggacacgaagcccagccggaggacgcccatgaggacctgtggacggagtgcggtcaggccagcaggcgcctggcgggagccacctgcccctcaccagcacctggcatggcccgaggggtggtggtcacggcacaggacctgacaattctgtgttgcggccccgtgtgttccaaaccagactcctcacacgggcctgagttctggttccacgcgtgctcatgcccgcagacaactgtgacatccacgtgagcatcacacgtgcacacagctggccatagacacgtctaacccttgtcacgtgcagcagcccgttttatttcagaattaagacctctggtatcagaaggcaaccccttcctgctgcttcctacacatggtgcccactgccccccatgcagatgtggagccaacgggggccaaggtggacaggccaaggcaggagaccttcgggggtggggaggccatcccccactccacctaggacagaaggcctgggaggccacatggcctcagtccagcaccactgagccacagccacacctggcctgctggtccccaccaaggccatggcccaccggactggctccccgtgcccctcccctcctgcatccacagcctctccgcgtcggtgcctcgccctgggatgccccggcacgccccagctctgcccaagccttgctgtcttgggccagcacctcctctgccaaccctgtgcttgcccccagccttgccctcgtggatggccaaaacctaagggggggtgccctgggcccctccctgtgcccaagcagggctcctcacctggtaaagcccggtcatcagcgtgagggcggtggcgacacggatggcgtagcagtcacgcccgcagtccagcatggcagccgagccgttgagggtgctgctgttggctccgggctgcaggccgtcctgggaggggtcaaagccggccagctggagctcccggtccaccacctgccccaccatgaggcaaagcaggctgaagatgcccacggagacatgccgtgaggtgcccatgaggaagtagatgaggttggcgaagaaggacgtatagaggctgtagatgggctgcagcccggccagcaatgagtaggcgatggcctgcggcaccaggatgatgccgatgaccagcccagacatgacgtcgcctgccaggtactcccgcgggcggtactgacgcagccagcgcgtggcggggagcaggtcctgcaccagcgcccggacgcacagcacactgcacgagcagctgcaccacagcctggccttcagcatctcacgcagaccccggggtgctgggcgctgccgtcggaccggcaccggccctctgccctgctgcagaggctcaggggactcgtccatcctgttgcgtcaggtcccgtggccgacctgcggccgagaagagggcatggtcacaggagcccccggatccagggccaaacgacaaggtccccggcagcaacgggccccttggggcggacccctcgcccacccagggccggggattggtgctgggccttctcctggcagcgcgggccccagccccctgcccggtatggatggacgctgggccctgctggatccagaatccatcgtgaggtgagatgggattacgacaccaagcccatgccatggggtgtgctgaggccagcagtgctgaggggcggcgtggcggcaccctgtccaggctcagctccggcctattggctctgcggttcctggctgaaaaccaccctgtagcctcctgaagctcacctccccaacggggcaggaacaggctgggctgccaccacgcacatgtgcctaccgtcagaatgtcacagtcactggacacaggtgcaggcaagcctgagtccagctgctccgtgtccacctccctggctccccaggttggcaaacggtcctgctgtccaccccatgcccacaccagagccctccctcccccatccaaaccatcgcctgctctcctggagacacctccacccacccctctgtcacctgccctgtgggtcctggggctggcggaagtctcaggaagaggcctcctatgtccctgccaagctttgtgggtactgggaccccaagtctgctgggggagcagcactcagacactagcctagcccatccgcctggacttgggacagaattctgagaatatgcctggacgggggccccatcagggccagctgggaggggaggagggtgactggcgtctgtctcccctgcccagacagttctgggacgtgaggcgccctttttcccaggctgcaccagctcactgtggaacggccatgacacactgtcccgaggcagcaccgagagggcccagcccgctgcacacagtcaccctgggccggcagagccggaagggcacctgacctttcccttgatctcggaaaacaccgtggcgttagggaggcggtgcttagaggcctgactggtcccacgtgaggcctcgggtctgtcctgtttgcagactccaatgtactttcactttaaacattcttctcagcgacgttaggcaaagactttgctcccaggacaccaggtgcccaggacaccctggagcctgggctgagcctgctgtttgcacgctggcccagggtgtgcgagctccagtctcctggcgggtgtgttggggcagtgagcccagcctggtaggttgacacatgcaggctgggcacagcacccctggggcacagagcgggggtcctggccctcaggcaacattgcaagagttgtgtccccttccctggaagaccccaccacactgggtccctggatgccctgaagcccaccccaagcccctggggtccaggtgtgtggaatggggacagtagggccacctgccttgagcctgagggtgcccctaagaaaccacgagtccagggcatttctggcctcggctcccacgcccccctctgctgcagctgagatctgggcccaggatggttcttacctgagggagtcctcacaggcgcggagggccctgggatgacgaggggctggcaagaccaccgaggaccgcagggccctctggctcccgcgagcagcggggagagtgggggtggtggcgccaacctgcaggcagtggtctgtgccctggactctgtagttcaattatttacctacagattgctgagtcatgggtttctccagccatgttacctgatcggctgatccgggagttgaactgtaatcaggggcttgtaggagttagagctgtgtgggcctctgaggagctcccagcctcccaggagccgctgcagctgtggctctgcggccctgccgggggggcttagggaccagcgggaggcgggggctcaggggctgagcacaggtaaaccttcagctctggggtctggggtcgagtgcagcagccttcaaacccaggcggggctgagggaggcttggtctccgtgtccagtcgccggacaccctcctggtcctgcaaggagccagcctggtccaagctggagcagggcagaggctgacagccggctcagcccaaggctgccggtgcgtgcatatgcgtgtgtgctcgcgtaagccctgtgtgtggtgctcaccgcccagggcgaggactgccggggtcaaggtgccgtgactggccaggagtcctggtctgactggacccagcaccgacccacagcgcctggtcaccctcacggctcctctgccctcccctctaccacagaccaggaccggcagtgcctgcctcatagggctggggtgaagataaatgatttttttaagtgaactaaattaggcccacacgtgaaaataagggtaagctgctttttaaaaggaattattagccaggcacgatggttcactcctgtaattccaacactttgggaggcctagacaggaggatcgcttaaggccagcagttcaagaccagcctggtcaacatagtgagacgccccccaccttttctttttttttttttgaggcggagtcttgctctgtcacccaggccggaatgcagtggtgtgatctcggctcactggaagctctgcctcctgggttcacgccattctcctgcctcagcctcctgagtagctgggactacaggcgcccgccaccgcgcccggctaatttttttttttttgagacggagtttcgctctgttgcccaggctggagtacagtggcatgatctcggctcactgcaagctctgtctcccgggttcaagtgattctcctgcctcagcctcccgagtagctgggactacaggcacccgccaccacgcccggctaattttttgtatttttagtagagacggggtttcaccatgttagccaggatggtcttgatctcctgacctcgtgatccacccacctcggcctcccaaagtgctgggattacaggcttgagccactgcacccggccgccccctgccccccaacctttaaaaaattaaaagtaaaaaattagctgggtgtggtggtgtgtgcctgtatcccagctactcaagcggctcaggtgggagcatggcttgagcccaggagtttgaggctgccatgaggtatgattaggccactgcaccctatcctaggccacagagcaagagcccgtctcaaaaacaaacgctgtcattggcccagcactttgggaagctaaggtaggaggattgcttgagccctggaggtccaggctgcagtgaggtatgtttgtagcgcttcactccagcctacaagtcttttttttttttttttgagatggagtctcgctctgttgcccaggctggagtgcagtggcacaatctcggctcactgcagcctctgcctcccgggttcaagcgattctcctgcctcagccgcctgagtagttgggactacaggcgtgtgccaccacgcccggctaatttttgtatttttagtagagacagggtttcactatgttggtcaggctagtcttgaactcctgaccttgtgatccacccgcctcggcctcccaaagtgctgggattacaggcgtgagccaccgtgcccggccagttctgtctcaaaaaaaaaaaaaaaattccttgggagcctcaggtccccccgactttgacagtgagtactgggtgggagcctgcacggggcacctgtggccggagggtgagtgtaacgaggggctgcagccctcagtgctctcccatcccaagggaggccaggaggctgcggtgggtccctcgggtggggctggaaggccaacccggccctggcaccttgggcagcctgactctgtccggggaacagaagccacaggctctacttctcctgtccatgtgggattgaagccgagggtctcgcagaaccagctgatgtgccggggctccatttccccaagacgaggacactgacattgatggggcacagccccggagggaggagaccctggacactcaccccaccaaaggtacctccttgtggaagccgtctgccaagcgctgctagttccccacagccctgggtgagcccagggaagactgggctgcagtgcccccatttggaggtgaaatgggagtggaatgtagttgggatggccagagagtaggagacatcctaagtgtgagatgtggacagggctgaatgctccagggtctcgtaccccagagtgtgagatgcgggcagggctgaacgctctggggtctcgtacccctgagtgtgagattcgggcagagctgaacaggctccagggtctcatacccccatagcctccacctgggatgccctctccaagtctgatttctcctcgaagcccctgccctgtcctccagagtctgagcccttgcttccaccccagcccaacctgggccccagtggtccctgggaagcagctgtttgctcagcagttgggagctgtgctgtaagaagcggttggccagtgggtggggtaaggcagtcacgcagggcctcaggtccctccctgggacagataagggcccctctgggtgcagccaccagcagggttgttggagaactggggagacccagggggctggggttgttccctcaaggtctccctaaaggaggcagggaggacctgggtgctacagcaggggtggggcacctggtgcagacgcctgcatgcagggtggggtgggcagtgccacctggggccacagaaaaacctggagtgggaggtggcccttcccccctcaggaaaggtggtggaggtttccagaggctggcttatggggacctgtggtgaggttttaggcaggtgagcgtagttcaggaacagcctcagccgcactgcaggggcctggcctcaggtcttctgcaggcattgggccttatgcccttttagtccccacctaggctgggtgtctaaagtaggtgaggtcatcactgcaggatccttggggcctgacctgccccctcccacgtgtctctgcctcagtttctctgagcattgaggcagtggctggtgctgtcctgtggccaggcccagaggctgagtgcccagggggtccaggggccttgctggccagagagagtgggtagcccattctaccccgagcctgtgcacgcgcagggctgccaacacctccttccttccccgcttggcccacgcaggacagggggcgtgggggccccagcaactgggacctgcctgaatccgcctccctcctgaacccccctcccgcctgaacccctggccagtcttgtgtcacacgcttacttccttagttttgtctttaaatcagccgttttacattggagtccatttactgggaaaggagaccttgcatccttgcctcccacccgtgggaagaagcccggccgacagggctttgagaccggacccgagtttattcccagagaccctcccgcgggtgggcgagctccgaggtctggagaagaggaggccccggcccgcaccctctagcacctgtgtccccttcgtcccggccacagatgcaggttctcccaagaggcgggtctgtacccgccccgcgcccccagcccagcgggcccggcctccgcccctgccccgcactcccacccccaccctcaggagagcgcggccctgctccccaccccgcgcggtctccccccaccgcctgcgaacccccatgcacgcgcggccccgccccgcgcactcaccaggcccggcagccgcgcggtcttagcggctcacgcgctcgggcccaggggcggggacgtggggacccgggcggccgctcagccgcggccgcgcggtgaatgagcccgttgtgcggccgccgcggccccagcgacaccccgcgcggggtctacaagggctgacgcgcccccgcggcttccgttcccgggctgggcggtggctcgtctgcgtctccggccctgggggtgggctgcgcgctccatctcgccggcccagtcccctccccagcgtcggtctctcaaggcccctcccaatgggggccaggcggagggtgggccctcgggcctgtggactgaccccggggttcctgggcctgggggcggggatccctgtcccgggctcccctcgctgcgaggctggccctgccagatgacactcagaggcgccttgggtgtcaggccagggacatctctgatgctggggctccccccgctagggtcaggggctgccgggctatcgccttggggttctgcagagaaaacctgaagcccagctgggtcttcactttcctccaggtcaccgtgccccgctactccaactccgtgggactttggaatgcaccttctgggcatttaattcttatccaagtgcctcttaagttatacttctttgctaccagtgtgtcctttggatggaggggaggagaggtggtaggggccgggtggggtggaccccagggactcctgctgctcctgctggacacccagcccggggtacaggagcaggtggggaccagcagaggcggggcggagcaggagcccacacccaaaggctgtagactcctgccaaggctctgccttgatcttgtacaccatgggaggaccagaagggaggcgttgaggtgtccagacctttgctgtggagctgggggtgctgtggcatggggagactgacagacggggagctgtatagggccagattccggtccatggtggtaaccccatcccccaccactgcagatgcggcacaaagccagctgccacaggaggtgcactgccccacgggcagctgtgctcacctgcgtggcgtccgcaggaagccctcagaccctggccagcctggtctctgcttctcactccaggctcaaggctggctgctattccattcaccccattccctttccctcaggccagaagcatcactcacaactccagacccttgcacaccaatctcctcactcagttcaccctcagatgtccaactccacatggccaaaaccgagaccagtctcactccaagctcatccacccgcctagctgcccaagctgaaatccacagttgccctgtacgaccccccgaccccccacctcaccccccagctcacctcaaacctcatcagtccctctgctcacagcctgcacagccaccacccagtctgggcaccatacctctctgggcaacccccatggcccccagccagtcttccagctcccaccctgactccagtgagctgccagagggatccttgaaaaatgctctggaagccaaggtgggcggatcacgaggtcaggaaatggaaaccatcctggctaacatggtgaaactccgtctctactaaaaatacaaaaaaattagccgggcgtggtggcgggcgcctgtagtcccagctactcaggaggctgaggcaggagaatggtgtgaacccgggagggggagcttgcagtgagccgagatcgcgccactgcaccccaggctgggcaacagagtgagactctgtctcaaaaaaaaaaaaaagaaaaaagaaaaatgccctggcactgctcagctcagaaccttgaaagggatccttgtttcgctctgggtcagggtcccatcctcaaagcagtcacttccagagccccatggagcctcatatcccatgatatccacccttattctgtctcaggcccaccagctgcctccctgctgcctgattgtcatgtgtgcattcctgttccagagcctttgcactggcgatgccatctgctgcctggatgtcttcctgctggctggtcccgttgcatggtagccttaggtgtctcctcagagaggtccctcgctgaccatcaggctcctcactccctgtcgtatccccttcaccaaagattcccattccctgacgacgcctgtcccctcggaatgcaggcctcgtgggaattcagcccatccgcaagtgcagtggcagggcggcccccttcccccttgacgacgcctgtccccttggaatgcaggcctcgtgggaattcagcccatctgcaagtgcagtggcagggcggcccccttctcccttgaggacgcctgtcccctcgtaatgcaggcctcgtgggaattcagcccatctgcaagtgcagtggcagggcggcccccttctcccttgaggacgcctgtcccctcgtaatgcaggcctcgtgggaattcagcccatctgcaagtgcagtggcagggcggcccccttctcccttgaggacgcctgtcccctcggaatgcaggcctcgtgggaattcagccccatctgcaagtgcagtggcagggcggcccccttctcccttgacgacgcctgtcccctcggaatgcaggcctcgtgggaattcagccccatcggcaagtgcagtggcagggcggcccccttcacccttgacgacgcctgtcccctcggaatgcaggcctcatgggaattcagcccatctgcaagtgcagtggcagggtggcccccttctccctttcctgtgcactcatgttgcctcttggggtgtgggaggggaaatggggcactcctgggcctccaggaggtgcagagaaccagggtgaggtgtccaccaggtcctgcctggctcctgacccctggcccctgctgctcgcgactggcctgcctcgtgccactgagcctcagagccattccgaacccccaccccaagttttccatctcttgatggtgtagggttggggggtctccatgtacagatactctagttcataccaggccttcatagggttattttccaaggggaagggcccctcgggaagccgggatcggagtcctgtgtggcaccttgcaggctcccacatgctccgttgtggccacggttccagcctggagcatggagctgtgtgggcaccctgcttcctgacgctgaccgtccttctgcagggggtccactggacggggcctgagctacaacttcacccacctggacgggtacctggaccttctcagggagaaccagctcctcccaggtgagctgtgggctctgccctcccagcccgcctgcacccccttgccctgcccaccctctccctcacccagcccctctgagtccttggatgtccattcagggctggccttggtgccggagcacaggcctggcagagcatgggtgtggtgtgtggtgggcggtggggcagccctcctgtgttccagggtttgagctgatgggcagcgcctcgggccacttcactgactttgaggacaagcagcaggtgtttgagtggaaggacttggtctccagcctggccaggagatacatcggtgggcgagcgcaggccctggggccctggccggggcgggggtactcctgggcaggttgcacccctatcacgcaggctgctgcctggtcaggagatacattggtgggcaggcgcaggcccttgtggggggatgggggtgacaagggataggttggtggtcggcgcaggccctggggccccaggctggggggtactcctgggcttggtgggtgggcgaaggccctgggcccctggggtggggggtactcctgggcaggctgcacccctatcacccaggccgcacccctatcacccaggccgccgcccaggtcttggacccccttgagccagcgcttcctgatgtggggcgggaggctggcctgcatggagatggggttcatcttgagtcagacgcccttcatcaccttgcaccctccctccgtgggagtcactgaggcgagattcacctgtgctggggggacagcaaggctcctctgcaggtaggtacggactggcgcatgtttccaagtggaacttcgagacgtggaatgagccagaccaccacgactttgacaacgtctccatgaccatgcaaggtgtgcaccgcttcctggggtcctgcccggctgaaagggggcagaggaaggcaggagcagaggctaagccgctcatccccagggcaggtgtagacgcagtgctcccccggcccaggcttcctgaactactacgatgcctgctcggagggtctgcgcgccgccagccccgccctgcggctgggaggccccggcgactccttccacaccccaccgcgatccccgctgagctggggcctcctgcgccactgccacgacggtaccaacttcttcactggggaggcgggcgtgcggctggactacatctccctccacaggaaggtgcgccctgcccctccgtccgccccggtgttctgcgccctcagccgctgtgccccgggccgcgctgaccctggtggtgctgaggcggccccgcccgcagggtgcgcgcagctccatctccatcctggagcaggagaaggtcgtcgcgcagcagatccggcagctcttccccaagttcgcggacacccccatttacaacgacgaggcggacccgctggtgggctggtccctgccacagccgtggagggcggacgtgacctacgcggccatggtggtgaaggtgggccggcccaacgccctgcgcgccccccggccaccttcctcccgagacgggacaggcgagcggtggccgcgccacccggtcccagctgccctggacacccgcaggtcatcgcgcagcatcagaacctgctactggccaacaccacctccgccttcccctacgcgctcctgagcaacgacaatgccttcctgagctaccacccgcaccccttcgcgcagcgcacgctcaccgcgcgcttccaggtcaacaacacccgcccgccgcacgtgcagctgttgcgcaagccggtgctcacggccatggggctgctggcgctgctgggtgagccggggccgctggggtgggccggccagggccctccaggctggggagcggctcctgcgaaggccccgctgcggggagcgcacttcctccagccgcgcgcttcccggggtcggcctccgcgtggcggggcctggggactccttcaccaaggggagggggagcgagtggtgggaggcccggccctgggtcggggggcggctgggcaacgaccccacgcggcgacggcccccccccgccccgcagatgaggagcagctctgggccgaagtgtcgcaggccgggaccgtcctggacagcaaccacacggtgggcgtcctggccagcgcccaccgcccccagggcccggccgacgcctggcgcgccgcggtgctgatctacgcgagcgacgacacccgcgcccaccccaaccgcagcgtcgcggtgaccctgcggctgcgcggggtgccccccggcccgggtaagccggggttccagggaggtctctggccccgctggggctctggagggggcggcccggggagccgaggcctgagtgtcaggccccgcaggcctggtctacgtcacgcgctacctggacaacgggctctgcagccccgacggcgagtggcggcgcctgggccggcccgtcttccccacggcagagcagttccggcgcatgcgcgcggctgaggtaggtgggccgcggaggggcgaggggccgggccgggccggggtcccgggggggtggggtccggggcgggggctccgaggcggtgtgggtgggaggtggagcggtgggccgggggcgttcgccctgaggtcgggccgagcgtccccagctcccctggagaaccctgaggaccggccactgcgcccaggacccggtggccgcggcgccccgccccttacccgccggcggccgcctgaccctgcgccccgcgctgcggctgccgtcgcttttgctggtgcacgtgtgtgcgcgccccgagaagccgcccgggcaggcaagtggcagtcccctaacccgcgccgcggcccggactccccttccccgacgccatcacagcccttccctcccccaggtcacgcggctccgcgccctgcccctgacccaagggcagctggttctggtctggtcggatgaacacgtgggctccaagtgcgtgagtggggccgcccctccctctgcctggtcctaggcaggtccctgggtcccgaccccttcacccatgcggtcactcgggccacttgccgtggcccatcggctccctccctcgccgccctgcgtccctgcccttcaccccacacactgtgggccacgcgccaggccctgccagtggggtgtgggttctcctaggggacatgagatggacattcgggctccagccctctcctgcctgggcaggaagagtgcccaggggctggggaggtgccgccgaggggcttgagggaatgaggctgtgggtccacgcggccgtgccctgcctgctcccacctttgaggactgtcttgaccccagccttgttcttggcctgacctccccaggtgcctgtggacatacgagatccagttctctcaggacggtaaggcgtacaccccggtcagcaggaagccatcgaccttcaacctctttgtgttcagcccaggtgcgcccaccacccgctgccctggactcggccaccccattcttgggcctcagggcagtactgggtgggggcctcgagaagcctggggtcagggggctttcgggtgggggcaggttccggttggcacacatgtccccttgtctccagacacaggtgctgtctctggctcctaccgagttcgagccctggactactgggcccgaccaggccccttctcggaccctgtgccgtacctggaggtccctgtgccaagagggcccccatccccgggcaatccatgagcctgtgctgagccccagtgggttgcacctccaccggcagtcagcgagctggggctgcactgtgcccatgctgccctcccatcaccccctttgcaatatatttttatattttattattttcttttatatcttggtaccaacgccccctttaaagcggctttgcacaggtca

SEQ ID NO: 12479 - DNA, 2174 bp, Homo sapiens
agtgcagcccgaagccccgcagtccccgagcacgcgtggccatgcgtcccctgcgcccccgcgccgcgctgctggcgctcctggcctcgctcctggccgcgcccccggtggccccggccgaggccccgcacctggtgcatgtggacgcggcccgcgcgctgtggcccctgcggcgcttctggaggagcacaggcttctgccccccgctgccacacagccaggctgaccagtacgtcctcagctgggaccagcagctcaacctcgcctatgtgggcgccgtccctcaccgcggcatcaagcaggtccggacccactggctgctggagcttgtcaccaccagggggtccactggacggggcctgagctacaacttcacccacctggacgggtacctggaccttctcagggagaaccagctcctcccagggtttgagctgatgggcagcgcctcgggccacttcactgactttgaggacaagcagcaggtgtttgagtggaaggacttggtctccagcctggccaggagatacatcggtaggtacggactggcgcatgtttccaagtggaacttcgagacgtggaatgagccagaccaccacgactttgacaacgtctccatgaccatgcaaggcttcctgaactactacgatgcctgctcggagggtctgcgcgccgccagccccgccctgcggctgggaggccccggcgactccttccacaccccaccgcgatccccgctgagctggggcctcctgcgccactgccacgacggtaccaacttcttcactggggaggcgggcgtgcggctggactacatctccctccacaggaagggtgcgcgcagctccatctccatcctggagcaggagaaggtcgtcgcgcagcagatccggcagctcttccccaagttcgcggacacccccatttacaacgacgaggcggacccgctggtgggctggtccctgccacagccgtggagggcggacgtgacctacgcggccatggtggtgaaggtcatcgcgcagcatcagaacctgctactggccaacaccacctccgccttcccctacgcgctcctgagcaacgacaatgccttcctgagctaccacccgcaccccttcgcgcagcgcacgctcaccgcgcgcttccaggtcaacaacacccgcccgccgcacgtgcagctgttgcgcaagccggtgctcacggccatggggctgctggcgctgctggatgaggagcagctctgggccgaagtgtcgcaggccgggaccgtcctggacagcaaccacacggtgggcgtcctggccagcgcccaccgcccccagggcccggccgacgcctggcgcgccgcggtgctgatctacgcgagcgacgacacccgcgcccaccccaaccgcagcgtcgcggtgaccctgcggctgcgcggggtgccccccggcccgggcctggtctacgtcacgcgctacctggacaacgggctctgcagccccgacggcgagtggcggcgcctgggccggcccgtcttccccacggcagagcagttccggcgcatgcgcgcggctgaggacccggtggccgcggcgccccgccccttacccgccggcggccgcctgaccctgcgccccgcgctgcggctgccgtcgcttttgctggtgcacgtgtgtgcgcgccccgagaagccgcccgggcaggtcacgcggctccgcgccctgcccctgacccaagggcagctggttctggtctggtcggatgaacacgtgggctccaagtgcctgtggacatacgagatccagttctctcaggacggtaaggcgtacaccccggtcagcaggaagccatcgaccttcaacctctttgtgttcagcccagacacaggtgctgtctctggctcctaccgagttcgagccctggactactgggcccgaccaggccccttctcggaccctgtgccgtacctggaggtccctgtgccaagagggcccccatccccgggcaatccatgagcctgtgctgagccccagtgggttgcacctccaccggcagtcagcgagctggggctgcactgtgcccatgctgccctcccatcaccccctttgcaatatatttttatattttattattttcttttatatcttggtaccaacgccccctttaaagcggctttgcacaggtca

SEQ ID NO: 12480 - DNA, 296 bp, Homo sapiens
ctggtgcacgtgtgtgcgcgccccgagaagccgcccgggcaggcaagtggcagtcccctaacccgcgccgcggcccggactccccttccccgacgccatcacagcccttccctcccccaggtcacgcggctccgcgccctgcccctgacccaagggcagctggttctggtctggtcggatgaacacgtgggctccaagtgcgtgagtggggccgcccctccctctgcctggtcctaggcaggtccctgggtcccgaccccttcacccatgcggtcactcgggccacttgccgtggc

SEQ ID NO: 12481 - DNA, 218 bp, Homo sapiens
ctggtgcacgtgtgtgcgcgccccgagaagccgcccgggcaggtcacgcggctccgcgccctgcccctgacccaagggcagctggttctggtctggtcggatgaacacgtgggctccaagtgcgtgagtggggccgcccctccctctgcctggtcctaggcaggtccctgggtcccgaccccttcacccatgcggtcactcgggccacttgccgtggc

SEQ ID NO: 12482 - DNA, 17462 bp, Homo sapiens
agtgcagcccgaagccccgcagtccccgagcacgcgtggccatgcgtcccctgcgcccccgcgccgcgctgctggcgctcctggcctcgctcctggccgcgcccccggtggccccggccgaggccccgcacctggtgcatgtggacgcggcccgcgcgctgtggcccctgcggcgcttctggaggagcacaggcttctggtgagcgctccgcggcctccgggaccccctggccgcacggggagagctcgggcgccccctgactgcgcactgtgagagcttcagagaccggagctccctcctctggggccctggctctcccgggcccgccccccgccgtgtttgtgggtgggtcctccacctgagtgggcgccggggcgtgagcctgggccgccccctgcagcccaggccgatgcccgggatcctgctctttgaggtaaaccaggagtctcccctgggagtggacggccctgcagcgggacctggcctgcctgtcccattccttccacctagagctgaggtacccgccttcctggcagggccagggccagggctggcgttggcccctcgtcttactgctgctgccgttccccatgaagatgggacctccccacattcctggccctaagggtcattttattagtcactgaacgcacgggcagcgcctggatcctgcgcccgggcagtcctgggcttgaacgtgtgtgtcagccgcgctgccagccatgctgaggctcgggactgagccgcccctttgttgtccccagccccccgctgccacacagccaggctgaccagtacgtcctcagctgggaccagcagctcaacctcgcctatgtgggcgccgtccctcaccgcggcatcaagcaggtccggacccactggctgctggagcttgtcaccaccaggtgggcggcgggcagggtctgggcgtcccagagccccttacagaggcacagatgggaggggagggctgggggctgctcggaagaccccttgttcccccacctcccgccgaagcaccctgttggggagagcgtgtccttgctggctgtgctggggtgagggctgtgtgctggagggagcccctgcatggggcacggtgggcttcctgcaggtctccctgcaggctcagggttggctgcgccgcacctggctcctggtgcacccgtgagcatccctgtgtgtgtctgctggccaggctgggtagggccactgcacctgagggctgagctgaggtctcatcggtcacagcaccctgggccctgacgctggtgcaggtggccaccctgtgagggggaggcacgaggtgtgaggggcacttgggtgtgtggggccttctggaaacacagagaccctcgtgcacttggccagagccgctggctcctaccagcagggtgggcaccgggcaggcctgggcatagggagtcctcttggcaccttggaggctgcatgatggcgggggacccttgttcaaataagatgtcaaccctgagcgtcaggtcaggcccatccctcctgagctgagggacggtgcattggggcccagccagcactgtgggccagcctgtctcggaggcagaggttcttgatttctgagtgtttgggtcctgcgtgtgatcagagggcctcctttcccagttggggttccccggtttccccagggcagctgtggcacaagagtgcagctcttgggtggctcctccctgggaagggtctcagcagtggcttgcagacgtctgctgtgggtccccaggagggagcagaggctgctgggcaggcctggccctgctacagatgggcatcggtggcctccagctccctgtggcgggctcgtgctgtctgcacggcatcgtgcacactgaggaacagctgctcctcctcagccgtgtccccggggccctccccgaggaagcctcctctgctcagaatgtctctcacaggcgggctgcagcaggctagcagcaggctgatgcccagggccccgtagtctcggcgcaggtcctgcagcgtgctcacaccggctgcgtctaggaacagcagcggggcgcagtcgatgaccactgtgtggaagccggccgctgcgggcaccagcgcagccctggtgctaaccgggcccaggtcctcgccctgggcagggcctccctcaccgacccccgtctctgagcccccctccttcctcctggcagccatgcaccctgcgtccagccccgtgaggctgtagagtgactgcaggaagaagtccttgttggcatagtacagcggccccccaaagcggaacacccgcacgccgggctcagggacgaggccctcgaactctgtggcatcctcgtagaaggccgtgtccccgatgcgggccagcagggcggtgcgtgggcgttgggtgcggccggccaggctgagcagcgagaggatgacgccagccagcagcccggcctctgtgctgaccagcatacaggtggccgcggtgcctgcccagaccagcgcgtcagccgggctcatccgccacagccgcgggaggtcccacaccttgcgcagggccccccgcaggctgaccacgatgacgcaggccagcacgcttcgctgtaggtcgtggaacagcggtgccagcgccagcagcaccagcagcaccacggtggcgctgaccacgctggacagctgtgtccggcagccagtggctgtcttcaccaggctcttggccagggcggcgctggtggcgaagcagtggaggaaggcgggtagcacgttgcagcagcccacagccagcagctcctggttggcacgcacagagtagccgtgactgcgggcgaacatctccgccagcgagatggagaaggcggcagccacgagggccagggccacggcatccaaagccacacgctgcatcagcctgggctctgggacctgagggggcatgaaacccgtggggatgtcgccagccacgctcgagccaaagcgcttgtggagctgcccgaagtgcgacacgagtgtggccaccacgatgaccagcagctccgtgggcagcggcaccctcaggcggtgtcggtagcggtctgagagctccttcgcggctagcagcaccgccaggcacaccgtgctggtgaccacgtcgcacacgttggcctgcccggcgccgcgcagcaggctcagccatgtgaggaccaccatgccgggcccctggtgccgcgggatccgcacgcccagcaggtgtttgagctgcgaggtcaggatggtcacggaggcccccatggcaaagccatcgagcagtggctgtgagaggtaggcggacacgaagcccagccggaggacgcccatgaggacctgtggacggagtgcggtcaggccagcaggcgcctggcgggagccacctgcccctcaccagcacctggcatggcccgaggggtggtggtcacggcacaggacctgacaattctgtgttgcggccccgtgtgttccaaaccagactcctcacacgggcctgagttctggttccacgcgtgctcatgcccgcagacaactgtgacatccacgtgagcatcacacgtgcacacagctggccatagacacgtctaacccttgtcacgtgcagcagcccgttttatttcagaattaagacctctggtatcagaaggcaaccccttcctgctgcttcctacacatggtgcccactgccccccatgcagatgtggagccaacgggggccaaggtggacaggccaaggcaggagaccttcgggggtggggaggccatcccccactccacctaggacagaaggcctgggaggccacatggcctcagtccagcaccactgagccacagccacacctggcctgctggtccccaccaaggccatggcccaccggactggctccccgtgcccctcccctcctgcatccacagcctctccgcgtcggtgcctcgccctgggatgccccggcacgccccagctctgcccaagccttgctgtcttgggccagcacctcctctgccaaccctgtgcttgcccccagccttgccctcgtggatggccaaaacctaagggggggtgccctgggcccctccctgtgcccaagcagggctcctcacctggtaaagcccggtcatcagcgtgagggcggtggcgacacggatggcgtagcagtcacgcccgcagtccagcatggcagccgagccgttgagggtgctgctgttggctccgggctgcaggccgtcctgggaggggtcaaagccggccagctggagctcccggtccaccacctgccccaccatgaggcaaagcaggctgaagatgcccacggagacatgccgtgaggtgcccatgaggaagtagatgaggttggcgaagaaggacgtatagaggctgtagatgggctgcagcccggccagcaatgagtaggcgatggcctgcggcaccaggatgatgccgatgaccagcccagacatgacgtcgcctgccaggtactcccgcgggcggtactgacgcagccagcgcgtggcggggagcaggtcctgcaccagcgcccggacgcacagcacactgcacgagcagctgcaccacagcctggccttcagcatctcacgcagaccccggggtgctgggcgctgccgtcggaccggcaccggccctctgccctgctgcagaggctcaggggactcgtccatcctgttgcgtcaggtcccgtggccgacctgcggccgagaagagggcatggtcacaggagcccccggatccagggccaaacgacaaggtccccggcagcaacgggccccttggggcggacccctcgcccacccagggccggggattggtgctgggccttctcctggcagcgcgggccccagccccctgcccggtatggatggacgctgggccctgctggatccagaatccatcgtgaggtgagatgggattacgacaccaagcccatgccatggggtgtgctgaggccagcagtgctgaggggcggcgtggcggcaccctgtccaggctcagctccggcctattggctctgcggttcctggctgaaaaccaccctgtagcctcctgaagctcacctccccaacggggcaggaacaggctgggctgccaccacgcacatgtgcctaccgtcagaatgtcacagtcactggacacaggtgcaggcaagcctgagtccagctgctccgtgtccacctccctggctccccaggttggcaaacggtcctgctgtccaccccatgcccacaccagagccctccctcccccatccaaaccatcgcctgctctcctggagacacctccacccacccctctgtcacctgccctgtgggtcctggggctggcggaagtctcaggaagaggcctcctatgtccctgccaagctttgtgggtactgggaccccaagtctgctgggggagcagcactcagacactagcctagcccatccgcctggacttgggacagaattctgagaatatgcctggacgggggccccatcagggccagctgggaggggaggagggtgactggcgtctgtctcccctgcccagacagttctgggacgtgaggcgccctttttcccaggctgcaccagctcactgtggaacggccatgacacactgtcccgaggcagcaccgagagggcccagcccgctgcacacagtcaccctgggccggcagagccggaagggcacctgacctttcccttgatctcggaaaacaccgtggcgttagggaggcggtgcttagaggcctgactggtcccacgtgaggcctcgggtctgtcctgtttgcagactccaatgtactttcactttaaacattcttctcagcgacgttaggcaaagactttgctcccaggacaccaggtgcccaggacaccctggagcctgggctgagcctgctgtttgcacgctggcccagggtgtgcgagctccagtctcctggcgggtgtgttggggcagtgagcccagcctggtaggttgacacatgcaggctgggcacagcacccctggggcacagagcgggggtcctggccctcaggcaacattgcaagagttgtgtccccttccctggaagaccccaccacactgggtccctggatgccctgaagcccaccccaagcccctggggtccaggtgtgtggaatggggacagtagggccacctgccttgagcctgagggtgcccctaagaaaccacgagtccagggcatttctggcctcggctcccacgcccccctctgctgcagctgagatctgggcccaggatggttcttacctgagggagtcctcacaggcgcggagggccctgggatgacgaggggctggcaagaccaccgaggaccgcagggccctctggctcccgcgagcagcggggagagtgggggtggtggcgccaacctgcaggcagtggtctgtgccctggactctgtagttcaattatttacctacagattgctgagtcatgggtttctccagccatgttacctgatcggctgatccgggagttgaactgtaatcaggggcttgtaggagttagagctgtgtgggcctctgaggagctcccagcctcccaggagccgctgcagctgtggctctgcggccctgccgggggggcttagggaccagcgggaggcgggggctcaggggctgagcacaggtaaaccttcagctctggggtctggggtcgagtgcagcagccttcaaacccaggcggggctgagggaggcttggtctccgtgtccagtcgccggacaccctcctggtcctgcaaggagccagcctggtccaagctggagcagggcagaggctgacagccggctcagcccaaggctgccggtgcgtgcatatgcgtgtgtgctcgcgtaagccctgtgtgtggtgctcaccgcccagggcgaggactgccggggtcaaggtgccgtgactggccaggagtcctggtctgactggacccagcaccgacccacagcgcctggtcaccctcacggctcctctgccctcccctctaccacagaccaggaccggcagtgcctgcctcatagggctggggtgaagataaatgatttttttaagtgaactaaattaggcccacacgtgaaaataagggtaagctgctttttaaaaggaattattagccaggcacgatggttcactcctgtaattccaacactttgggaggcctagacaggaggatcgcttaaggccagcagttcaagaccagcctggtcaacatagtgagacgccccccaccttttctttttttttttttgaggcggagtcttgctctgtcacccaggccggaatgcagtggtgtgatctcggctcactggaagctctgcctcctgggttcacgccattctcctgcctcagcctcctgagtagctgggactacaggcgcccgccaccgcgcccggctaatttttttttttttgagacggagtttcgctctgttgcccaggctggagtacagtggcatgatctcggctcactgcaagctctgtctcccgggttcaagtgattctcctgcctcagcctcccgagtagctgggactacaggcacccgccaccacgcccggctaattttttgtatttttagtagagacggggtttcaccatgttagccaggatggtcttgatctcctgacctcgtgatccacccacctcggcctcccaaagtgctgggattacaggcttgagccactgcacccggccgccccctgccccccaacctttaaaaaattaaaagtaaaaaattagctgggtgtggtggtgtgtgcctgtatcccagctactcaagcggctcaggtgggagcatggcttgagcccaggagtttgaggctgccatgaggtatgattaggccactgcaccctatcctaggccacagagcaagagcccgtctcaaaaacaaacgctgtcattggcccagcactttgggaagctaaggtaggaggattgcttgagccctggaggtccaggctgcagtgaggtatgtttgtagcgcttcactccagcctacaagtcttttttttttttttttgagatggagtctcgctctgttgcccaggctggagtgcagtggcacaatctcggctcactgcagcctctgcctcccgggttcaagcgattctcctgcctcagccgcctgagtagttgggactacaggcgtgtgccaccacgcccggctaatttttgtatttttagtagagacagggtttcactatgttggtcaggctagtcttgaactcctgaccttgtgatccacccgcctcggcctcccaaagtgctgggattacaggcgtgagccaccgtgcccggccagttctgtctcaaaaaaaaaaaaaaaattccttgggagcctcaggtccccccgactttgacagtgagtactgggtgggagcctgcacggggcacctgtggccggagggtgagtgtaacgaggggctgcagccctcagtgctctcccatcccaagggaggccaggaggctgcggtgggtccctcgggtggggctggaaggccaacccggccctggcaccttgggcagcctgactctgtccggggaacagaagccacaggctctacttctcctgtccatgtgggattgaagccgagggtctcgcagaaccagctgatgtgccggggctccatttccccaagacgaggacactgacattgatggggcacagccccggagggaggagaccctggacactcaccccaccaaaggtacctccttgtggaagccgtctgccaagcgctgctagttccccacagccctgggtgagcccagggaagactgggctgcagtgcccccatttggaggtgaaatgggagtggaatgtagttgggatggccagagagtaggagacatcctaagtgtgagatgtggacagggctgaatgctccagggtctcgtaccccagagtgtgagatgcgggcagggctgaacgctctggggtctcgtacccctgagtgtgagattcgggcagagctgaacaggctccagggtctcatacccccatagcctccacctgggatgccctctccaagtctgatttctcctcgaagcccctgccctgtcctccagagtctgagcccttgcttccaccccagcccaacctgggccccagtggtccctgggaagcagctgtttgctcagcagttgggagctgtgctgtaagaagcggttggccagtgggtggggtaaggcagtcacgcagggcctcaggtccctccctgggacagataagggcccctctgggtgcagccaccagcagggttgttggagaactggggagacccagggggctggggttgttccctcaaggtctccctaaaggaggcagggaggacctgggtgctacagcaggggtggggcacctggtgcagacgcctgcatgcagggtggggtgggcagtgccacctggggccacagaaaaacctggagtgggaggtggcccttcccccctcaggaaaggtggtggaggtttccagaggctggcttatggggacctgtggtgaggttttaggcaggtgagcgtagttcaggaacagcctcagccgcactgcaggggcctggcctcaggtcttctgcaggcattgggccttatgcccttttagtccccacctaggctgggtgtctaaagtaggtgaggtcatcactgcaggatccttggggcctgacctgccccctcccacgtgtctctgcctcagtttctctgagcattgaggcagtggctggtgctgtcctgtggccaggcccagaggctgagtgcccagggggtccaggggccttgctggccagagagagtgggtagcccattctaccccgagcctgtgcacgcgcagggctgccaacacctccttccttccccgcttggcccacgcaggacagggggcgtgggggccccagcaactgggacctgcctgaatccgcctccctcctgaacccccctcccgcctgaacccctggccagtcttgtgtcacacgcttacttccttagttttgtctttaaatcagccgttttacattggagtccatttactgggaaaggagaccttgcatccttgcctcccacccgtgggaagaagcccggccgacagggctttgagaccggacccgagtttattcccagagaccctcccgcgggtgggcgagctccgaggtctggagaagaggaggccccggcccgcaccctctagcacctgtgtccccttcgtcccggccacagatgcaggttctcccaagaggcgggtctgtacccgccccgcgcccccagcccagcgggcccggcctccgcccctgccccgcactcccacccccaccctcaggagagcgcggccctgctccccaccccgcgcggtctccccccaccgcctgcgaacccccatgcacgcgcggccccgccccgcgcactcaccaggcccggcagccgcgcggtcttagcggctcacgcgctcgggcccaggggcggggacgtggggacccgggcggccgctcagccgcggccgcgcggtgaatgagcccgttgtgcggccgccgcggccccagcgacaccccgcgcggggtctacaagggctgacgcgcccccgcggcttccgttcccgggctgggcggtggctcgtctgcgtctccggccctgggggtgggctgcgcgctccatctcgccggcccagtcccctccccagcgtcggtctctcaaggcccctcccaatgggggccaggcggagggtgggccctcgggcctgtggactgaccccggggttcctgggcctgggggcggggatccctgtcccgggctcccctcgctgcgaggctggccctgccagatgacactcagaggcgccttgggtgtcaggccagggacatctctgatgctggggctccccccgctagggtcaggggctgccgggctatcgccttggggttctgcagagaaaacctgaagcccagctgggtcttcactttcctccaggtcaccgtgccccgctactccaactccgtgggactttggaatgcaccttctgggcatttaattcttatccaagtgcctcttaagttatacttctttgctaccagtgtgtcctttggatggaggggaggagaggtggtaggggccgggtggggtggaccccagggactcctgctgctcctgctggacacccagcccggggtacaggagcaggtggggaccagcagaggcggggcggagcaggagcccacacccaaaggctgtagactcctgccaaggctctgccttgatcttgtacaccatgggaggaccagaagggaggcgttgaggtgtccagacctttgctgtggagctgggggtgctgtggcatggggagactgacagacggggagctgtatagggccagattccggtccatggtggtaaccccatcccccaccactgcagatgcggcacaaagccagctgccacaggaggtgcactgccccacgggcagctgtgctcacctgcgtggcgtccgcaggaagccctcagaccctggccagcctggtctctgcttctcactccaggctcaaggctggctgctattccattcaccccattccctttccctcaggccagaagcatcactcacaactccagacccttgcacaccaatctcctcactcagttcaccctcagatgtccaactccacatggccaaaaccgagaccagtctcactccaagctcatccacccgcctagctgcccaagctgaaatccacagttgccctgtacgaccccccgaccccccacctcaccccccagctcacctcaaacctcatcagtccctctgctcacagcctgcacagccaccacccagtctgggcaccatacctctctgggcaacccccatggcccccagccagtcttccagctcccaccctgactccagtgagctgccagagggatccttgaaaaatgctctggaagccaaggtgggcggatcacgaggtcaggaaatggaaaccatcctggctaacatggtgaaactccgtctctactaaaaatacaaaaaaattagccgggcgtggtggcgggcgcctgtagtcccagctactcaggaggctgaggcaggagaatggtgtgaacccgggagggggagcttgcagtgagccgagatcgcgccactgcaccccaggctgggcaacagagtgagactctgtctcaaaaaaaaaaaaaagaaaaaagaaaaatgccctggcactgctcagctcagaaccttgaaagggatccttgtttcgctctgggtcagggtcccatcctcaaagcagtcacttccagagccccatggagcctcatatcccatgatatccacccttattctgtctcaggcccaccagctgcctccctgctgcctgattgtcatgtgtgcattcctgttccagagcctttgcactggcgatgccatctgctgcctggatgtcttcctgctggctggtcccgttgcatggtagccttaggtgtctcctcagagaggtccctcgctgaccatcaggctcctcactccctgtcgtatccccttcaccaaagattcccattccctgacgacgcctgtcccctcggaatgcaggcctcgtgggaattcagcccatccgcaagtgcagtggcagggcggcccccttcccccttgacgacgcctgtccccttggaatgcaggcctcgtgggaattcagcccatctgcaagtgcagtggcagggcggcccccttctcccttgaggacgcctgtcccctcgtaatgcaggcctcgtgggaattcagcccatctgcaagtgcagtggcagggcggcccccttctcccttgaggacgcctgtcccctcgtaatgcaggcctcgtgggaattcagcccatctgcaagtgcagtggcagggcggcccccttctcccttgaggacgcctgtcccctcggaatgcaggcctcgtgggaattcagccccatctgcaagtgcagtggcagggcggcccccttctcccttgacgacgcctgtcccctcggaatgcaggcctcgtgggaattcagccccatcggcaagtgcagtggcagggcggcccccttcacccttgacgacgcctgtcccctcggaatgcaggcctcatgggaattcagcccatctgcaagtgcagtggcagggtggcccccttctccctttcctgtgcactcatgttgcctcttggggtgtgggaggggaaatggggcactcctgggcctccaggaggtgcagagaaccagggtgaggtgtccaccaggtcctgcctggctcctgacccctggcccctgctgctcgcgactggcctgcctcgtgccactgagcctcagagccattccgaacccccaccccaagttttccatctcttgatggtgtagggttggggggtctccatgtacagatactctagttcataccaggccttcatagggttattttccaaggggaagggcccctcgggaagccgggatcggagtcctgtgtggcaccttgcaggctcccacatgctccgttgtggccacggttccagcctggagcatggagctgtgtgggcaccctgcttcctgacgctgaccgtccttctgcagggggtccactggacggggcctgagctacaacttcacccacctggacgggtacctggaccttctcagggagaaccagctcctcccaggtgagctgtgggctctgccctcccagcccgcctgcacccccttgccctgcccaccctctccctcacccagcccctctgagtccttggatgtccattcagggctggccttggtgccggagcacaggcctggcagagcatgggtgtggtgtgtggtgggcggtggggcagccctcctgtgttccagggtttgagctgatgggcagcgcctcgggccacttcactgactttgaggacaagcagcaggtgtttgagtggaaggacttggtctccagcctggccaggagatacatcggtgggcgagcgcaggccctggggccctggccggggcgggggtactcctgggcaggttgcacccctatcacgcaggctgctgcctggtcaggagatacattggtgggcaggcgcaggcccttgtggggggatgggggtgacaagggataggttggtggtcggcgcaggccctggggccccaggctggggggtactcctgggcttggtgggtgggcgaaggccctgggcccctggggtggggggtactcctgggcaggctgcacccctatcacccaggccgcacccctatcacccaggccgccgcccaggtcttggacccccttgagccagcgcttcctgatgtggggcgggaggctggcctgcatggagatggggttcatcttgagtcagacgcccttcatcaccttgcaccctccctccgtgggagtcactgaggcgagattcacctgtgctggggggacagcaaggctcctctgcaggtaggtacggactggcgcatgtttccaagtggaacttcgagacgtggaatgagccagaccaccacgactttgacaacgtctccatgaccatgcaaggtgtgcaccgcttcctggggtcctgcccggctgaaagggggcagaggaaggcaggagcagaggctaagccgctcatccccagggcaggtgtagacgcagtgctcccccggcccaggcttcctgaactactacgatgcctgctcggagggtctgcgcgccgccagccccgccctgcggctgggaggccccggcgactccttccacaccccaccgcgatccccgctgagctggggcctcctgcgccactgccacgacggtaccaacttcttcactggggaggcgggcgtgcggctggactacatctccctccacaggaaggtgcgccctgcccctccgtccgccccggtgttctgcgccctcagccgctgtgccccgggccgcgctgaccctggtggtgctgaggcggccccgcccgcagggtgcgcgcagctccatctccatcctggagcaggagaaggtcgtcgcgcagcagatccggcagctcttccccaagttcgcggacacccccatttacaacgacgaggcggacccgctggtgggctggtccctgccacagccgtggagggcggacgtgacctacgcggccatggtggtgaaggtgggccggcccaacgccctgcgcgccccccggccaccttcctcccgagacgggacaggcgagcggtggccgcgccacccggtcccagctgccctggacacccgcaggtcatcgcgcagcatcagaacctgctactggccaacaccacctccgccttcccctacgcgctcctgagcaacgacaatgccttcctgagctaccacccgcaccccttcgcgcagcgcacgctcaccgcgcgcttccaggtcaacaacacccgcccgccgcacgtgcagctgttgcgcaagccggtgctcacggccatggggctgctggcgctgctgggtgagccggggccgctggggtgggccggccagggccctccaggctggggagcggctcctgcgaaggccccgctgcggggagcgcacttcctccagccgcgcgcttcccggggtcggcctccgcgtggcggggcctggggactccttcaccaaggggagggggagcgagtggtgggaggcccggccctgggtcggggggcggctgggcaacgaccccacgcggcgacggcccccccccgccccgcagatgaggagcagctctgggccgaagtgtcgcaggccgggaccgtcctggacagcaaccacacggtgggcgtcctggccagcgcccaccgcccccagggcccggccgacgcctggcgcgccgcggtgctgatctacgcgagcgacgacacccgcgcccaccccaaccgcagcgtcgcggtgaccctgcggctgcgcggggtgccccccggcccgggtaagccggggttccagggaggtctctggccccgctggggctctggagggggcggcccggggagccgaggcctgagtgtcaggccccgcaggcctggtctacgtcacgcgctacctggacaacgggctctgcagccccgacggcgagtggcggcgcctgggccggcccgtcttccccacggcagagcagttccggcgcatgcgcgcggctgaggtaggtgggccgcggaggggcgaggggccgggccgggccggggtcccgggggggtggggtccggggcgggggctccgaggcggtgtgggtgggaggtggagcggtgggccgggggcgttcgccctgaggtcgggccgagcgtccccagctcccctggagaaccctgaggaccggccactgcgcccaggacccggtggccgcggcgccccgccccttacccgccggcggccgcctgaccctgcgccccgcgctgcggctgccgtcgcttttgctggtgcacgtgtgtgcgcgccccgagaagccgcccgggcaggcaagtggcagtcccctaacccgcgccgcggcccggactccccttccccgacgccatcacagcccttccctcccccaggtcacgcggctccgcgccctgcccctgacccaagggcagctggttctggtctggtcggatgaacacgtgggctccaagtgcgtgagtggggccgcccctccctctgcctggtcctaggcaggtccctgggtcccgaccccttcacccatgcggtcactcgggccacttgccgtggcccatcggctccctccctcgccgccctgcgtccctgcccttcaccccacacactgtgggccacgcgccaggccctgccagtggggtgtgggttctcctaggggacatgagatggacattcgggctccagccctctcctgcctgggcaggaagagtgcccaggggctggggaggtgccgccgaggggcttgagggaatgaggctgtgggtccacgcggccgtgccctgcctgctcccacctttgaggactgtcttgaccccagccttgttcttggcctgacctccccaggtgcctgtggacatacgagatccagttctctcaggacggtaaggcgtacaccccggtcagcaggaagccatcgaccttcaacctctttgtgttcagcccaggtgcgcccaccacccgctgccctggactcggccaccccattcttgggcctcagggcagtactgggtgggggcctcgagaagcctggggtcagggggctttcgggtgggggcaggttccggttggcacacatgtccccttgtctccagacacaggtgctgtctctggctcctaccgagttcgagccctggactactgggcccgaccaggccccttctcggaccctgtgccgtacctggaggtccctgtgccaagagggcccccatccccgggcaatccatgagcctgtgctgagccccagtgggttgcacctccaccggcagtcagcgagctggggctgcactgtgcccatgctgccctcccatcaccccctttgcaatatatttttatatttt

SEQ ID NO: 12483 - DNA, 2185 bp, Homo sapiens
agtgcagcccgaagccccgcagtccccgagcacgcgtggccatgcgtcccctgcgcccccgcgccgcgctgctggcgctcctggcctcgctcctggccgcgcccccggtggccccggccgaggccccgcacctggtgcatgtggacgcggcccgcgcgctgtggcccctgcggcgcttctggaggagcacaggcttctgggggtccactggacggggcctgagctacaacttcacccacctggacgggtacctggaccttctcagggagaaccagctcctcccagggtttgagctgatgggcagcgcctcgggccacttcactgactttgaggacaagcagcaggtgtttgagtggaaggacttggtctccagcctggccaggagatacatcggtaggtacggactggcgcatgtttccaagtggaacttcgagacgtggaatgagccagaccaccacgactttgacaacgtctccatgaccatgcaaggcttcctgaactactacgatgcctgctcggagggtctgcgcgccgccagccccgccctgcggctgggaggccccggcgactccttccacaccccaccgcgatccccgctgagctggggcctcctgcgccactgccacgacggtaccaacttcttcactggggaggcgggcgtgcggctggactacatctccctccacaggaaggtgcgccctgcccctccgtccgccccggtgttctgcgccctcagccgctgtgccccgggccgcgctgaccctggtggtgctgaggcggccccgcccgcagggtgcgcgcagctccatctccatcctggagcaggagaaggtcgtcgcgcagcagatccggcagctcttccccaagttcgcggacacccccatttacaacgacgaggcggacccgctggtgggctggtccctgccacagccgtggagggcggacgtgacctacgcggccatggtggtgaaggtgggccggcccaacgccctgcgcgccccccggccaccttcctcccgagacgggacaggcgagcggtggccgcgccacccggtcccagctgccctggacacccgcaggtcatcgcgcagcatcagaacctgctactggccaacaccacctccgccttcccctacgcgctcctgagcaacgacaatgccttcctgagctaccacccgcaccccttcgcgcagcgcacgctcaccgcgcgcttccaggtcaacaacacccgcccgccgcacgtgcagctgttgcgcaagccggtgctcacggccatggggctgctggcgctgctggatgaggagcagctctgggccgaagtgtcgcaggccgggaccgtcctggacagcaaccacacggtgggcgtcctggccagcgcccaccgcccccagggcccggccgacgcctggcgcgccgcggtgctgatctacgcgagcgacgacacccgcgcccaccccaaccgcagcgtcgcggtgaccctgcggctgcgcggggtgccccccggcccgggcctggtctacgtcacgcgctacctggacaacgggctctgcagccccgacggcgagtggcggcgcctgggccggcccgtcttccccacggcagagcagttccggcgcatgcgcgcggctgaggacccggtggccgcggcgccccgccccttacccgccggcggccgcctgaccctgcgccccgcgctgcggctgccgtcgcttttgctggtgcacgtgtgtgcgcgccccgagaagccgcccgggcaggtcacgcggctccgcgccctgcccctgacccaagggcagctggttctggtctggtcggatgaacacgtgggctccaagtgcgtgcctgtggacatacgagatccagttctctcaggacggtaaggcgtacaccccggtcagcaggaagccatcgaccttcaacctctttgtgttcagcccagacacaggtgctgtctctggctcctaccgagttcgagccctggactactgggcccgaccaggccccttctcggaccctgtgccgtacctggaggtccctgtgccaagagggcccccatccccgggcaatccatgagcctgtgctgagccccagtgggttgcacctccaccggcagtcagcgagctggggctgcactgtgcccatgctgccctcccatcaccccctttgcaatatatttttatatttt

SEQ ID NO: 12484 - DNA, 4796 bp, Homo sapiens
agcccatctgcaagtgcagtggcagggcggcccccttctcccttgaggacgcctgtcccctcgtaatgcaggcctcgtgggaattcagcccatctgcaagtgcagtggcagggcggcccccttctcccttgaggacgcctgtcccctcgtaatgcaggcctcgtgggaattcagcccatctgcaagtgcagtggcagggcggcccccttctcccttgaggacgcctgtcccctcggaatgcaggcctcgtgggaattcagccccatctgcaagtgcagtggcagggcggcccccttctcccttgacgacgcctgtcccctcggaatgcaggcctcgtgggaattcagccccatcggcaagtgcagtggcagggcggcccccttcacccttgacgacgcctgtcccctcggaatgcaggcctcatgggaattcagcccatctgcaagtgcagtggcagggtggcccccttctccctttcctgtgcactcatgttgcctcttggggtgtgggaggggaaatggggcactcctgggcctccaggaggtgcagagaaccagggtgaggtgtccaccaggtcctgcctggctcctgacccctggcccctgctgctcgcgactggcctgcctcgtgccactgagcctcagagccattccgaacccccaccccaagttttccatctcttgatggtgtagggttggggggtctccatgtacagatactctagttcataccaggccttcatagggttattttccaaggggaagggcccctcgggaagccgggatcggagtcctgtgtggcaccttgcaggctcccacatgctccgttgtggccacggttccagcctggagcatggagctgtgtgggcaccctgcttcctgacgctgaccgtccttctgcagggggtccactggacggggcctgagctacaacttcacccacctggacgggtacctggaccttctcagggagaaccagctcctcccaggtgagctgtgggctctgccctcccagcccgcctgcacccccttgccctgcccaccctctccctcacccagcccctctgagtccttggatgtccattcagggctggccttggtgccggagcacaggcctggcagagcatgggtgtggtgtgtggtgggcggtggggcagccctcctgtgttccagggtttgagctgatgggcagcgcctcgggccacttcactgactttgaggacaagcagcaggtgtttgagtggaaggacttggtctccagcctggccaggagatacatcggtgggcgagcgcaggccctggggccctggccggggcgggggtactcctgggcaggttgcacccctatcacgcaggctgctgcctggtcaggagatacattggtgggcaggcgcaggcccttgtggggggatgggggtgacaagggataggttggtggtcggcgcaggccctggggccccaggctggggggtactcctgggcttggtgggtgggcgaaggccctgggcccctggggtggggggtactcctgggcaggctgcacccctatcacccaggccgcacccctatcacccaggccgccgcccaggtcttggacccccttgagccagcgcttcctgatgtggggcgggaggctggcctgcatggagatggggttcatcttgagtcagacgcccttcatcaccttgcaccctccctccgtgggagtcactgaggcgagattcacctgtgctggggggacagcaaggctcctctgcaggtaggtacggactggcgcatgtttccaagtggaacttcgagacgtggaatgagccagaccaccacgactttgacaacgtctccatgaccatgcaaggtgtgcaccgcttcctggggtcctgcccggctgaaagggggcagaggaaggcaggagcagaggctaagccgctcatccccagggcaggtgtagacgcagtgctcccccggcccaggcttcctgaactactacgatgcctgctcggagggtctgcgcgccgccagccccgccctgcggctgggaggccccggcgactccttccacaccccaccgcgatccccgctgagctggggcctcctgcgccactgccacgacggtaccaacttcttcactggggaggcgggcgtgcggctggactacatctccctccacaggaaggtgcgccctgcccctccgtccgccccggtgttctgcgccctcagccgctgtgccccgggccgcgctgaccctggtggtgctgaggcggccccgcccgcagggtgcgcgcagctccatctccatcctggagcaggagaaggtcgtcgcgcagcagatccggcagctcttccccaagttcgcggacacccccatttacaacgacgaggcggacccgctggtgggctggtccctgccacagccgtggagggcggacgtgacctacgcggccatggtggtgaaggtgggccggcccaacgccctgcgcgccccccggccaccttcctcccgagacgggacaggcgagcggtggccgcgccacccggtcccagctgccctggacacccgcaggtcatcgcgcagcatcagaacctgctactggccaacaccacctccgccttcccctacgcgctcctgagcaacgacaatgccttcctgagctaccacccgcaccccttcgcgcagcgcacgctcaccgcgcgcttccaggtcaacaacacccgcccgccgcacgtgcagctgttgcgcaagccggtgctcacggccatggggctgctggcgctgctgggtgagccggggccgctggggtgggccggccagggccctccaggctggggagcggctcctgcgaaggccccgctgcggggagcgcacttcctccagccgcgcgcttcccggggtcggcctccgcgtggcggggcctggggactccttcaccaaggggagggggagcgagtggtgggaggcccggccctgggtcggggggcggctgggcaacgaccccacgcggcgacggcccccccccgccccgcagatgaggagcagctctgggccgaagtgtcgcaggccgggaccgtcctggacagcaaccacacggtgggcgtcctggccagcgcccaccgcccccagggcccggccgacgcctggcgcgccgcggtgctgatctacgcgagcgacgacacccgcgcccaccccaaccgcagcgtcgcggtgaccctgcggctgcgcggggtgccccccggcccgggtaagccggggttccagggaggtctctggccccgctggggctctggagggggcggcccggggagccgaggcctgagtgtcaggccccgcaggcctggtctacgtcacgcgctacctggacaacgggctctgcagccccgacggcgagtggcggcgcctgggccggcccgtcttccccacggcagagcagttccggcgcatgcgcgcggctgaggtaggtgggccgcggaggggcgaggggccgggccgggccggggtcccgggggggtggggtccggggcgggggctccgaggcggtgtgggtgggaggtggagcggtgggccgggggcgttcgccctgaggtcgggccgagcgtccccagctcccctggagaaccctgaggaccggccactgcgcccaggacccggtggccgcggcgccccgccccttacccgccggcggccgcctgaccctgcgccccgcgctgcggctgccgtcgcttttgctggtgcacgtgtgtgcgcgccccgagaagccgcccgggcaggcaagtggcagtcccctaacccgcgccgcggcccggactccccttccccgacgccatcacagcccttccctcccccaggtcacgcggctccgcgccctgcccctgacccaagggcagctggttctggtctggtcggatgaacacgtgggctccaagtgcgtgagtggggccgcccctccctctgcctggtcctaggcaggtccctgggtcccgaccccttcacccatgcggtcactcgggccacttgccgtggcccatcggctccctccctcgccgccctgcgtccctgcccttcaccccacacactgtgggccacgcgccaggccctgccagtggggtgtgggttctcctaggggacatgagatggacattcgggctccagccctctcctgcctgggcaggaagagtgcccaggggctggggaggtgccgccgaggggcttgagggaatgaggctgtgggtccacgcggccgtgccctgcctgctcccacctttgaggactgtcttgaccccagccttgttcttggcctgacctccccaggtgcctgtggacatacgagatccagttctctcaggacggtaaggcgtacaccccggtcagcaggaagccatcgaccttcaacctctttgtgttcagcccaggtgcgcccaccacccgctgccctggactcggccaccccattcttgggcctcagggcagtactgggtgggggcctcgagaagcctggggtcagggggctttcgggtgggggcaggttccggttggcacacatgtccccttgtctccagacacaggtgctgtctctggctcctaccgagttcgagccctggactactgggcccgaccaggccccttctcggaccctgtgccgtacctggaggtccctgtgccaagagggcccccatccccgggcaatccatgagcctgtgctgagccccagtgggttgcacctccaccggcagtcagcgagctggggctgcactgtgcccatgctgccctcccatcaccccctttgcaatatatttttatatttt

SEQ ID NO: 12485 - DNA, 2130 bp, Homo sapiens
agcccatctgcaagtgcagtggcagggcggcccccttctcccttgaggacgcctgtcccctcgtaatgcaggcctcgtgggaattcagcccatctgcaagtgcagtggcagggcggcccccttctcccttgaggacgcctgtcccctcgtaatgcaggcctcgtgggaattcagcccatctgcaagtgcagtggcagggcggcccccttctcccttgaggacgcctgtcccctcggaatgcaggcctcgtgggaattcagccccatctgcaagtgcagtggcagggcggcccccttctcccttgacgacgcctgtcccctcggaatgcaggcctcgtgggaattcagccccatcgggggtccactggacggggcctgagctacaacttcacccacctggacgggtacctggaccttctcagggagaaccagctcctcccagggtttgagctgatgggcagcgcctcgggccacttcactgactttgaggacaagcagcaggtgtttgagtggaaggacttggtctccagcctggccaggagatacatcggtaggtacggactggcgcatgtttccaagtggaacttcgagacgtggaatgagccagaccaccacgactttgacaacgtctccatgaccatgcaaggcttcctgaactactacgatgcctgctcggagggtctgcgcgccgccagccccgccctgcggctgggaggccccggcgactccttccacaccccaccgcgatccccgctgagctggggcctcctgcgccactgccacgacggtaccaacttcttcactggggaggcgggcgtgcggctggactacatctccctccacaggaagggtgcgcgcagctccatctccatcctggagcaggagaaggtcgtcgcgcagcagatccggcagctcttccccaagttcgcggacacccccatttacaacgacgaggcggacccgctggtgggctggtccctgccacagccgtggagggcggacgtgacctacgcggccatggtggtgaaggtcatcgcgcagcatcagaacctgctactggccaacaccacctccgccttcccctacgcgctcctgagcaacgacaatgccttcctgagctaccacccgcaccccttcgcgcagcgcacgctcaccgcgcgcttccaggtcaacaacacccgcccgccgcacgtgcagctgttgcgcaagccggtgctcacggccatggggctgctggcgctgctggatgaggagcagctctgggccgaagtgtcgcaggccgggaccgtcctggacagcaaccacacggtgggcgtcctggccagcgcccaccgcccccagggcccggccgacgcctggcgcgccgcggtgctgatctacgcgagcgacgacacccgcgcccaccccaaccgcagcgtcgcggtgaccctgcggctgcgcggggtgccccccggcccgggcctggtctacgtcacgcgctacctggacaacgggctctgcagccccgacggcgagtggcggcgcctgggccggcccgtcttccccacggcagagcagttccggcgcatgcgcgcggctgaggacccggtggccgcggcgccccgccccttacccgccggcggccgcctgaccctgcgccccgcgctgcggctgccgtcgcttttgctggtgcacgtgtgtgcgcgccccgagaagccgcccgggcaggtcacgcggctccgcgccctgcccctgacccaagggcagctggttctggtctggtcggatgaacacgtgggctccaagtgcctgtggacatacgagatccagttctctcaggacggtaaggcgtacaccccggtcagcaggaagccatcgaccttcaacctctttgtgttcagcccagacacaggtgctgtctctggctcctaccgagttcgagccctggactactgggcccgaccaggccccttctcggaccctgtgccgtacctggaggtccctgtgccaagagggcccccatccccgggcaatccatgagcctgtgctgagccccagtgggttgcacctccaccggcagtcagcgagctggggctgcactgtgcccatgctgccctcccatcaccccctttgcaatatatttttatatttt

SEQ ID NO: 12486 - DNA, 4151 bp, Homo sapiens
ttttctggctttccctttcggacatgcgcgctcggagcaaggcgccctcgcactcagcttaccgcgcatgtacgttgccaggggtaacgcaggtagccaaagtggcttgtggagtggcgaccgttagtgaggcggttgctgagacagacgctgaggcgggtaggaggagcccgagccgtaagggaagccgtgatgagggccgtgttgacgtggagagataaagccgagcactgtataaatgacatcgcatttaagcctgatggaactcaactgattttggctgccggaagcagattactggtttatgacacctctgatggcaccttacttcagcccctcaagggacacaaagacactgtgtactgtgtggcatatgcgaaggatggcaagcgctttgcttctggatcagctgacaaaagcgttattatctggacatcaaaactggaaggcattctgaagtacacatcttggtctgtgatgtcttcattgcacctccatcttccatttctgggcctccacaaaacagtaagagtaacagccacagataaagcacctaaaggccaaggtgggaggattgattgcttgaggccaagcgttcaaaaccaacctggccaaaagcacaatgatgctatacaatgtgtctcctacaatcctattactcatcaactggcatcttgttcctccagtgactttgggttgtggtctcctgaacagaagtctgtctccaaacacaaatcaagcagcaagatcatctgctgcagctggacaaatgatggtcagtacctggcgctggggatgttcaatgggatcatcagcatacggaacaaaaatggcgaggagaaagtaaagatcgagcggccggggggctccctctcgccaatatggtccatctgctggaacccttcaagccgatgggagagtttctggatgaacagagagaatgaggatgccgaggatgtcattgtcaacagatatattcaggaaatcccttccactctgaagtcagcagtgtacagtagtcagggtagtgaggcagaggaggaagaaccagaggaagaggacgacagtcccagggacgacaacttagaggaacgtaatgacatcctggctgtggctgactggggacagaaagtttccttctaccagctgagtggaaaacagattggaaaggatcgggcactgaactttgacccctgctgcatcagctactttactaaaggcgagtacattttgctggggggttcagacaagcaagtatctcttttcaccaaggatggagtgcggcttgggactgttggggagcagaactcctgggtgtggacgtgtcaagcgaaaccggattccaactatgtggtggtcggctgccaggacggcaccatttccttctaccagcttattttcagcacagtccatgggctttacaaggaccgctatgcctacagggatagcatgactgacgtcattgtgcagcacctgatcactgagcagaaagttcggattaaatgcaaagagcttgtcaagaagattgccatctacagaaatcgattggctatccaactgccagagaaaatcctcatctatgagttgtattcagaggacttatcagacatgcattaccgggtaaaggagaagattatcaagaagtttgagtgcaacctcctggtggtgtgtgccaatcacatcatcctgtgccaggagaaacggctgcagtgcctgtccttcagcggagtgaaggagcgggagtggcagatggagtctctcattcgttacatcaaggtgatcggtggccctcctggaagagaaggcctcttagtggggctgaagaatggacagatcctgaagatcttcgtggacaatctctttgctatcgtcctgctgaagcaggccacagctgtgcgctgcttggacatgagtgcctcccgtaagaagctggccgtggtagatgaaaatgacacttgcctggtgtatgacatcgacaccaaggagctgctttttcaggaaccaaacgccaacagtgtagcttggaacacccagtgtgaggacatgctctgcttctcgggaggaggctacctcaacatcaaagccagcaccttccctgtgcaccggcagaagctgcagggctttgtggtcggctacaatggctccaagatcttctgcctccatgtcttctccatttctgccgtggaggtgccgcagtccgctcccatgtaccagtacctggataggaaactgttcaaggaagcctaccagattgcttgcttgggtgtcacagacactgattggcgtgaactggccatggaagcgctagaaggtttagattttgaaacagcaaagaaggccttcatcagagtacaagacctccgatatttagagctcatcagcagcattgaggagaggaagaagcggggagagaccaacaatgacctgtttctggcagatgtgttttcctaccaggggaagttccatgaggccgccaaactgtacaagaggagtgggcacgagaacctcgcgcttgaaatgtacaccgacctctgcatgtttgagtatgccaaggatttccttggatctggagaccccaaagaaacaaagatgctaatcaccaaacaggctgactgggccagaaatatcaaggagcccaaagccgccgtggagatgtacatctcagcaggagagcacgtcaaggccatcgagatctgtggtgaccatggctgggttgacatgttgatcgacatcgcccgcaaactggacaaggctgagcgcgagcccctgctgctgtgcgctacctacctcaagaagctggacagccctggctatgctgctgagacctacctgaagatgggtgacctcaagtccctggtgcagctgcacgtggagacccagcgctgggatgaggcctttgctttgggtgagaagcatcctgagtttaaggatgacatctacatgccgtatgctcagtggctagcagagaacgatcgctttgaggaagcccagaaagcgttccacaaggctgggcgacagagagaagcggtccaggtgctggagcagctcacaaacaatgccgtggcggagagcaggtttaatgatgctgcctattattactggatgctgtccatgcagtgcctcgatatagctcaagatcctgcccagaaggacacaatgcttggcaagttctaccacttccagcgtttggcagagctgtaccatggttaccatgccatccatcgccacacggaagatccgttcagtgtccatcgtcctgaaactcttttcaacatctccaggttcctgctgcacagcctgcccaaggacaccccctcgggcatctctaaagtgaaaatactcttcaccttggccaagcagagcaaggccctcggtgcctacaggctggcccggcacgcctatgacaagctgcgtggcctgtacatccctgccagattccaaaagtccattgagctgggtaccctgaccatccgcgccaagcccttccacgacagtgaggagttggtgcccttgtgctaccgctgctccaccaacaacccgctgctcaacaacctgggcaacgtctgcatcaactgccgccagcccttcatcttctccgcctcttcctacgacgtgctacacctggttgagttctacctggaggaagggatcactgatgaagaagccatctccctcatcgacctggaggtgctgagacccaagcgggatgacagacagctagagattgcaaacaacagctcccagattctgcggctagtggagaccaaggactccatcggagatgaggacccgttcacagctaagctgagctttgagcaaggtggctcagagttcgtgccagtggtggtgagccggctggtgctgcgctccatgagccgccgggatgtcctcatcaagcgatggcccccacccctgaggtggcaatacttccgctcactgctgcctgacgcctccattaccatgtgcccctcctgcttccagatgttccattctgaggactatgagttgctggtgcttcagcatggctgctgcccctactgccgcaggtgcaaggatgaccctggcccatgaccagcatcctggggacggcctgcaccctctgcccgccttggggtctgctgggctgtgaaggagaataaagagttaaactg

SEQ ID NO: 12487 - DNA, 3841 bp, Homo sapiens
attgcttttgctgcttttctggctttccctttcggacatgcgcgctcggagcaaggcgccctcgcactcagcttaccgcgcatgtacgttgccaggggtaacgcaggtagccaaagtggcttgtggagtggcgaccgttagtgaggcggttgctgagacagacgctgaggcgggtaggaggagcccgagccgtaagggaagccgtgatgagggccgtgttgacgtggagagataaagccgagcactgtataaatgacatcgcatttaagcctgatggaactcaactgattttggctgccggaagcagattactggtttatgacacctctgatggcaccttacttcagcccctcaagggacacaaagacactgtgtactgtgtggcatatgcgaaggatggcaagcgctttgcttctggatcagctgacaaaagcgttattatctggacatcaaaactggaaggcattctgaagtacacgcacaatgatgctatacaatgtgtctcctacaatcctattactcatcaactggcatcttgttcctccagtgactttgggttgtggtctcctgaacagaagtctgtctccaaacacaaatcaagcagcaagatcatctgctgcagctggacaaatgatggtcagtacctggcgctggggatgttcaatgggatcatcagcatacggaacaaaaatggcgaggagaaagtaaagatcgagcggccggggggctccctctcgccaatatggtccatctgctggaacccttcaagagaggaacgtaatgacatcctggctgtggctgactggggacagaaagtttccttctaccagctgagtggaaaacagattggaaaggatcgggcactgaactttgacccctgctgcatcagctactttactaaaggcgagtacattttgctggggggttcagacaagcaagtatctcttttcaccaaggatggagtgcggcttgggactgttggggagcagaactcctgggtgtggacgtgtcaagcgaaaccggattccaactatgtggtggtcggctgccaggacggcaccatttccttctaccagcttattttcagcacagtccatgggctttacaaggaccgctatgcctacagggatagcatgactgacgtcattgtgcagcacctgatcactgagcagaaagttcggattaaatgcaaagagcttgtcaagaagattgccatctacagaaatcgattggctatccaactgccagagaaaatcctcatctatgagttgtattcagaggacttatcagacatgcattaccgggtaaaggagaagattatcaagaagtttgagtgcaacctcctggtggtgtgtgccaatcacatcatcctgtgccaggagaaacggctgcagtgcctgtccttcagcggagtgaaggagcgggagtggcagatggagtctctcattcgttacatcaaggtgatcggtggccctcctggaagagaaggcctcttagtggggctgaagaatggacagatcctgaagatcttcgtggacaatctctttgctatcgtcctgctgaagcaggccacagctgtgcgctgcttggacatgagtgcctcccgtaagaagctggccgtggtagatgaaaatgacacttgcctggtgtatgacatcgacaccaaggagctgctttttcaggaaccaaacgccaacagtgtagcttggaacacccagtgtgaggacatgctctgcttctcgggaggaggctacctcaacatcaaagccagcaccttccctgtgcaccggcagaagctgcagggctttgtggtcggctacaatggctccaagatcttctgcctccatgtcttctccatttctgccgtggaggtgccgcagtccgctcccatgtaccagtacctggataggaaactgttcaaggaagcctaccagattgcttgcttgggtgtcacagacactgattggcgtgaactggccatggaagcgctagaaggtttagattttgaaacagcaaagaaggccttcatcagagtacaagacctccgatatttagagctcatcagcagcattgaggagaggaagaagcggggagagaccaacaatgacctgtttctggcagatgtgttttcctaccaggggaagttccatgaggccgccaaactgtacaagaggagtgggcacgagaacctcgcgcttgaaatgtacaccgacctctgcatgtttgagtatgccaaggatttccttggatctggagaccccaaagaaacaaagatgctaatcaccaaacaggctgactgggccagaaatatcaaggagcccaaagccgccgtggagatgtacatctcagcaggagagcacgtcaaggccatcgagatctgtggtgaccatggctgggttgacatgttgatcgacatcgcccgcaaactggacaaggctgagcgcgagcccctgctgctgtgcgctacctacctcaagaagctggacagccctggctatgctgctgagacctacctgaagatgggtgacctcaagtccctggtgcagctgcacgtggagacccagcgctgggatgaggcctttgctttgggtgagaagcatcctgagtttaaggatgacatctacatgccgtatgctcagtggctagcagagaacgatcgctttgaggaagcccagaaagcgttccacaaggctgggcgacagagagaagcggtccaggtgctggagcagctcacaaacaatgccgtggcggagagcaggtttaatgatgctgcctattattactggatgctgtccatgcagtgcctcgatatagctcaagatcctgcccagaaggacacaatgcttggcaagttctaccacttccagcgtttggcagagctgtaccatggttaccatgccatccatcgccacacggaagatccgttcagtgtccatcgtcctgaaactcttttcaacatctccaggttcctgctgcacagcctgcccaaggacaccccctcgggcatctctaaagtgaaaatactcttcaccttggccaagcagagcaaggccctcggtgcctacaggctggcccggcacgcctatgacaagctgcgtggcctgtacatccctgccagattccaaaagtccattgagctgggtaccctgaccatccgcgccaagcccttccacgacagtgaggagttggtgcccttgtgctaccgctgctccaccaacaacccgctgctcaacaacctgggcaacgtctgcatcaactgccgccagcccttcatcttctccgcctcttcctacgacgtgctacacctggttgagttctacctggaggaagggatcactgatgaagaagccatctccctcatcgacctggaggtgctgagacccaagcgggatgacagacagctagagattgcaaacaacagctcccagattctgcggctagtggagaccaaggactccatcggagatgaggacccgttcacagctaagctgagctttgagcaaggtggctcagagttcgtgccagtggtggtgagccggctggtgctgcgctccatgagccgccgggatgtcctcatcaagcgatggcccccacccctgaggtggcaatacttccgctcactgctgcctgacgcctccattaccatgtgcccctcctgcttccagatgttccattctgaggactatgagttgctggtgcttcagcatggctgctgcccctactgccgcaggtgcaaggatgaccctggcccatgaccagcatcctggggacggcctgcaccctctgcccgccttggggtctgctgggctgtgaaggagaataaagagttaaactgtcagaa

SEQ ID NO: 12488 - DNA, 3877 bp, Homo sapiens
ggcgaccgttagtgaggcggttgctgagacagacgctgaggcgggtaggaggagcccgagccgtaagggaagccgtgatgagggccgtgttgacgtggagagataaagccgagcactgtataaatgacatcgcatttaagcctgatggaactcaactgattttggctgccggaagcagattactggtttatgacacctctgatggcaccttacttcagcccctcaagggacacaaagacactgtgtactgtgtggcatatgcgaaggatggcaagcgctttgcttctggatcagctgacaaaagcgttattatctggacatcaaaactggaaggcattctgaagtacacgcacaatgatgctatacaatgtgtctcctacaatcctattactcatcaactggcatcttgttcctccagtgactttgggttgtggtctcctgaacagaagtctgtctccaaacacaaatcaagcagcaagatcatctgctgcagctggacaaatgatggtcagtacctggcgctggggatgttcaatgggatcatcagcatacggaacaaaaatggcgaggagaaagtaaagatcgagcggccggggggctccctctcgccaatatggtccatctgctggaacccttcaagccgatgggagagtttctggatgaacagagagaatgaggatgccgaggatgtcattgtcaacagatatattcaggaaatcccttccactctgaagtcagcagtgtacagtagtcagggtagtgaggcagaggaggaagaaccagaggaagaggacgacagtcccagggacgacaacttagaggaacgtaatgacatcctggctgtggctgactggggacagaaagtttccttctaccagctgagtggaaaacagattggaaaggatcgggcactgaactttgacccctgctgcatcagctactttactaaaggcgagtacattttgctggggggttcagacaagcaagtatctcttttcaccaaggatggagtgcggcttgggactgttggggagcagaactcctgggtgtggacgtgtcaagcgaaaccggattccaactatgtggtggtcggctgccaggacggcaccatttccttctaccagcttattttcagcacagtccatgggctttacaaggaccgctatgcctacagggatagcatgactgacgtcattgtgcagcacctgatcactgagcagaaagttcggattaaatgcaaagagcttgtcaagaagattgccatctacagaaatcgattggctatccaactgccagagaaaatcctcatctatgagttgtattcagaggacttatcagacatgcattaccgggtaaaggagaagattatcaagaagtttgagtgcaacctcctggtggtgtgtgccaatcacatcatcctgtgccaggagaaacggctgcagtgcctgtccttcagcggagtgaaggagcgggagtggcagatggagtctctcattcgttacatcaaggtgatcggtggccctcctggaagagaaggcctcttagtggggctgaagaatggacagatcctgaagatcttcgtggacaatctctttgctatcgtcctgctgaagcaggccacagctgtgcgctgcttggacatgagtgcctcccgtaagaagctggccgtggtagatgaaaatgacacttgcctggtgtatgacatcgacaccaaggagctgctttttcaggaaccaaacgccaacagtgtagcttggaacacccagtgtgaggacatgctctgcttctcgggaggaggctacctcaacatcaaagccagcaccttccctgtgcaccggcagaagctgcagggctttgtggtcggctacaatggctccaagatcttctgcctccatgtcttctccatttctgccgtggaggtgccgcagtccgctcccatgtaccagtacctggataggaaactgttcaaggaagcctaccagattgcttgcttgggtgtcacagacactgattggcgtgaactggccatggaagcgctagaaggtttagattttgaaacagcaaagaaggccttcatcagagtacaagacctccgatatttagagctcatcagcagcattgaggagaggaagaagcggggagagaccaacaatgacctgtttctggcagatgtgttttcctaccaggggaagttccatgaggccgccaaactgtacaagaggagtgggcacgagaacctcgcgcttgaaatgtacaccgacctctgcatgtttgagtatgccaaggatttccttggatctggagaccccaaagaaacaaagatgctaatcaccaaacaggctgactgggccagaaatatcaaggagcccaaagccgccgtggagatgtacatctcagcaggagagcacgtcaaggccatcgagatctgtggtgaccatggctgggttgacatgttgatcgacatcgcccgcaaactggacaaggctgagcgcgagcccctgctgctgtgcgctacctacctcaagaagctggacagccctggctatgctgctgagacctacctgaagatgggtgacctcaagtccctggtgcagctgcacgtggagacccagcgctgggatgaggcctttgctttgggtgagaagcatcctgagtttaaggatgacatctacatgccgtatgctcagtggctagcagagaacgatcgctttgaggaagcccagaaagcgttccacaaggctgggcgacagagagaagcggtccaggtgctggagcagctcacaaacaatgccgtggcggagagcaggtttaatgatgctgcctattattactggatgctgtccatgcagtgcctcgatatagctcaagatcctgcccagaaggacacaatgcttggcaagttctaccacttccagcgtttggcagagctgtaccatggttaccatgccatccatcgccacacggaagatccgttcagtgtccatcgtcctgaaactcttttcaacatctccaggttcctgctgcacagcctgcccaaggacaccccctcgggcatctctaaagtgaaaatactcttcaccttggccaagcagagcaaggccctcggtgcctacaggctggcccggcacgcctatgacaagctgcgtggcctgtacatccctgccagattccaaaagtccattgagctgggtaccctgaccatccgcgccaagcccttccacgacagtgaggagttggtgcccttgtgctaccgctgctccaccaacaacccgctgctcaacaacctgggcaacgtctgcatcaactgccgccagcccttcatcttctccgcctcttcctacgacgtgctacacctggttgagttctacctggaggaagggatcactgatgaagaagccatctccctcatcgacctggaggtgctgagacccaagcgggatgacagacagctagagattgcaaacaacagctcccagattctgcggctagtggagaccaaggactccatcggagatgaggacccgttcacagctaagctgagctttgagcaaggtggctcagagttcgtgccagtggtggtgagccggctggtgctgcgctccatgagccgccgggatgtcctcatcaagcgatggcccccacccctgaggtggcaatacttccgctcactgctgcctgacgcctccattaccatgtgcccctcctgcttccagatgttccattctgaggactatgagttgctggtgcttcagcatggctgctgcccctactgccgcaggtgcaaggatgaccctggcccatgaccagcatcctggggacggcctgcaccctctgcccgccttggggtctgctgggctgtgaaggagaataaagagtt

SEQ ID NO: 12489 - DNA, 3569 bp, Homo sapiens
cttgtggagtggcgaccgttagtgaggcggttgctgagacagacgctgaggcgggtaggaggagcccgagccgtaagggaagccgtgatgagggccgtgttgacgtggagagataaagccgagcactgtataaatgacatcgcatttaagcctgatggaactcaactgattttggctgccggaagcagattactggtttatgacacctctgatggcaccttacttcagcccctcaagggacacaaagacactgtgtactgtgtggcatatgcgaaggatgggttgtggtctcctgaacagaagtctgtctccaaacacaaatcaagcagcaagatcatctgctgcagctggacaaatgatggtcagtacctggcgctggggatgttcaatgggatcatcagcatacggaacaaaaatggcgaggagaaagtaaagatcgagcggccggggggctccctctcgccaatatggtccatctgctggaacccttcaagagaggaacgtaatgacatcctggctgtggctgactggggacagaaagtttccttctaccagctgagtggaaaacagattggaaaggatcgggcactgaactttgacccctgctgcatcagctactttactaaaggcgagtacattttgctggggggttcagacaagcaagtatctcttttcaccaaggatggagtgcggcttgggactgttggggagcagaactcctgggtgtggacgtgtcaagcgaaaccggattccaactatgtggtggtcggctgccaggacggcaccatttccttctaccagcttattttcagcacagtccatgggctttacaaggaccgctatgcctacagggatagcatgactgacgtcattgtgcagcacctgatcactgagcagaaagttcggattaaatgcaaagagcttgtcaagaagattgccatctacagaaatcgattggctatccaactgccagagaaaatcctcatctatgagttgtattcagaggacttatcagacatgcattaccgggtaaaggagaagattatcaagaagtttgagtgcaacctcctggtggtgtgtgccaatcacatcatcctgtgccaggagaaacggctgcagtgcctgtccttcagcggagtgaaggagcgggagtggcagatggagtctctcattcgttacatcaaggtgatcggtggccctcctggaagagaaggcctcttagtggggctgaagaatggacagatcctgaagatcttcgtggacaatctctttgctatcgtcctgctgaagcaggccacagctgtgcgctgcttggacatgagtgcctcccgtaagaagctggccgtggtagatgaaaatgacacttgcctggtgtatgacatcgacaccaaggagctgctttttcaggaaccaaacgccaacagtgtagcttggaacacccagtgtgaggacatgctctgcttctcgggaggaggctacctcaacatcaaagccagcaccttccctgtgcaccggcagaagctgcagggctttgtggtcggctacaatggctccaagatcttctgcctccatgtcttctccatttctgccgtggaggtgccgcagtccgctcccatgtaccagtacctggataggaaactgttcaaggaagcctaccagattgcttgcttgggtgtcacagacactgattggcgtgaactggccatggaagcgctagaaggtttagattttgaaacagcaaagaaggccttcatcagagtacaagacctccgatatttagagctcatcagcagcattgaggagaggaagaagcggggagagaccaacaatgacctgtttctggcagatgtgttttcctaccaggggaagttccatgaggccgccaaactgtacaagaggagtgggcacgagaacctcgcgcttgaaatgtacaccgacctctgcatgtttgagtatgccaaggatttccttggatctggagaccccaaagaaacaaagatgctaatcaccaaacaggctgactgggccagaaatatcaaggagcccaaagccgccgtggagatgtacatctcagcaggagagcacgtcaaggccatcgagatctgtggtgaccatggctgggttgacatgttgatcgacatcgcccgcaaactggacaaggctgagcgcgagcccctgctgctgtgcgctacctacctcaagaagctggacagccctggctatgctgctgagacctacctgaagatgggtgacctcaagtccctggtgcagctgcacgtggagacccagcgctgggatgaggcctttgctttgggtgagaagcatcctgagtttaaggatgacatctacatgccgtatgctcagtggctagcagagaacgatcgctttgaggaagcccagaaagcgttccacaaggctgggcgacagagagaagcggtccaggtgctggagcagctcacaaacaatgccgtggcggagagcaggtttaatgatgctgcctattattactggatgctgtccatgcagtgcctcgatatagctcaagcagatcctgcccagaaggacacaatgcttggcaagttctaccacttccagcgtttggcagagctgtaccatggttaccatgccatccatcgccacacggaagatccgttcagtgtccatcgtcctgaaactcttttcaacatctccaggttcctgctgcacagcctgcccaaggacaccccctcgggcatctctaaagtgaaaatactcttcaccttggccaagcagagcaaggccctcggtgcctacaggctggcccggcacgcctatgacaagctgcgtggcctgtacatccctgccagattccaaaagtccattgagctgggtaccctgaccatccgcgccaagcccttccacgacagtgaggagttggtgcccttgtgctaccgctgctccaccaacaacccgctgctcaacaacctgggcaacgtctgcatcaactgccgccagcccttcatcttctccgcctcttcctacgacgtgctacacctggttgagttctacctggaggaagggatcactgatgaagaagccatctccctcatcgacctggaggtgctgagacccaagcgggatgacagacagctagagattgcaaacaacagctcccagattctgcggctagtggagaccaaggactccatcggagatgaggacccgttcacagctaagctgagctttgagcaaggtggctcagagttcgtgccagtggtggtgagccggctggtgctgcgctccatgagccgccgggatgtcctcatcaagcgatggcccccacccctgaggtggcaatacttccgctcactgctgcctgacgcctccattaccatgtgcccctcctgcttccagatgttccattctgaggactatgagttgctggtgcttcagcatggctgctgcccctactgccgcaggtgcaaggatgaccctggcccatgaccagcatcctggggacggcctgcaccctctgcccgccttggggtctgctgggctgtgaaggagaataaagagttaaactgtcagaa

SEQ ID NO: 12490 - DNA, 4414 bp, Homo sapiens
attctcgaggaagacgcaccgcccccacacgccccgaccaatcgctcgcgctctggttgcgctggcgccttaggggctccagtgccaccattgcttttgctgcttttctggctttccctttcggacatgcgcgctcggagcaaggcgccctcgcactcagcttaccgcgcatgtacgttgccaggggtaacgcaggtagccaaagtggcttgtggagtggcgaccgttagtgaggcggttgctgagacagacgctgaggcgggtaggaggagcccgagccgtaagggaagccgtgatgagggccgtgttgacgtggagagataaagccgagcactgtataaatgacatcgcatttaagcctgatggaactcaactgattttggctgccggaagcagattactggtttatgacacctctgatggcaccttacttcagcccctcaagggacacaaagacactgtgtactgtgtggcatatgcgaaggatggaaatgaaagctcttcagtagcttgtttgggtcatgcagctggtcagtgagatctctaggaattctgacccagagactctgagcccaaagcttatgcttttcatcaccatcacctgctacctaccaggatgagggaggagtgatggaaatagcaagcgctttgcttctggatcagctgacaaaagcgttattatctggacatcaaaactggaaggcattctgaagtacacgcacaatgatgctatacaatgtgtctcctacaatcctattactcatcaactggcatcttgttcctccagtgactttgggttgtggtctcctgaacagaagtctgtctccaaacacaaatcaagcagcaagatcatctgctgcagctggacaaatgatggtcagtacctggcgctggggatgttcaatgggatcatcagcatacggaacaaaaatggcgaggagaaagtaaagatcgagcggccggggggctccctctcgccaatatggtccatctgctggaacccttcaagccgatgggagagtttctggatgaacagagagaatgaggatgccgaggatgtcattgtcaacagatatattcaggaaatcccttccactctgaagtcagcagtgtacagtagtcagggtagtgaggcagaggaggaagaaccagaggaagaggacgacagtcccagggacgacaacttagaggaacgtaatgacatcctggctgtggctgactggggacagaaagtttccttctaccagctgagtggaaaacagattggaaaggatcgggcactgaactttgacccctgctgcatcagctactttactaaaggcgagtacattttgctggggggttcagacaagcaagtatctcttttcaccaaggatggagtgcggcttgggactgttggggagcagaactcctgggtgtggacgtgtcaagcgaaaccggattccaactatgtggtggtcggctgccaggacggcaccatttccttctaccagcttattttcagcacagtccatgggctttacaaggaccgctatgcctacagggatagcatgactgacgtcattgtgcagcacctgatcactgagcagaaagttcggattaaatgcaaagagcttgtcaagaagattgccatctacagaaatcgattggctatccaactgccagagaaaatcctcatctatgagttgtattcagaggacttatcagacatgcattaccgggtaaaggagaagattatcaagaagtttgagtgcaacctcctggtggtgtgtgccaatcacatcatcctgtgccaggagaaacggctgcagtgcctgtccttcagcggagtgaaggagcgggagtggcagatggagtctctcattcgttacatcaaggtgatcggtggccctcctggaagagaaggcctcttagtggggctgaagaatggacagatcctgaagatcttcgtggacaatctctttgctatcgtcctgctgaagcaggccacagctgtgcgctgcttggacatgagtgcctcccgtaagaagctggccgtggtagatgaaaatgacacttgcctggtgtatgacatcgacaccaaggagctgctttttcaggaaccaaacgccaacagtgtagcttggaacacccagtgtgaggacatgctctgcttctcgggaggaggctacctcaacatcaaagccagcaccttccctgtgcaccggcagaagctgcagggctttgtggtcggctacaatggctccaagatcttctgcctccatgtcttctccatttctgccgtggaggtgccgcagtccgctcccatgtaccagtacctggataggaaactgttcaaggaagcctaccagattgcttgcttgggtgtcacagacactgattggcgtgaactggccatggaagcgctagaaggtttagattttgaaacagcaaagaaggccttcatcagagtacaagacctccgatatttagagctcatcagcagcattgaggagaggaagaagcggggagagaccaacaatgacctgtttctggcagatgtgttttcctaccaggggaagttccatgaggccgccaaactgtacaagaggagtgggcacgagaacctcgcgcttgaaatgtacaccgacctctgcatgtttgagtatgccaaggatttccttggatctggagaccccaaagaaacaaagatgctaatcaccaaacaggctgactgggccagaaatatcaaggagcccaaagccgccgtggagatgtacatctcagcaggagagcacgtcaaggccatcgagatctgtggtgaccatggctgggttgacatgttgatcgacatcgcccgcaaactggacaaggctgagcgcgagcccctgctgctgtgcgctacctacctcaagaagctggacagccctggctatgctgctgagacctacctgaagatgggtgacctcaagtccctggtgcagctgcacgtggagacccagcgctgggatgaggcctttgctttgggtgagaagcatcctgagtttaaggatgacatctacatgccgtatgctcagtggctagcagagaacgatcgctttgaggaagcccagaaagcgttccacaaggctgggcgacagagagaagcggtccaggtgctggagcagctcacaaacaatgccgtggcggagagcaggtttaatgatgctgcctattattactggatgctgtccatgcagtgcctcgatatagctcaagatcctgcccagaaggacacaatgcttggcaagttctaccacttccagcgtttggcagagctgtaccatggttaccatgccatccatcgccacacggaagatccgttcagtgtccatcgtcctgaaactcttttcaacatctccaggttcctgctgcacagcctgcccaaggacaccccctcgggcatctctaaagtgaaaatactcttcaccttggccaagcagagcaaggccctcggtgcctacaggctggcccggcacgcctatgacaagctgcgtggcctgtacatccctgccagattccaaaagtccattgagctgggtaccctgaccatccgcgccaagcccttccacgacagtgaggagttggtgcccttgtgctaccgctgctccaccaacaacccgctgctcaacaacctgggcaacgtctgcatcaactgccgccagcccttcatcttctccgcctcttcctacgacgtgctacacctggttgagttctacctggaggaagggatcactgatgaagaagccatctccctcatcgacctggaggtgctgagacccaagcgggatgacagacagctagagattgcaaacaacagctcccagattctgcggctagtggagaccaaggactccatcggagatgaggacccgttcacagctaagctgagctttgagcaaggtggctcagagttcgtgccagtggtggtgagccggctggtgctgcgctccatgagccgccgggatgtcctcatcaagcgatggcccccacccctgaggtggcaatacttccgctcactgctgcctgacgcctccattaccatgtgcccctcctgcttccagatgttccattctgaggactatgagttgctggtgcttcagcatggctgctgcccctactgccgcaggtgcaaggatgaccctggcccatgaccagcatcctggggacggcctgcaccctctgcccgccttggggtctgctgggctgtgaaggagaataaagagttaaactgtcagaatgtgtttcttgcccagatgaagtttgtgttttgtggggggggccttgtgtaaccacggaattcctatttatggcatttcatgccttgtaaatagcaccaggagatgaggaagagaatgtacatatattttctaaggaaaaaaatctgttactttca

SEQ ID NO: 12491 - DNA, 4007 bp, Homo sapiens
attctcgaggaagacgcaccgcccccacacgccccgaccaatcgctcgcgctctggttgcgctggcgccttaggggctccagtgccaccattgcttttgctgcttttctggctttccctttcggacatgcgcgctcggagcaaggcgccctcgcactcagcttaccgcgcatgtacgttgccaggggtaacgcaggtagccaaagtggcttgtggagtggcgaccgttagtgaggcggttgctgagacagacgctgaggcgggtaggaggagcccgagccgtaagggaagccgtgatgagggccgtgttgacgtggagagataaagccgagcactgtataaatgacatcgcatttaagcctgatggaactcaactgattttggctgccggaagcagattactggtttatgacacctctgatggcaccttacttcagcccctcaagggacacaaagacactgtgtactgtgtggcatatgcgaaggatggcacaatgatgctatacaatgtgtctcctacaatcctattactcatcaactggcatcttgttcctccagtgactttgggttgtggtctcctgaacagaagtctgtctccaaacacaaatcaagcagcaagatcatctgctgcagctggacaaatgatggtcagtacctggcgctggggatgttcaatgggatcatcagcatacggaacaaaaatggcgaggagaaagtaaagatcgagcggccggggggctccctctcgccaatatggtccatctgctggaacccttcaagagaggaacgtaatgacatcctggctgtggctgactggggacagaaagtttccttctaccagctgagtggaaaacagattggaaaggatcgggcactgaactttgacccctgctgcatcagctactttactaaaggcgagtacattttgctggggggttcagacaagcaagtatctcttttcaccaaggatggagtgcggcttgggactgttggggagcagaactcctgggtgtggacgtgtcaagcgaaaccggattccaactatgtggtggtcggctgccaggacggcaccatttccttctaccagcttattttcagcacagtccatgggctttacaaggaccgctatgcctacagggatagcatgactgacgtcattgtgcagcacctgatcactgagcagaaagttcggattaaatgcaaagagcttgtcaagaagattgccatctacagaaatcgattggctatccaactgccagagaaaatcctcatctatgagttgtattcagaggacttatcagacatgcattaccgggtaaaggagaagattatcaagaagtttgagtgcaacctcctggtggtgtgtgccaatcacatcatcctgtgccaggagaaacggctgcagtgcctgtccttcagcggagtgaaggagcgggagtggcagatggagtctctcattcgttacatcaaggtgatcggtggccctcctggaagagaaggcctcttagtggggctgaagaatggacagatcctgaagatcttcgtggacaatctctttgctatcgtcctgctgaagcaggccacagctgtgcgctgcttggacatgagtgcctcccgtaagaagctggccgtggtagatgaaaatgacacttgcctggtgtatgacatcgacaccaaggagctgctttttcaggaaccaaacgccaacagtgtagcttggaacacccagtgtgaggacatgctctgcttctcgggaggaggctacctcaacatcaaagccagcaccttccctgtgcaccggcagaagctgcagggctttgtggtcggctacaatggctccaagatcttctgcctccatgtcttctccatttctgccgtggaggtgccgcagtccgctcccatgtaccagtacctggataggaaactgttcaaggaagcctaccagattgcttgcttgggtgtcacagacactgattggcgtgaactggccatggaagcgctagaaggtttagattttgaaacagcaaagaaggccttcatcagagtacaagacctccgatatttagagctcatcagcagcattgaggagaggaagaagcggggagagaccaacaatgacctgtttctggcagatgtgttttcctaccaggggaagttccatgaggccgccaaactgtacaagaggagtgggcacgagaacctcgcgcttgaaatgtacaccgacctctgcatgtttgagtatgccaaggatttccttggatctggagaccccaaagaaacaaagatgctaatcaccaaacaggctgactgggccagaaatatcaaggagcccaaagccgccgtggagatgtacatctcagcaggagagcacgtcaaggccatcgagatctgtggtgaccatggctgggttgacatgttgatcgacatcgcccgcaaactggacaaggctgagcgcgagcccctgctgctgtgcgctacctacctcaagaagctggacagccctggctatgctgctgagacctacctgaagatgggtgacctcaagtccctggtgcagctgcacgtggagacccagcgctgggatgaggcctttgctttgggtgagaagcatcctgagtttaaggatgacatctacatgccgtatgctcagtggctagcagagaacgatcgctttgaggaagcccagaaagcgttccacaaggctgggcgacagagagaagcggtccaggtgctggagcagctcacaaacaatgccgtggcggagagcaggtttaatgatgctgcctattattactggatgctgtccatgcagtgcctcgatatagctcaagatcctgcccagaaggacacaatgcttggcaagttctaccacttccagcgtttggcagagctgtaccatggttaccatgccatccatcgccacacggaagatccgttcagtgtccatcgtcctgaaactcttttcaacatctccaggttcctgctgcacagcctgcccaaggacaccccctcgggcatctctaaagtgaaaatactcttcaccttggccaagcagagcaaggccctcggtgcctacaggctggcccggcacgcctatgacaagctgcgtggcctgtacatccctgccagattccaaaagtccattgagctgggtaccctgaccatccgcgccaagcccttccacgacagtgaggagttggtgcccttgtgctaccgctgctccaccaacaacccgctgctcaacaacctgggcaacgtctgcatcaactgccgccagcccttcatcttctccgcctcttcctacgacgtgctacacctggttgagttctacctggaggaagggatcactgatgaagaagccatctccctcatcgacctggaggtgctgagacccaagcgggatgacagacagctagagattgcaaacaacagctcccagattctgcggctagtggagaccaaggactccatcggagatgaggacccgttcacagctaagctgagctttgagcaaggtggctcagagttcgtgccagtggtggtgagccggctggtgctgcgctccatgagccgccgggatgtcctcatcaagcgatggcccccacccctgaggtggcaatacttccgctcactgctgcctgacgcctccattaccatgtgcccctcctgcttccagatgttccattctgaggactatgagttgctggtgcttcagcatggctgctgcccctactgccgcaggtgcaaggatgaccctggcccatgaccagcatcctggggacggcctgcaccctctgcccgccttggggtctgctgggctgtgaaggagaataaagagttaaactgtcagaatgtgtttcttgcccagatgaagtttgtgttttgtggggggggccttgtgtaaccacggaattcctatttatggcatttcatgccttgtaaatagcaccaggagatgaggaagagaatgtacatatattttctaaggaaaaaaatctgttactttca

SEQ ID NO: 12492 - DNA, 2363 bp, Homo sapiens
atcctgaagatcttcgtggacaatctctttgctatcgtcctgctgaagcaggccacagctgtgcgctgcttggacatgagtgcctcccgtaagaagctggccgtggtagatgaaaatgacacttgcctggtgtatgacatcgacaccaaggagctgctttttcaggtgaagtccctgagggggcccagggacatcatcctttgattagagactctcctctagcttcccagtccctgcaggaggctctcctgctctggcccaggcaggtctctgggaggggcaggggccaagcacatgcacagagtcccagaggccctgggccacaacctgctcctcccacacaggcacaagccgcagggcctggaccggcctctttaactttggtttccttgccaatggaaaccgaaggctctgagccagcagagcctttcttaagcgtttaccatgaacaagaaatggggcaatgactctgagaggggtgtgacgttggcactcagtgaatggggcgatggatgcacttcctttgcagaagtctgtgtctcacctgctgcaggcctgcctgtgtctatgcgcacctacagcgtgggaaggaaacaggatgttttgtcatctgaaagggggaaggggatgggcaagcctggccttctacttaattcacaagaatgctagaagagccagcagaatgcgaagtgcttggatctttggggttgtaggcgttgttcagtggagtcatccagccctgtggcctgaggaagtgtgtcaccagagaagacagcccggcagctctgtgccccgggcctggttggctttctgctgggctcgcgccattctttctctctttaggtctttgtaggtggtcaggactggttttccagagtgaagttccccccaaagctggagcccctcctgactggtttcctcggccactgcagggtttcctgatgttatgggcagattcagtccccttaccaggctcctccttgttctcagcagcagaatcgatgggggaggggtctggagtggggagcagcctcagtcaattagaaggagttacctggccacctctagcccagaggtaactccatgtcagtctcaactcactcatgtccttgagagagtagaatggtttcggggaaagagagggcatagccttcaagctgacctgggcttgggtcctgcctgcatcccttactgtgtgatcttaagttagtgagcctctctgagccttaattacttttctctaaaatgaaattagtaattgccccttacagaattgctacaggaatacactagatactacagtgcctagctcagtgttgagcacaaaatggggcctgaaatgttacttcccttctccccagcctcacctcccacctatagggggcatagctggccccaaatgtgaatcttgtgtctgagcctagaatcatacaagtgtggaagggcgtctgtgctgccccatccccactgctggctctatggcaggctaggggaggtgattctcagccctgccaggagacatcagcattcccagctgtaacattgcctgctggcttttcctcttctccactgcccctccctctacacataaaacagctatattgattttttctcattataaaaaacaatccatgctgattataaaagatttagtcattataaaagatcctaggcagaaaggtatgagcatatttcaggagaataattttttttcaaaagtaatacttgcttactcaaaaattccaacaacacgcaggtgcatggaggggcttgcctctgttcatttctcttgcctctgttcatttctttgtggtcccctttcatccttttccctccatcccactgtaagcaatttagtgggattcagtctttaagagggtattgggctgaaatgtgtgagcgctgaccaagcccagggtggttctcacaggatccccactgtccctgttccccaggaaccaaacgccaacagtgtagcttggaacacccagtgtgaggacatgctctgcttctcgggaggaggctacctcaacatcaaagccagcaccttccctgtgcaccggcagaagctgcagggctttgtggtcggctacaatggctccaagatcttctgcctccatgtcttctccatttctgccgtggaggtgccgcaggtaactgggggtgcctgtccactcttagcactggcaaggctgacaagaccagggaagctgggccctttgctggtgctttggggagagagtagcaaggagagaagaatggcagctgtgaggtcgtgggaggcagtctgggcctggaacctgccgccctgtctccactccttgcaacctgtgtgactgggggcaaacagctcaacctccctg

SEQ ID NO: 12493 - DNA, 573 bp, Homo sapiens
atcctgaagatcttcgtggacaatctctttgctatcgtcctgctgaagcaggccacagctgtgcgctgcttggacatgagtgcctcccgtaagaagctggccgtggtagatgaaaatgacacttgcctggtgtatgacatcgacaccaaggagctgctttttcaggaaccaaacgccaacagtgtagcttggaacacccagtgtgaggacatgctctgcttctcgggaggaggctacctcaacatcaaagccagcaccttccctgtgcaccggcagaagctgcagggctttgtggtcggctacaatggctccaagatcttctgcctccatgtcttctccatttctgccgtggaggtgccgcaggtaactgggggtgcctgtccactcttagcactggcaaggctgacaagaccagggaagctgggccctttgctggtgctttggggagagagtagcaaggagagaagaatggcagctgtgaggtcgtgggaggcagtctgggcctggaacctgccgccctgtctccactccttgcaacctgtgtgactgggggcaaacagctcaacctccctg

SEQ ID NO: 12494 - DNA, 13756 bp, Homo sapiens
tataaatgacatcgcatttaagcctgatggaactcaactgattttggctgccggaagcagattactggtaggattttgtcttagtttcctcttaaagtgcttccctaacctccctcttgtgagtactctgaaatttgaccctttttttttttttttgagattaaaaaggcaagggtggaaaaaccttccctattactttttaatagggatggaaatgggctatttaaaacgggcaagtaaactatcagataagaacctgtgaacaataccacctttggggtcattcatctttccctttttactttgagacacccatgaaagagttgaaaacaatcacaatgcctttgaaactggactggtgtcagtttacattttgtcccccagaaaaattcaagcaacaggactgacggtgctgtgtccatgaaaagtcagatagcctgaccccaacttttaggcattggcctatctaaacagttccatatggatgttgtcctatttttcatattttcaaataacataagctccctctggaacctatccaggtatataaaagtaattttcagagaaccccttatgtttgaccaaaaaacctttgtatgatctctctttctgtctaagtctacttcctcttctctgttgtctctagatacgcagactgattaatctccattctttgtatggttaactacataatcttaaaacatggttaaattgttctgcagacttctctccagtgtaaacaatccaaactctattagtttttctacataggttatcttttccaatactctaaccatttcagaaagtttccgcttgatttctcagatggtgtgtgtgtgtgtgttttttttttttttttttttttttggagacagagtctggctctgtcgcccaggctggagtgcagtgacgcgatctcggcttactgcaagctccacctcccgggttcacaccattctcctgcctcagcctcctgagtagctgggactacaggcgcctgccgctacgctcagctaattttttgtatttttagtagagacggggtttctccgtgttagccaggatggtctcgatctcctgacctcgtaatccacccacctcggcctcccaaagtgctgggattacagaggtgagccaccgcgcccggccagatggtgtgtttttaaactctccacatagtgatagatgtcacatggctatcaaatacctaaatccatattacagctgggttttattttatttcttagagacagggttgtgctctgttgcccaagctggtgtgcagtagtgcagtcatagatcactgcagcctcaaactcctgggcttaagggatcttcccacctcagcctcccgagtagctaggactgtggacacacaccacctcgtccacctaatttttatttttttttatttttatttatttttattttttgtagagatggggtttcacttagttgcccaagctggtcttgaactcctggtttcaagcaatcctcccacttcagcctcccagagtgttgggatgacaggagtgagctaccatgcctggcctacagttgggttttataacattccctcctacttgaaagcccagagttctgtgactttcaaattcttggtagcaaatatgaaacatctattatgttgatttagtgcagagctggcattaaaatttaatcatgttgtagctggctctttttatgggctagttttatttaggagggcctgccttgatcaatcatatatccaaattcaggtaaggatgagtataaagaatttccatggagtgagtaattgaacctttggttctcaaggattggtagtatattcctggtcacatagtacatagacctgggtcctctacttcttggttacccaactttaagtcacgttgtttttggttttgcagtgcagtttttattggctacagatttagaatattgacacgtattgttataaaaacaaaaatagcagtagcaaccctgcaggaattctgactaatagatatcacatagataatctgtatttgtctcttttgccaggtttatgacacctctgatggcaccttacttcagcccctcaagggacacaaagacactgtgtactgtgtggcatatgcgaaggatggtaaaaggctgctctgggtttccattctctataatagcctcatcattgttcatttttctctttagtcactttttaattatttctagtaagctggagtacaagttgcaagttcagaagacagtgaagttgctaagacttcagtttggtcattcaatctagcaagtatttattgaggtcatctatgttccaggcactgttcaaggtgcttgagttacttcagagaaaaaaacggtggtccctccccttatggggcttctgttttatggggtggtggtgagaagtgagggaggaagaaagtatgagggaagacatacagtaaacatagtaaaaaggtaaattaagtagtatgctggaaggtgataactgttatggaagaagaaaaagtagagcagaatgagggggattgagagtgctgggcagggcagggggttgggtacagtattgaattagactagtgagggtgggctcattgagatgaggacaggtgaggaaaaagactttgaagtcaggaggcaatgagattgtgccagtgggcatcggggggaagagagctctttgcagaggaagagccattgcagaggccctcaggtgtgggtgtggctgctaggagctggatcaaagagaatcgggaattgtagaggatgaggataaagtggtaacagacatggggtggtcagatcataaagattttgattctcagtcaaaatggaactactgaaaggtcctcagcagaggagggatctgatttgatttgtattttaaaaggatccctctagttgctgagttggaaacaacctgcaagaggtgagggttaggacatctgtgtgaggaagcatcatccagacagggggtgatggtggctcagacctctgtgggggcagaggaggtgatgagaaattatcagactctggatataatgggagggtggagccaactggattgtctgacagattggatatgggctatgaagaaaaaggagtcaagtttttgacctgaggactgaaaggttggagttgccccccccactgagatggaaaagactgcaggtagagaaaagttatggttgaagatcagaaattcagttttatacatgctgaatttgagaaaagttgatgatgtcggagaggggagagaactgctggaacagagttgttgagtaggcaagaggagatgggatctagggcatagacggggtatttgctttagataggggcacagtaggaactgcagaggccagcagatggggacaatgtggtagtaggaatctaatggaaattctcaattccattttttttttcttcagtgaaataggaagcaacagcaactgagagtggcaatggggaagggaggtttcagagagttgaagagaaagggaaaaagtgtaaagtcactgcctcagagaatgggacagcgagtggacccaggaggtgtagtgagatccccggtgacatgaagggccctcttgaagattgtgatcatgaattgaaagtgagattagttggtgtgattgtgtctttttctccagcgattttgagctgcatagttgtagaggcagaagaggtgaatttaaccagaggtggttttgcaagcacatttgaagatgaagtaggagggcaagggagcagaaagtgtatacagataaataattatgtacattaaccttgaattgttggctgaataatgaagggagagaggacagcaatggagaagtagtaggttctggtggtgttgaaggattgttacagttggggtaccaggtgggttgggaaggaagggaagtggtgcatgaaactgagatttaaatttattttaaaataaatccatgttgtcccacagcataggattagtgggaagaaatgggctttggaatgagacagttgtgagttccaaccccaacccaacaccagagttctgtgagtctgagctggttattgagtctgagtcacgatttcttcatgtatcaaatggataacattgagataacattctgtagccactgccaagaagtcacaaaattgtaatgttataattcttgaatgaaccttggagattattccagtcccaggtttttaacttcttttggctgatgggcctctttgataatcagatggaagctttagaccactttctagaaagatgcaaattcttcatgtgtatgcagaatttcatgcatataattttagtctgattagtccagtctcttcactttagtcctgcataaagacataaacaattggccaggcacggtggctcatgcctataatcctactgaaatcctaaagctctgggagcctgagttgggaagattgcttaaggcaggagtttgagaccagcctgggcaacatagtgagactccctaaaatctggcctgggtgacagagctagactctgtctcttaaaaaaaaaaaaaaaagacaagtcatgtgacttgccaaggccatgcagcagattggcccaaagacaaaactaatttcttgcttcatagtcaggtgtgctgtaccatggtagtcatatttgtgtgtgtgtgtgtgtgtgtgtgtgtgtgtgtgtgtgtgtgtgcatgtttgagttcaagttcagaataatgttttagggagacctgtgaggagggagcctggagagctgaactgtttctgtctcatcctagtggctgttgaggaatgtgggtcagtccagggcccagtataaggcccagtaggtacagaagagctattgggcctctggtgcctctggtgtttataagcatagcagggctctttgacctgcaacaccattagggcacttgaggatgtcagagtgtgacccatcagtagtggcatttgcacagcactttgcagagtcctgtcacacacatctcacttgatgcttccaacaactctctgaagcaggcagcaaggggactcttatctccgctcaaagatgagaaaacagacttggagcaattacaggtgatggtggcagaggcaggcctaacccaggttctctgactgcagagtctttgttctttctagtgtatcatgctgcctcttcatgacacctgtataatgattaagaagtcttttagtcctcagaattggttttttcctcttagacctgaagattgagatacactgaattccagctttgctctttaagtctgcttgtttctgatttctcctttaagttcattaagttttttttgtttttttttttgagatgaagtctcgctctgtcgcccaggctggagtgcagtggcgcgatctcggctcatggcaacctctgactccctggttcaagtgattctcctgcctcagcctcctgagtagctgggactacaggcacgcgccaccatgcctagctaatttttgtattttcagtagagacagggtttcaccatgttggtcggcctgatctcaaactcctgacctcgtgatccgcccacctcggcctcccaaagtgctgggattacaggcgtgaaccaccatgcctggcccaagtttaataagtatttaatgagcaaccatgatataaaagtatgtaagacatagtttttttgttcaagaaaaacaatataatatgaagaaataatagaaatagctaatttttttttaattctattccaggcccagttctaagcaacataagggttaggggtgccactgcctgtgcaataaaaaatctgcatgtaatttctgaaccccccaaaactttactattaatagcctactgttgaccagaagccttacctgttacataaacagttaacacatttttaatattatatgtattatatattgtattcttaaaataagctagataaaatgttaattgagaaaaaagaaaaatatatttactcttcattaaatggaagtggatcatcataaaggtcttcatcttcattgtcttcaggttgaataggctgaggaggaggaggaggaggaggaggaggaagagggattggtgatgctgtgccagggagacagaggcaaaagaaaattcacatgtaaaagtggactcatgtagttaaaactcatgttgttcaggggtcaactgtatgtacacatgtacatacactcatttaatcttcacaccaaccatgaggtaaatactaacattgtatccatttttcaaataaggaaatgaaagctcttcagtagcttgtttgggtcatgcagctggtcagtgagatctctaggaattctgacccagagactctgagcccaaagcttatgcttttcatcaccatcacctgctacctaccaggatgagggaggagtgatggaaatagtaagagcagtttctttgtttatttagtatttgcagcaatatcatatggctcaccctaatatctactatttcagctactgtaaaaggtacttggccgggtgtggtggctcatgcttgtgatctcagcactttgggaagccaaggcgggtggatcatgaggtcaggagtttgagacaagcctggccaacacagtgaaacctcgtctgtactaaatatataaaaattagctgggcatggtggtgtgtgcctgtaatcccaactacttgggaggctgaggcaggagaattgcttgaacctgggaggcggagattgcagtgagctgagattatgccactgctctctggcctgggtgacagagctagactccgtctcaaaaagggccagtcgtggtgactcatgcctgtaatcacagcactttggaaggcggatcacctgaggtcaggagtttgagaccagcctgcccaacatggagaaaccccatctctactaaaaatacaaaaaattagccaggtgtggtggtgggcacctgtagtcccagctactcgggaggctgaggcaggataatcgcttgaacccgggagtcggaggttgcggtgagccgagatcgtgccactgcactatagcctgggcaacagagtgagacttagtctcaaaaaaaaggtactttacagatactatcttagttgactcccataaaaagactctgaggaagatactgttcctctgtgtttcagatgaaggcattgaggctcagagaacagtgacttgcccaaggtcaccttccacttgccctgtgaataaagtctaaaagtccttaagatgtacagaatgtggcacatacttacctcttaatcctcgtctctcaccagagtaggtgaagaccccgttatttgctgccatggtaccgtgatcctcttccaaatgcttataaatgtggaacagtgtaattaataacaaattacttgttatatgttgcctctctccagtctgttccttcataaagcccaagtagtatgaaaatgcgaatctgatctatcactctttgcttaaaacctttctttggcttcccattgctttaggataaagagcaaggcctctgctgtgtccctgaggtcccaagagatccttccacaacccacctcacccttccctccgttccatgatgactccgctcattccctcagacatgccaggcttttcctgcttcagggcctttgcacatctgttccatccatgtggatgggtctgtctcctctctacatctggctaagctctgctcatcctttaggtctccactgaaggatctcatccttagagaaatgttccctcatctaaattaggtcccccaggagatgttgaccaaagggtagtttcagtcagacaaaaggagtacatttttgagatctattgcacagcatggtgaccatagttaataatagcgtatatttcaaaactggcacaggaatagtttttttttttttttttttttgagatggagtctcgctctgttgcccaggctggagtgcagtggcgtgatctcggctcactgcaagccccacctcctgggttcactccattttcccacctcagcctccagagtagctgggactacaggcgcccgtcaccaggccggctaattttgtttttgtatttttagtagagacggggtttcaccgtgttggccaggatggtctcgatctcctgacctcgtgatccacccgcctcagccctccaaagtgctgggattacaggtgtgagccactgttcccggccaggaatagattttaaatgttctcactataaaaaaataagtatctgcagtgatggatatgttaattagcttaatcattcttcaatgtgtatgtatataaaataccacattgtacttcataagtagatataattattatttgtcaaaaataaaaatttaagtaaaaaagtaaatcaggttccccagttattctctttcataggatccgtgtcttaccatgttgtatttgtgttagattaatttgatgtgtacttcttacactagactgaactttatgaaagtagggatcatgtgtgttttaatcattacttaatccctagcatagaacatgacagctacatgtagtaggctcccaatacatctttgtttactcagtgtcagacaaagcaggtttggaacccaaatattctgactccaaggtcctgcctcccagtactgataagaactaggaaagaagctaacacttactaggtaccttaaagaactagttttctaaagaattctctctgggaaatgctggtttaagataaatgtaagactttccattttacaaacacttttaggcaagcgctttgcttctggatcagctgacaaaagcgttattatctggacatcaaaactggaaggcattctgaagtacacgtaagtaacttaggtgtacagtattatgagtttgatgcttattgaataattgcagcaaaagcctcttagaaaagatgtaggagaaaacttttttctcttaaattgaacttgaaattaagttgtgggtgtgtgtggttggtataggaaggttgagtagtgaataagttaatgaatatttcttggccacttactggcgtggccagcactgggctaggtgcttttatgtagctcatctcagttcatctgacattgtagactttatcccacccccaacctgtcatcttccagtgtccctgtctcagagaatggccttatatccacccagtgtcaaatgtcagaaacttggggtcagtgtgctccaggcctcctcttactattggggatctgccgtgttcttcccctgttcctctactagttggtccctatttaccctgcagatctcagactcaaatgtcagtttctttgtaaggactttcctgcctctctagactggaacaggtctctttcgaggcatttctcacaattgcagttttaggtttattctggtgactgatcagtattgctcatcggcctgtaagttccataagaacagatactgcatctattttttgttttgttttgttttgttttgagacagagtcttgctctgttgcccaggctggagtgcagtggcacgatctcggctcaccgcaagctccacctcccaggttcacgccattctcctgcctcagcctcccgagtagctgggactataggcgctcaccaccatgccaggctaattttttgtatttttagtagagatggggtttcaccatgttagctaggatggtctcgatctcctgactacatctattttttttttctcactcttgtgtccctgatacaatgcctagcccataattggtactcaccaattttccttccttccttctttccttccttccttccttccttccttccctccctccctcccttcttccttccttccttccctccctccctcccttcttccttccttccttccttccttccttccttccttccttccttccctccctccctcccttcttccttccttccttccttccttccttcctttcttttcagtcttgctctgtctcccaggctacagtgcagtggtaactagctcactgcaactacaaccttccaggctcaaataatcctcttacttcagcttcccaaatagctggaactgcaggtgcacacccccacaccaggccaatttttaaatttttttttttcttggtagagacagggtttcactttgttgcctgtactggtcttgaactcctgggctcaagcagtcctctcaaagtactgggattacagatacgagccactgcacctggcctcttttcaattgtggtaaaatatacatgacataaaatttatcatattaactactttttaagtttacagtttaatgttaaatacatttacattgttgtgcaaccaatctcccaaactcttttatcctgctaaactaaaattctatatccttcaaatacctactcacccttctctcctacccccagcccctgaaaaccagcattctactttctgtctctctgagtttgactgctttacatacctcatataagtagagtcatacaatgtttgttcttttgtggctgagttatttcatttcacgtaatgtcctcaaggctcatctgtgttgtagcatgtgtcagaatttactttctgtgttgtagcatgtgtcagaatttacttccttttttttctttattattatttttttttatgaagacgaggtctcactatgactcctgagctcaagcaatccttctcccttggccgcccaaactgctgggattacaggtgtgagccactgggctcagcttccttcctttttaagtctgaatattattccattgtatatatagaccacattttctttatccattcatctgttgatggacacttgtgttgcttctgcttcttagctattatgaataatgctgctatgaacatgggtgtacaaatcaacaaacaatttttgaaggaatgaatgaatgagtgaagttgtaagtaaagtattacccacaagtgaaggactaaaacgggttgagacgccttgcatggtacatgatttgctcagctttcattgttgtctaaggatttgtcatgtttccagatcttggtctgtgatgtcttcattgcacctccatcttccatttctgggcctccacaaaacagtaagagtaacagccacagataaagcacctaaaggccaaggtgggaggattgattgcttgaggccaagcgttcaaaaccaacctggccaaaagtgagtccccatctctacaaataagaaaacagtgggtgaggagaaggagaattaattctttaggagtaggagaattaatttctgtgctttttgttggtcacttgcagaagagcatgtggtctaaagtcagaggctgtgggctcattattaaaatcttcagttgtagccactgaaatctttgtggtttgctgcatagtaatctacagttgtttacttcccaggcacaatgatgctatacaatgtgtctcctacaatcctattactcatcaactggcatcttgttcctccagtgactttggtacgttctgattcctgatgtcctgtcctggaataactgaaaatctgggctaaaaatgctaaaatgcattcagaatatggtgattttatcctgagagagttaatactacttctctaccttcaatggctgaggggaggctgacagttattctttaaattgtgtggaaaccaagacagtgaatggtgacctttactctggtaagacatcagagactacaggaagggccccagcaaaggaaatggtaacaagattgggagggcacaggcataacttggtgttgctgcctttgggaagccttcccttggtgttgctgcctctgggaagccttccctgactcaccctggcagagacagtgcagttgtcctcacctttgtattgacccacatctatgtttatgtgaaattcttcactgttgcggttctacttcttgtgcaatttgtcgtcattactggtttaggtggctgtagctgtcctccctgaggggctgaacaccttgaggagttcatcctggccacggtcccgtgccagcattacagcactggtgtagtactggcacaaaagaggtgtcagtaaaatgtctgtggagggaggaagggagtgaaattgggcagaggcttgtaggttatttccattaatggttgattctgttttcagctctatcagtctgtgttcgttgctagtggatacaatgaagtcactagatgaggagtcagaggcctaatccctctcagtgttccagttcccttatctaaaaggagcatgctactcactgtgtctcactgatacggttctggttctgaggttcaaaagagagaatggaattgaaagccaattgtataaatacatggagaaaggcctgtcatttgtttaacatattttatagcattttcttcatgtgaagcactggtctgtgtgcttacactggaatattaaaaaggcaaaatagaatccctaccctcaaggagcttgtggtcttaggagaaggtgggattaaaaaaaatataatattaagtactagtatttattgaatgcttgcagtgtgctaggcactgttctaaggattagaaatgaatttctatttgagctttatgacagcccctgaggtgtcaggtattattctcattcccaccctactgatgaaaaagaggtagaggtcccttagctagtaagtggaggaaccagggcttggactttagaccaggtgattgcatacagagcctgctctgctaagcactgctgaaggaggcccaggaggaaggagtttcttccagcttggggctccaggcaggcttagtggaacacagataacatgtgcacacgtcaaaatgtttggaggaagcgttctggaccaggggaaaggcaaaaaataacttgtttgatgttgcacttggccatgtatttgtgcactggagttaccttcttgattgtacttcgcaacttggcaaatagaagaatttgcttatgttgtctagacatacacttgctatgaggcactgagccagggcatctgggacaggggggagcaagccttaggtgaccagtgtgccatgggagaggcacagctcagatagagtcatgtgttgtgattgagacctatgaaagaaaactagattttcagaaagcatcattgttattttaaatgctaggttatactctggttgcagtgtcaaagttataaacaatgaaactgtcatttctttgagagtcaaatccctgaaaagttggctagaactttaccaatctattttatttttcttctgaaagaatgatagattcatagtaagttacaaagatggtaccaagaagtctatgtacttttcatccagtttcccccagtggatccatcttatgtaactattatacaatatcaagaccaggaaactgagactggcacaaagtgtgtatattatatagttctgttgttttatcgcatgtgtagattgccatcagcgtgacacagaactaagccatcaccatgcagttaccacttagtgtcatatctactcaccttacctccagttatctccaaaccctggtaaccacaaatctgttctccatttctataattttgtcattcaagaatgttatataaatggaatcgtacagtatatgaccttttgagattatgttttttcattcagcataaaatcctggagatccatctaagttgttgtatgtttcaattatttgttcctttttattgctgggtagtattccaaccaatccatcttcttttatattattgtgcattgaagggttgtggtctcctgaacagaagtctgtctccaaacacaaatcaagcagcaagatcatctgctgcag

SEQ ID NO: 12495 - DNA, 469 bp, Homo sapiens
tataaatgacatcgcatttaagcctgatggaactcaactgattttggctgccggaagcagattactggtttatgacacctctgatggcaccttacttcagcccctcaagggacacaaagacactgtgtactgtgtggcatatgcgaaggatgtagagacggggtttcaccgtgttggccaggatggtctcgatctcctgacctcgtgatccacccgcctcagccctccaaagtgctgggattacaggcaagcgctttgcttctggatcagctgacaaaagcgttattatctggacatcaaaactggaaggcattctgaagtacacgcacaatgatgctatacaatgtgtctcctacaatcctattactcatcaactggcatcttgttcctccagtgactttgggttgtggtctcctgaacagaagtctgtctccaaacacaaatcaagcagcaagatcatctgctgcag

SEQ ID NO: 12496 - DNA, 13752 bp, Homo sapiens
tataaatgacatcgcatttaagcctgatggaactcaactgattttggctgccggaagcagattactggtaggattttgtcttagtttcctcttaaagtgcttccctaacctccctcttgtgagtactctgaaatttgaccctttttttttttttttgagattaaaaaggcaagggtggaaaaaccttccctattactttttaatagggatggaaatgggctatttaaaacgggcaagtaaactatcagataagaacctgtgaacaataccacctttggggtcattcatctttccctttttactttgagacacccatgaaagagttgaaaacaatcacaatgcctttgaaactggactggtgtcagtttacattttgtcccccagaaaaattcaagcaacaggactgacggtgctgtgtccatgaaaagtcagatagcctgaccccaacttttaggcattggcctatctaaacagttccatatggatgttgtcctatttttcatattttcaaataacataagctccctctggaacctatccaggtatataaaagtaattttcagagaaccccttatgtttgaccaaaaaacctttgtatgatctctctttctgtctaagtctacttcctcttctctgttgtctctagatacgcagactgattaatctccattctttgtatggttaactacataatcttaaaacatggttaaattgttctgcagacttctctccagtgtaaacaatccaaactctattagtttttctacataggttatcttttccaatactctaaccatttcagaaagtttccgcttgatttctcagatggtgtgtgtgtgtgtgttttttttttttttttttttttttggagacagagtctggctctgtcgcccaggctggagtgcagtgacgcgatctcggcttactgcaagctccacctcccgggttcacaccattctcctgcctcagcctcctgagtagctgggactacaggcgcctgccgctacgctcagctaattttttgtatttttagtagagacggggtttctccgtgttagccaggatggtctcgatctcctgacctcgtaatccacccacctcggcctcccaaagtgctgggattacagaggtgagccaccgcgcccggccagatggtgtgtttttaaactctccacatagtgatagatgtcacatggctatcaaatacctaaatccatattacagctgggttttattttatttcttagagacagggttgtgctctgttgcccaagctggtgtgcagtagtgcagtcatagatcactgcagcctcaaactcctgggcttaagggatcttcccacctcagcctcccgagtagctaggactgtggacacacaccacctcgtccacctaatttttatttttttttatttttatttatttttattttttgtagagatggggtttcacttagttgcccaagctggtcttgaactcctggtttcaagcaatcctcccacttcagcctcccagagtgttgggatgacaggagtgagctaccatgcctggcctacagttgggttttataacattccctcctacttgaaagcccagagttctgtgactttcaaattcttggtagcaaatatgaaacatctattatgttgatttagtgcagagctggcattaaaatttaatcatgttgtagctggctctttttatgggctagttttatttaggagggcctgccttgatcaatcatatatccaaattcaggtaaggatgagtataaagaatttccatggagtgagtaattgaacctttggttctcaaggattggtagtatattcctggtcacatagtacatagacctgggtcctctacttcttggttacccaactttaagtcacgttgtttttggttttgcagtgcagtttttattggctacagatttagaatattgacacgtattgttataaaaacaaaaatagcagtagcaaccctgcaggaattctgactaatagatatcacatagataatctgtatttgtctcttttgccaggtttatgacacctctgatggcaccttacttcagcccctcaagggacacaaagacactgtgtactgtgtggcatatgcgaaggatggtaaaaggctgctctgggtttccattctctataatagcctcatcattgttcatttttctctttagtcactttttaattatttctagtaagctggagtacaagttgcaagttcagaagacagtgaagttgctaagacttcagtttggtcattcaatctagcaagtatttattgaggtcatctatgttccaggcactgttcaaggtgcttgagttacttcagagaaaaaaacggtggtccctccccttatggggcttctgttttatggggtggtggtgagaagtgagggaggaagaaagtatgagggaagacatacagtaaacatagtaaaaaggtaaattaagtagtatgctggaaggtgataactgttatggaagaagaaaaagtagagcagaatgagggggattgagagtgctgggcagggcagggggttgggtacagtattgaattagactagtgagggtgggctcattgagatgaggacaggtgaggaaaaagactttgaagtcaggaggcaatgagattgtgccagtgggcatcggggggaagagagctctttgcagaggaagagccattgcagaggccctcaggtgtgggtgtggctgctaggagctggatcaaagagaatcgggaattgtagaggatgaggataaagtggtaacagacatggggtggtcagatcataaagattttgattctcagtcaaaatggaactactgaaaggtcctcagcagaggagggatctgatttgatttgtattttaaaaggatccctctagttgctgagttggaaacaacctgcaagaggtgagggttaggacatctgtgtgaggaagcatcatccagacagggggtgatggtggctcagacctctgtgggggcagaggaggtgatgagaaattatcagactctggatataatgggagggtggagccaactggattgtctgacagattggatatgggctatgaagaaaaaggagtcaagtttttgacctgaggactgaaaggttggagttgccccccccactgagatggaaaagactgcaggtagagaaaagttatggttgaagatcagaaattcagttttatacatgctgaatttgagaaaagttgatgatgtcggagaggggagagaactgctggaacagagttgttgagtaggcaagaggagatgggatctagggcatagacggggtatttgctttagataggggcacagtaggaactgcagaggccagcagatggggacaatgtggtagtaggaatctaatggaaattctcaattccattttttttttcttcagtgaaataggaagcaacagcaactgagagtggcaatggggaagggaggtttcagagagttgaagagaaagggaaaaagtgtaaagtcactgcctcagagaatgggacagcgagtggacccaggaggtgtagtgagatccccggtgacatgaagggccctcttgaagattgtgatcatgaattgaaagtgagattagttggtgtgattgtgtctttttctccagcgattttgagctgcatagttgtagaggcagaagaggtgaatttaaccagaggtggttttgcaagcacatttgaagatgaagtaggagggcaagggagcagaaagtgtatacagataaataattatgtacattaaccttgaattgttggctgaataatgaagggagagaggacagcaatggagaagtagtaggttctggtggtgttgaaggattgttacagttggggtaccaggtgggttgggaaggaagggaagtggtgcatgaaactgagatttaaatttattttaaaataaatccatgttgtcccacagcataggattagtgggaagaaatgggctttggaatgagacagttgtgagttccaaccccaacccaacaccagagttctgtgagtctgagctggttattgagtctgagtcacgatttcttcatgtatcaaatggataacattgagataacattctgtagccactgccaagaagtcacaaaattgtaatgttataattcttgaatgaaccttggagattattccagtcccaggtttttaacttcttttggctgatgggcctctttgataatcagatggaagctttagaccactttctagaaagatgcaaattcttcatgtgtatgcagaatttcatgcatataattttagtctgattagtccagtctcttcactttagtcctgcataaagacataaacaattggccaggcacggtggctcatgcctataatcctactgaaatcctaaagctctgggagcctgagttgggaagattgcttaaggcaggagtttgagaccagcctgggcaacatagtgagactccctaaaatctggcctgggtgacagagctagactctgtctcttaaaaaaaaaaaaaaaagacaagtcatgtgacttgccaaggccatgcagcagattggcccaaagacaaaactaatttcttgcttcatagtcaggtgtgctgtaccatggtagtcatatttgtgtgtgtgtgtgtgtgtgtgtgtgtgtgtgtgtgtgtgtgtgcatgtttgagttcaagttcagaataatgttttagggagacctgtgaggagggagcctggagagctgaactgtttctgtctcatcctagtggctgttgaggaatgtgggtcagtccagggcccagtataaggcccagtaggtacagaagagctattgggcctctggtgcctctggtgtttataagcatagcagggctctttgacctgcaacaccattagggcacttgaggatgtcagagtgtgacccatcagtagtggcatttgcacagcactttgcagagtcctgtcacacacatctcacttgatgcttccaacaactctctgaagcaggcagcaaggggactcttatctccgctcaaagatgagaaaacagacttggagcaattacaggtgatggtggcagaggcaggcctaacccaggttctctgactgcagagtctttgttctttctagtgtatcatgctgcctcttcatgacacctgtataatgattaagaagtcttttagtcctcagaattggttttttcctcttagacctgaagattgagatacactgaattccagctttgctctttaagtctgcttgtttctgatttctcctttaagttcattaagttttttttgtttttttttttgagatgaagtctcgctctgtcgcccaggctggagtgcagtggcgcgatctcggctcatggcaacctctgactccctggttcaagtgattctcctgcctcagcctcctgagtagctgggactacaggcacgcgccaccatgcctagctaatttttgtattttcagtagagacagggtttcaccatgttggtcggcctgatctcaaactcctgacctcgtgatccgcccacctcggcctcccaaagtgctgggattacaggcgtgaaccaccatgcctggcccaagtttaataagtatttaatgagcaaccatgatataaaagtatgtaagacatagtttttttgttcaagaaaaacaatataatatgaagaaataatagaaatagctaatttttttttaattctattccaggcccagttctaagcaacataagggttaggggtgccactgcctgtgcaataaaaaatctgcatgtaatttctgaaccccccaaaactttactattaatagcctactgttgaccagaagccttacctgttacataaacagttaacacatttttaatattatatgtattatatattgtattcttaaaataagctagataaaatgttaattgagaaaaaagaaaaatatatttactcttcattaaatggaagtggatcatcataaaggtcttcatcttcattgtcttcaggttgaataggctgaggaggaggaggaggaggaggaggaggaagagggattggtgatgctgtgccagggagacagaggcaaaagaaaattcacatgtaaaagtggactcatgtagttaaaactcatgttgttcaggggtcaactgtatgtacacatgtacatacactcatttaatcttcacaccaaccatgaggtaaatactaacattgtatccatttttcaaataaggaaatgaaagctcttcagtagcttgtttgggtcatgcagctggtcagtgagatctctaggaattctgacccagagactctgagcccaaagcttatgcttttcatcaccatcacctgctacctaccaggatgagggaggagtgatggaaatagtaagagcagtttctttgtttatttagtatttgcagcaatatcatatggctcaccctaatatctactatttcagctactgtaaaaggtacttggccgggtgtggtggctcatgcttgtgatctcagcactttgggaagccaaggcgggtggatcatgaggtcaggagtttgagacaagcctggccaacacagtgaaacctcgtctgtactaaatatataaaaattagctgggcatggtggtgtgtgcctgtaatcccaactacttgggaggctgaggcaggagaattgcttgaacctgggaggcggagattgcagtgagctgagattatgccactgctctctggcctgggtgacagagctagactccgtctcaaaaagggccagtcgtggtgactcatgcctgtaatcacagcactttggaaggcggatcacctgaggtcaggagtttgagaccagcctgcccaacatggagaaaccccatctctactaaaaatacaaaaaattagccaggtgtggtggtgggcacctgtagtcccagctactcgggaggctgaggcaggataatcgcttgaacccgggagtcggaggttgcggtgagccgagatcgtgccactgcactatagcctgggcaacagagtgagacttagtctcaaaaaaaaggtactttacagatactatcttagttgactcccataaaaagactctgaggaagatactgttcctctgtgtttcagatgaaggcattgaggctcagagaacagtgacttgcccaaggtcaccttccacttgccctgtgaataaagtctaaaagtccttaagatgtacagaatgtggcacatacttacctcttaatcctcgtctctcaccagagtaggtgaagaccccgttatttgctgccatggtaccgtgatcctcttccaaatgcttataaatgtggaacagtgtaattaataacaaattacttgttatatgttgcctctctccagtctgttccttcataaagcccaagtagtatgaaaatgcgaatctgatctatcactctttgcttaaaacctttctttggcttcccattgctttaggataaagagcaaggcctctgctgtgtccctgaggtcccaagagatccttccacaacccacctcacccttccctccgttccatgatgactccgctcattccctcagacatgccaggcttttcctgcttcagggcctttgcacatctgttccatccatgtggatgggtctgtctcctctctacatctggctaagctctgctcatcctttaggtctccactgaaggatctcatccttagagaaatgttccctcatctaaattaggtcccccaggagatgttgaccaaagggtagtttcagtcagacaaaaggagtacatttttgagatctattgcacagcatggtgaccatagttaataatagcgtatatttcaaaactggcacaggaatagtttttttttttttttttttttgagatggagtctcgctctgttgcccaggctggagtgcagtggcgtgatctcggctcactgcaagccccacctcctgggttcactccattttcccacctcagcctccagagtagctgggactacaggcgcccgtcaccaggccggctaattttgtttttgtatttttagtagagacggggtttcaccgtgttggccaggatggtctcgatctcctgacctcgtgatccacccgcctcagccctccaaagtgctgggattacaggtgtgagccactgttcccggccaggaatagattttaaatgttctcactataaaaaaataagtatctgcagtgatggatatgttaattagcttaatcattcttcaatgtgtatgtatataaaataccacattgtacttcataagtagatataattattatttgtcaaaaataaaaatttaagtaaaaaagtaaatcaggttccccagttattctctttcataggatccgtgtcttaccatgttgtatttgtgttagattaatttgatgtgtacttcttacactagactgaactttatgaaagtagggatcatgtgtgttttaatcattacttaatccctagcatagaacatgacagctacatgtagtaggctcccaatacatctttgtttactcagtgtcagacaaagcaggtttggaacccaaatattctgactccaaggtcctgcctcccagtactgataagaactaggaaagaagctaacacttactaggtaccttaaagaactagttttctaaagaattctctctgggaaatgctggtttaagataaatgtaagactttccattttacaaacacttttaggcaagcgctttgcttctggatcagctgacaaaagcgttattatctggacatcaaaactggaaggcattctgaagtacacgtaagtaacttaggtgtacagtattatgagtttgatgcttattgaataattgcagcaaaagcctcttagaaaagatgtaggagaaaacttttttctcttaaattgaacttgaaattaagttgtgggtgtgtgtggttggtataggaaggttgagtagtgaataagttaatgaatatttcttggccacttactggcgtggccagcactgggctaggtgcttttatgtagctcatctcagttcatctgacattgtagactttatcccacccccaacctgtcatcttccagtgtccctgtctcagagaatggccttatatccacccagtgtcaaatgtcagaaacttggggtcagtgtgctccaggcctcctcttactattggggatctgccgtgttcttcccctgttcctctactagttggtccctatttaccctgcagatctcagactcaaatgtcagtttctttgtaaggactttcctgcctctctagactggaacaggtctctttcgaggcatttctcacaattgcagttttaggtttattctggtgactgatcagtattgctcatcggcctgtaagttccataagaacagatactgcatctattttttgttttgttttgttttgttttgagacagagtcttgctctgttgcccaggctggagtgcagtggcacgatctcggctcaccgcaagctccacctcccaggttcacgccattctcctgcctcagcctcccgagtagctgggactataggcgctcaccaccatgccaggctaattttttgtatttttagtagagatggggtttcaccatgttagctaggatggtctcgatctcctgactacatctattttttttttctcactcttgtgtccctgatacaatgcctagcccataattggtactcaccaattttccttccttccttctttccttccttccttccttccttccttccctccctccctcccttcttccttccttccttccctccctccctcccttcttccttccttccttccttccttccttccttccttccttccttccctccctccctcccttcttccttccttccttccttccttccttcctttcttttcagtcttgctctgtctcccaggctacagtgcagtggtaactagctcactgcaactacaaccttccaggctcaaataatcctcttacttcagcttcccaaatagctggaactgcaggtgcacacccccacaccaggccaatttttaaatttttttttttcttggtagagacagggtttcactttgttgcctgtactggtcttgaactcctgggctcaagcagtcctctcaaagtactgggattacagatacgagccactgcacctggcctcttttcaattgtggtaaaatatacatgacataaaatttatcatattaactactttttaagtttacagtttaatgttaaatacatttacattgttgtgcaaccaatctcccaaactcttttatcctgctaaactaaaattctatatccttcaaatacctactcacccttctctcctacccccagcccctgaaaaccagcattctactttctgtctctctgagtttgactgctttacatacctcatataagtagagtcatacaatgtttgttcttttgtggctgagttatttcatttcacgtaatgtcctcaaggctcatctgtgttgtagcatgtgtcagaatttactttctgtgttgtagcatgtgtcagaatttacttccttttttttctttattattatttttttttatgaagacgaggtctcactatgactcctgagctcaagcaatccttctcccttggccgcccaaactgctgggattacaggtgtgagccactgggctcagcttccttcctttttaagtctgaatattattccattgtatatatagaccacattttctttatccattcatctgttgatggacacttgtgttgcttctgcttcttagctattatgaataatgctgctatgaacatgggtgtacaaatcaacaaacaatttttgaaggaatgaatgaatgagtgaagttgtaagtaaagtattacccacaagtgaaggactaaaacgggttgagacgccttgcatggtacatgatttgctcagctttcattgttgtctaaggatttgtcatgtttccagatcttggtctgtgatgtcttcattgcacctccatcttccatttctgggcctccacaaaacagtaagagtaacagccacagataaagcacctaaaggccaaggtgggaggattgattgcttgaggccaagcgttcaaaaccaacctggccaaaagtgagtccccatctctacaaataagaaaacagtgggtgaggagaaggagaattaattctttaggagtaggagaattaatttctgtgctttttgttggtcacttgcagaagagcatgtggtctaaagtcagaggctgtgggctcattattaaaatcttcagttgtagccactgaaatctttgtggtttgctgcatagtaatctacagttgtttacttcccaggcacaatgatgctatacaatgtgtctcctacaatcctattactcatcaactggcatcttgttcctccagtgactttggtacgttctgattcctgatgtcctgtcctggaataactgaaaatctgggctaaaaatgctaaaatgcattcagaatatggtgattttatcctgagagagttaatactacttctctaccttcaatggctgaggggaggctgacagttattctttaaattgtgtggaaaccaagacagtgaatggtgacctttactctggtaagacatcagagactacaggaagggccccagcaaaggaaatggtaacaagattgggagggcacaggcataacttggtgttgctgcctttgggaagccttcccttggtgttgctgcctctgggaagccttccctgactcaccctggcagagacagtgcagttgtcctcacctttgtattgacccacatctatgtttatgtgaaattcttcactgttgcggttctacttcttgtgcaatttgtcgtcattactggtttaggtggctgtagctgtcctccctgaggggctgaacaccttgaggagttcatcctggccacggtcccgtgccagcattacagcactggtgtagtactggcacaaaagaggtgtcagtaaaatgtctgtggagggaggaagggagtgaaattgggcagaggcttgtaggttatttccattaatggttgattctgttttcagctctatcagtctgtgttcgttgctagtggatacaatgaagtcactagatgaggagtcagaggcctaatccctctcagtgttccagttcccttatctaaaaggagcatgctactcactgtgtctcactgatacggttctggttctgaggttcaaaagagagaatggaattgaaagccaattgtataaatacatggagaaaggcctgtcatttgtttaacatattttatagcattttcttcatgtgaagcactggtctgtgtgcttacactggaatattaaaaaggcaaaatagaatccctaccctcaaggagcttgtggtcttaggagaaggtgggattaaaaaaaatataatattaagtactagtatttattgaatgcttgcagtgtgctaggcactgttctaaggattagaaatgaatttctatttgagctttatgacagcccctgaggtgtcaggtattattctcattcccaccctactgatgaaaaagaggtagaggtcccttagctagtaagtggaggaaccagggcttggactttagaccaggtgattgcatacagagcctgctctgctaagcactgctgaaggaggcccaggaggaaggagtttcttccagcttggggctccaggcaggcttagtggaacacagataacatgtgcacacgtcaaaatgtttggaggaagcgttctggaccaggggaaaggcaaaaaataacttgtttgatgttgcacttggccatgtatttgtgcactggagttaccttcttgattgtacttcgcaacttggcaaatagaagaatttgcttatgttgtctagacatacacttgctatgaggcactgagccagggcatctgggacaggggggagcaagccttaggtgaccagtgtgccatgggagaggcacagctcagatagagtcatgtgttgtgattgagacctatgaaagaaaactagattttcagaaagcatcattgttattttaaatgctaggttatactctggttgcagtgtcaaagttataaacaatgaaactgtcatttctttgagagtcaaatccctgaaaagttggctagaactttaccaatctattttatttttcttctgaaagaatgatagattcatagtaagttacaaagatggtaccaagaagtctatgtacttttcatccagtttcccccagtggatccatcttatgtaactattatacaatatcaagaccaggaaactgagactggcacaaagtgtgtatattatatagttctgttgttttatcgcatgtgtagattgccatcagcgtgacacagaactaagccatcaccatgcagttaccacttagtgtcatatctactcaccttacctccagttatctccaaaccctggtaaccacaaatctgttctccatttctataattttgtcattcaagaatgttatataaatggaatcgtacagtatatgaccttttgagattatgttttttcattcagcataaaatcctggagatccatctaagttgttgtatgtttcaattatttgttcctttttattgctgggtagtattccaaccaatccatcttcttttatattattgtgcattgaagggttgtggtctcctgaacagaagtctgtctccaaacacaaatcaagcagcaagatcatctgct

SEQ ID NO: 12497 - DNA, 445 bp, Homo sapiens
tataaatgacatcgcatttaagcctgatggaactcaactgattttggctgccggaagcagattactggtttatgacacctctgatggcaccttacttcagcccctcaagggacacaaagacactgtgtactgtgtggcatatgcgaaggatggaaatgaaagctcttcagtagcttgtttgggtcatgcagctggtcagtgagatctctaggaattctgacccagagactctgagcccaaagcttatgcttttcatcaccatcacctgctacctaccaggatgagggaggagtgatggaaatagcaagcgctttgcttctggatcagctgacaaaagcgttattatctggacatcaaaactggaaggcattctgaagtacacggttgtggtctcctgaacagaagtctgtctccaaacacaaatcaagcagcaagatcatctgct

SEQ ID NO: 12498 - DNA, 3541 bp, Homo sapiens
aaagtggcttgtggagtggcgaccgttagtgaggcggttgctgagacagacgctgaggcgggtaggaggagcccgagccgtaagggaagccgtgatgagggccgtgttgacgtggagagataaagccgagcactgtataaatgacatcgcatttaagcctgatggaactcaactgattttggctgccggaagcagattactggtttatgacacctctgatggcaccttacttcagcccctcaagggacacaaagacactgtgtactgtgtggcatatgcgaaggatgtattgtgcattgaagggttgtggtctcctgaacagaagtctgtctccaaacacaaatcaagcagcaagatcatctgctgcagctggacaaatgatggtcagtacctggcgctggggatgttcaatgggatcatcagcatacggaacaaaaatggcgaggagaaagtaaagatcgagcggccggggggctccctctcgccaatatggtccatctgctggaacccttcaagagaggaacgtaatgacatcctggctgtggctgactggggacagaaagtttccttctaccagctgagtggaaaacagattggaaaggatcgggcactgaactttgacccctgctgcatcagctactttactaaaggcgagtacattttgctggggggttcagacaagcaagtatctcttttcaccaaggatggagtgcggcttgggactgttggggagcagaactcctgggtgtggacgtgtcaagcgaaaccggattccaactatgtggtggtcggctgccaggacggcaccatttccttctaccagcttattttcagcacagtccatgggctttacaaggaccgctatgcctacagggatagcatgactgacgtcattgtgcagcacctgatcactgagcagaaagttcggattaaatgcaaagagcttgtcaagaagattgccatctacagaaatcgattggctatccaactgccagagaaaatcctcatctatgagttgtattcagaggacttatcagacatgcattaccgggtaaaggagaagattatcaagaagtttgagtgcaacctcctggtggtgtgtgccaatcacatcatcctgtgccaggagaaacggctgcagtgcctgtccttcagcggagtgaaggagcgggagtggcagatggagtctctcattcgttacatcaaggtgatcggtggccctcctggaagagaaggcctcttagtggggctgaagaatggacagatcctgaagatcttcgtggacaatctctttgctatcgtcctgctgaagcaggccacagctgtgcgctgcttggacatgagtgcctcccgtaagaagctggccgtggtagatgaaaatgacacttgcctggtgtatgacatcgacaccaaggagctgctttttcaggaaccaaacgccaacagtgtagcttggaacacccagtgtgaggacatgctctgcttctcgggaggaggctacctcaacatcaaagccagcaccttccctgtgcaccggcagaagctgcagggctttgtggtcggctacaatggctccaagatcttctgcctccatgtcttctccatttctgccgtggaggtgccgcagtccgctcccatgtaccagtacctggataggaaactgttcaaggaagcctaccagattgcttgcttgggtgtcacagacactgattggcgtgaactggccatggaagcgctagaaggtttagattttgaaacagcaaagaaggagaggaagaagcggggagagaccaacaatgacctgtttctggcagatgtgttttcctaccaggggaagttccatgaggccgccaaactgtacaagaggagtgggcacgagaacctcgcgcttgaaatgtacaccgacctctgcatgtttgagtatgccaaggatttccttggatctggagaccccaaagaaacaaagatgctaatcaccaaacaggctgactgggccagaaatatcaaggagcccaaagccgccgtggagatgtacatctcagcaggagagcacgtcaaggccatcgagatctgtggtgaccatggctgggttgacatgttgatcgacatcgcccgcaaactggacaaggctgagcgcgagcccctgctgctgtgcgctacctacctcaagaagctggacagccctggctatgctgctgagacctacctgaagatgggtgacctcaagtccctggtgcagctgcacgtggagacccagcgctgggatgaggcctttgctttgggtgagaagcatcctgagtttaaggatgacatctacatgccgtatgctcagtggctagcagagaacgatcgctttgaggaagcccagaaagcgttccacaaggctgggcgacagagagaagcggtccaggtgctggagcagctcacaaacaatgccgtggcggagagcaggtttaatgatgctgcctattattactggatgctgtccatgcagtgcctcgatatagctcaagcagatcctgcccagaaggacacaatgcttggcaagttctaccacttccagcgtttggcagagctgtaccatggttaccatgccatccatcgccacacggaagatccgttcagtgtccatcgtcctgaaactcttttcaacatctccaggttcctgctgcacagcctgcccaaggacaccccctcgggcatctctaaagtgaaaatactcttcaccttggccaagcagagcaaggccctcggtgcctacaggctggcccggcacgcctatgacaagctgcgtggcctgtacatccctgccagattccaaaagtccattgagctgggtaccctgaccatccgcgccaagcccttccacgacagtgaggagttggtgcccttgtgctaccgctgctccaccaacaacccgctgctcaacaacctgggcaacgtctgcatcaactgccgccagcccttcatcttctccgcctcttcctacgacgtgctacacctggttgagttctacctggaggaagggatcactgatgaagaagccatctccctcatcgacctggaggtgctgagacccaagcgggatgacagacagctagagattgcaaacaacagctcccagattctgcggctagtggagaccaaggactccatcggagatgaggacccgttcacagctaagctgagctttgagcaaggtggctcagagttcgtgccagtggtggtgagccggctggtgctgcgctccatgagccgccgggatgtcctcatcaagcgatggcccccacccctgaggtggcaatacttccgctcactgctgcctgacgcctccattaccatgtgcccctcctgcttccagatgttccattctgaggactatgagttgctggtgcttcagcatggctgctgcccctactgccgcaggtgcaaggatgaccctggcccatgaccagcatcctggggacggcctgcaccctctgcccgccttggggtctgctgggctgtgaaggagaataaagagttaaactgtcagaatgtg

SEQ ID NO: 12499 - DNA, 2440 bp, Homo sapiens
cccaaggacaccccctcgggcatctctaaagtgtatcctttctcttatccctcctccgtcccaccaccgttcttgtctaatggccccaagaaattccttccagagcactttcctggcagaaccttcctctctcagcaaccctcagggaagacagagaactcaccctcccgctgctgtttggctatagaggctcagcagggaggcccaggggcccaggccaagagaagatgagttttcagggctctctgagctgaacccagcagtgggtctctggccaacacactgtcccaatccctcctagaacccacagatgagggtgtgactgaaatggaagaagcaccaggccttcaggcttggaaccttgggcacttctccagactggggaggagggagtgtttgttcagcccaggtatacatagcaccttctgtgccccaagccctgggccaggcaccaggtggcaaagctgccatcaaagagggaggtcacaagttagggtctggtttggtggatgtgtgctgtgtctgagggtggaatgaagctgaggtcagggccatggtcagggaagtttacctggaggaggagatgtccatcatgcaagctgaggcagccagggaagatggccaagtggatgttccaggggaggacccagcatatggagaggcaagcaaggcatgtgggagagggtgaggggaccctgggtgggaggggccggagaggcagcaggacccaaggcctgagagcctacctttgggttttcctctcttctgtagccatcgagggccacagtggtaccataagcagagcaggtgcctgaagggcctgtgcagccagatactggatcattaccaggcaatgatccagatttttaaggtcttggatgtcaggagacataattgtccctgttcttttctaaatctcactgtactctcagctccttcccagccgcagccccaccttccctctgtaaggaaaacccactccactggagaagacccagagctccttgttgtaagaattggcctcgctagaggattccaggcccattatgtacatttcaggggaaataccctcaaatcaaggggtgccttcctggagtcagacctctgctgcatgcgtctccgtctttccccgtaggagcagtcagggctatgcctgtgggggctgagcacctgtactcatcctttccagcaagttctgtttgagtcaacagcttgatagaacctctaccctgagccttaccctgtgccatcccctggggacctggaaatggctcctgacagtccctgactttgaggagtcatgctggagacacagaaggaaactctccacagaactgctgaagtggacggggctgcactgcagacggcgggagcaggaacactgggagagatgcgggaggaagggcaggagggcctgggggcagccaacatcggaggtgacctgagaggagagcacaaaggctcgtcagcctctggctgaggagcttcaagggggccccagagcacaggctgccgctcagaaactgcccaccaggccctcggggaagggtgtgcagacagagtggggtacacccaggggcctcagagcagggttgagggtggctccccagggagtctggaccaggccccacctggcagggtgagagcagagtgccctttgtgccaggcatcctaggagggcctggctggcaggtttggtgaggcaggaagagccattttggcctagtcagggtataagatgagccatcagcaggcccagagatgctaagcaaggttaaagtattaatggaaactacgctgtttttatctttggaaaaattcctgggccttgccatccgagaagtacactcacctctcacaagcgcacagagccttcctcacggtctttcctctgccttcccggcaccagcacaagctgtgttccagcctggggctcactccaaggacaggcagtgccagctcctgggcctggtgttgcccctgctgtccttaaccctgttcacggcaggaaaatactcttcaccttggccaagcagagcaaggccctcggtgcctacaggctggcccggcacgcctatgacaagctgcgtggcctgtacatccctgccagattccaaaagtccattgagctgggtaccctgaccatccgcgccaagcccttccacgacagtgaggtgaggatgcagcacccttgggcaggtggcttctcctctcccttgaggccatctcatgccttcttgcctggcctgggttccgtttgaagagagacagctgcagctccctctaggctctgtgccccctgctcaagcctggccatgccagctcccctgtgcttccctgtccacctcctgttctccccgcagtccacctggcgcccgctcacagcccccggccccggcctcagccctcagcctggcctcccttgctccttgccctcccc

SEQ ID NO: 12500 - DNA, 464 bp, Homo sapiens
cccaaggacaccccctcgggcatctctaaagtgaaaatactcttcaccttggccaagcagagcaaggccctcggtgcctacaggctggcccggcacgcctatgacaagctgcgtggcctgtacatccctgccagattccaaaagtccattgagctgggtaccctgaccatccgcgccaagcccttccacgacagtgaggtgaggatgcagcacccttgggcaggtggcttctcctctcccttgaggccatctcatgccttcttgcctggcctgggttccgtttgaagagagacagctgcagctccctctaggctctgtgccccctgctcaagcctggccatgccagctcccctgtgcttccctgtccacctcctgttctccccgcagtccacctggcgcccgctcacagcccccggccccggcctcagccctcagcctggcctcccttgctccttgccctcccc

SEQ ID NO: 12501 - DNA, 2340 bp, Homo sapiens
tataaatgacatcgcatttaagcctgatggaactcaactgattttggctgccggaagcagattactggtaggattttgtcttagtttcctcttaaagtgcttccctaacctccctcttgtgagtactctgaaatttgaccctttttttttttttttgagattaaaaaggcaagggtggaaaaaccttccctattactttttaatagggatggaaatgggctatttaaaacgggcaagtaaactatcagataagaacctgtgaacaataccacctttggggtcattcatctttccctttttactttgagacacccatgaaagagttgaaaacaatcacaatgcctttgaaactggactggtgtcagtttacattttgtcccccagaaaaattcaagcaacaggactgacggtgctgtgtccatgaaaagtcagatagcctgaccccaacttttaggcattggcctatctaaacagttccatatggatgttgtcctatttttcatattttcaaataacataagctccctctggaacctatccaggtatataaaagtaattttcagagaaccccttatgtttgaccaaaaaacctttgtatgatctctctttctgtctaagtctacttcctcttctctgttgtctctagatacgcagactgattaatctccattctttgtatggttaactacataatcttaaaacatggttaaattgttctgcagacttctctccagtgtaaacaatccaaactctattagtttttctacataggttatcttttccaatactctaaccatttcagaaagtttccgcttgatttctcagatggtgtgtgtgtgtgtgttttttttttttttttttttttttggagacagagtctggctctgtcgcccaggctggagtgcagtgacgcgatctcggcttactgcaagctccacctcccgggttcacaccattctcctgcctcagcctcctgagtagctgggactacaggcgcctgccgctacgctcagctaattttttgtatttttagtagagacggggtttctccgtgttagccaggatggtctcgatctcctgacctcgtaatccacccacctcggcctcccaaagtgctgggattacagaggtgagccaccgcgcccggccagatggtgtgtttttaaactctccacatagtgatagatgtcacatggctatcaaatacctaaatccatattacagctgggttttattttatttcttagagacagggttgtgctctgttgcccaagctggtgtgcagtagtgcagtcatagatcactgcagcctcaaactcctgggcttaagggatcttcccacctcagcctcccgagtagctaggactgtggacacacaccacctcgtccacctaatttttatttttttttatttttatttatttttattttttgtagagatggggtttcacttagttgcccaagctggtcttgaactcctggtttcaagcaatcctcccacttcagcctcccagagtgttgggatgacaggagtgagctaccatgcctggcctacagttgggttttataacattccctcctacttgaaagcccagagttctgtgactttcaaattcttggtagcaaatatgaaacatctattatgttgatttagtgcagagctggcattaaaatttaatcatgttgtagctggctctttttatgggctagttttatttaggagggcctgccttgatcaatcatatatccaaattcaggtaaggatgagtataaagaatttccatggagtgagtaattgaacctttggttctcaaggattggtagtatattcctggtcacatagtacatagacctgggtcctctacttcttggttacccaactttaagtcacgttgtttttggttttgcagtgcagtttttattggctacagatttagaatattgacacgtattgttataaaaacaaaaatagcagtagcaaccctgcaggaattctgactaatagatatcacatagataatctgtatttgtctcttttgccaggtttatgacacctctgatggcaccttacttcagcccctcaagggacacaaagacactgtgtactgtgtggcatatgcgaaggatggtaaaaggctgctctgggtttccattctctataatagcctcatcattgttcatttttctctttagtcactttttaattatttctagtaagctggagtacaagttgcaagttcagaagacagtgaagttgctaagacttcagtttggtcattcaatctagcaagtatttattgaggtcatctatgttccaggcactgttcaaggtgcttgagt

SEQ ID NO: 12502 - DNA, 364 bp, Homo sapiens
tataaatgacatcgcatttaagcctgatggaactcaactgattttggctgccggaagcagattactggtttatgacacctctgatggcaccttacttcagcccctcaagggacacaaagacactgtgtactgtgtggcatatgcgaaggatggtaaaaggctgctctgggtttccattctctataatagcctcatcattgttcatttttctctttagtcactttttaattatttctagtaagctggagtacaagttgcaagttcagaagacagtgaagttgctaagacttcagtttggtcattcaatctagcaagtatttattgaggtcatctatgttccaggcactgttcaaggtgcttgagt

SEQ ID NO: 12503 - DNA, 4532 bp, Homo sapiens
gtataaatgacatcgcatttaagcctgatggaactcaactgattttggctgccggaagcagattactggtttatgacacctctgatggcaccttacttcagcccctcaagggacacaaagacactgtgtactgtgtggcatatgcgaaggatggcaagcgctttgcttctggatcagctgacaaaagcgttattatctggacatcaaaactggaaggcattctgaagtacacgcacaatgatgctatacaatgtgtctcctacaatcctattactcatcaactggcatcttgttcctccagtgactttgggttgtggtctcctgaacagaagtctgtctccaaacacaaatcaagcagcaagatcatctgctgcagctggacaaatgatggtcagtacctggcgctggggatgttcaatgggatcatcagcatacggaacaaaaatggcgaggagaaagtaaagatcgagcggccggggggctccctctcgccaatatggtccatctgctggaacccttcaagagaggaacgtaatgacatcctggctgtggctgactggggacagaaagtttccttctaccagctgagtggaaaacagattggaaaggatcgggcactgaactttgacccctgctgcatcagctactttactaaaggcgagtacattttgctggggggttcagacaagcaagtatctcttttcaccaaggatggagtgcggcttgggactgttggggagcagaactcctgggtgtggacgtgtcaagcgaaaccggattccaactatgtggtggtcggctgccaggacggcaccatttccttctaccagcttattttcagcacagtccatgggctttacaaggaccgctatgcctacagggatagcatgactgacgtcattgtgcagcacctgatcactgagcagaaagttcggattaaatgcaaagagcttgtcaagaagattgccatctacagaaatcgattggctatccaactgccagagaaaatcctcatctatgagttgtattcagaggacttatcagacatgcattaccgggtaaaggagaagattatcaagaagtttgagtgcaacctcctggtggtgtgtgccaatcacatcatcctgtgccaggagaaacggctgcagtgcctgtccttcagcggagtgaaggagcgggagtggcagatggagtctctcattcgttacatcaaggtgatcggtggccctcctggaagagaaggcctcttagtggggctgaagaatggacagatcctgaagatcttcgtggacaatctctttgctatcgtcctgctgaagcaggccacagctgtgcgctgcttggacatgagtgcctcccgtaagaagctggccgtggtagatgaaaatgacacttgcctggtgtatgacatcgacaccaaggagctgctttttcaggaaccaaacgccaacagtgtagcttggaacacccagtgtgaggacatgctctgcttctcgggaggaggctacctcaacatcaaagccagcaccttccctgtgcaccggcagaagctgcagggctttgtggtcggctacaatggctccaagatcttctgcctccatgtcttctccatttctgccgtggaggtgccgcagtccgctcccatgtaccagtacctggataggaaactgttcaaggaagcctaccagattgcttgcttgggtgtcacagacactgattggcgtgaactggccatggaagcgctagaaggtttagattttgaaacagcaaagaaggccttcatcagagtacaagacctccgatatttagagctcatcagcagcattgaggagaggaagaagcggggagagaccaacaatgacctgtttctggcagatgtgttttcctaccaggggaagttccatgaggccgccaaactgtacaagaggagtgggcacgagaacctcgcgcttgaaatgtacaccgacctctgcatgtttgagtatgccaaggatttccttggatctggagaccccaaagaaacaaagatgctaatcaccaaacaggctgactgggccagaaatatcaaggagcccaaagccgccgtggagatgtacatctcagcaggagagcacgtcaaggccatcgagatctgtggtgaccatggctgggttgacatgttgatcgacatcgcccgcaaactggacaaggctgagcgcgagcccctgctgctgtgcgctacctacctcaagaagctggacagccctggctatgctgctgagacctacctgaagatgggtgacctcaagtccctggtgcagctgcacgtggagacccagcgctgggatgaggcctttgctttgggtgagaagcatcctgagtttaaggatgacatctacatgccgtatgctcagtggctagcagagaacgatcgctttgaggaagcccagaaagcgttccacaaggctgggcgacagagagaagcggtccaggtgctggagcagctcacaaacaatgccgtggcggagagcaggtttaatgatgctgcctattattactggatgctgtccatgcagtgcctcgatatagctcaagatcctgcccagaaggacacaatgcttggcaagttctaccacttccagcgtttggcagagctgtaccatggttaccatgccatccatcgccacacggaagatccgttcagtgtccatcgtcctgaaactcttttcaacatctccaggttcctgctgcacagcctgcccaaggacaccccctcgggcatctctaaagtgaaaatactcttcaccttggccaagcagagcaaggccctcggtgcctacaggctggcccggcacgcctatgacaagctgcgtggcctgtacatccctgccagattccaaaagtccattgagctgggtaccctgaccatccgcgccaagcccttccacgacagtgaggtgaggatgcagcacccttgggcaggtggcttctcctctcccttgaggccatctcatgccttcttgcctggcctgggttccgtttgaagagagacagctgcagctccctctaggctctgtgccccctgctcaagcctggccatgccagctcccctgtgcttccctgtccacctcctgttctccccgcagtccacctggcgcccgctcacagcccccggccccggcctcagccctcagcctggcctcccttgctccttgccctcccctaggcaagccccacacctctgtgcccaggtggctctgcctttaccccaggcctggccccagagctgactcttactctagaaacctctgccctttctggaaccaggctgtagttctccagcaaatctaccccacactcccaacccacattccttcaacccagccagcttccttctttcacacatcctccctcaagctcagagcaaggacttggttcagacagacctgggttcacatcccggctccaccctctcctagctctgtctccatctttctgcaccttgggttccccctttcccacaggtagttgtgaggctaaatgagccagtatagtccacgtgctccgcacggtgcccggagcatggtaaatggctggctaatggtggcagcggccactgtcattcctgccaggggaaaagtgccgttgagcgctgcctgtgcaggtgtcttgggcacggggacccaagtgacagggcttgggtatttcggcaggcctttatcctgcttccccatggcatggagctcctgggcccggcgccccttccctgcctgcccacccgggtggcctttcctcttggcagccaggccccaggggcctgaagccagagtccagggggaggaggacacgtgcctgccccggcccctcgggagtccgtggctgttttgtaggagttggtgcccttgtgctaccgctgctccaccaacaacccgctgctcaacaacctgggcaacgtctgcatcaactgccgccagcccttcatcttctccgcctcttcctacgacgtgctacacctggttgagttctacctggaggaagggatcactgatgaagaagccatctccctcatcgacctggaggtgctgagacccaagcgggatgacagacagctagagattgcaaacaacagctcccagattctgcggctagtggagaccaaggactccatcggagatgaggacccgttcacagctaagctgagctttgagcaaggtggctcagagttcgtgccagtggtggtgagccggctggtgctgcgctccatgagccgccgggatgtcctcatcaagcgatggcccccacccctgaggtggcaatacttccgctcactgctgcctgacgcctccattaccatgtgcccctcctgcttccagatgttccattctgaggactatgagttgctggtgcttcagcatggctgctgcccctactgccgcaggtgcaaggatgaccctggcccatgaccagcatcctggggacggcctgcaccctctgcccgccttggggtctgctgggctgtgaaggagaataaagagttaaactgtcagaatgtg

SEQ ID NO: 12504 - DNA, 14574 bp, Homo sapiens
atgcatctggttctttccatggctctgaaaacagtcttctttttttcccttgatgaaatcctgcagtccgctcccatgtaccagtacctggataggaaactgttcaaggaagcctaccagattgcttgcttgggtgtcacagacactgattggcgtgaactggccatggaagcgctagaaggtttagattttgaaacagcaaagaaggtaagcatctagccagcaggagctggagtttggtccttgtggggtcccttaagaaggcagatggggacccaggtggcacggagaggccatagactgcagcagtctctggagttaggctgacctgggcttgtatcttagccacttcctcactgtgggcctgggtaggtgacaccctttctaagattgcttctctatagacgtaggatgatgacaggccccatcctcacaaagctgtgaggatcaaatgggaggatgcctgtaaagcctgacccaggagcagcatgtcagattctggctgtcactcttattagctgttctctgtgggaagcacctgactagtagcctggcacatcacaggcactccgtaaatggcggcttttattatcggtgtagtcactggccatgatgctgcacacaatgctgcttttcttagcatctgccaactaaggtgggagagatggtcaaggtctctgattctgacagcaatgtgggcacttcccacgtaccttcatggcgggattcatggacttgattcgttgtgtcctttcctggcctagtctatgaaagctagagagatggctgaaaacatctgacccctctctgcacataaggaaaagcccaggtatgttcctgagctgtgtttccatctagaacctcagatggaggaaggaatggcttccaacctccactcccctaccccttccctctttatctccccacagtcaattaatgagctgctcattttgtccatattcccgggctgacattgaaggagtggcaaagagggacgtgatgcccgccttgggttagatcaagacttgtaggcatgaagagaggagactggaccagaccaggactaagaagcctggctgagaacgagctgtgtcacataaggggctctgggacctcaggccagccactttccttggagccccagtcctcccagttctgaaatgggggtggtgagaatgcccgctgcagtcatgaggcttaactgagatgttgtaaaggggaatttaaatcagggatggttgtgcagatgctagccattactaaacaagggaagtgatcgttgtgtaacaatgatctagattatatttttagatgtcctcagtgtaggaaagtggagatggaggaggctgtaagaattcagaggaggggccaggcgcggtggctcacgcctgtaaatcctagcactttgggaggccgaggtgtgcggatcacaaggtcaggagatcgagaccatcctggctaacacggtgaaaccccgtctctactaaaaatacaaaaaattagccgggcatggtggcaggcgcctgtagtcccagctactccggaggctgaggcaggagaatggcgtgaacctgggaggcggagcgtgcagtgagccgagatggtgccactgcactccagcctgggccatagagcaagactctgacttaaaaaaaaaaaaaaaaaagaattcagaggagggaggaggcatctctatggagggagcttccctctcctgccccacccagaaatgccagcagggagggagacgacaaatccctagaatagaaaggattgtaaaaagccacaaggtttaatatgagtgtttactgatatttttataaatatatatatttttatatatttgtttaaatattgagacggggactcactgtgttgcccaggcaggtcttgaactcctgggctcaagcagtcttcttgcctcagcctcccaaagtgctgggattacaggtataaaccaccacacccagccagatttactatagttgaaaagtaagtgtatgtggtatatatctattgtgtacaacatgctgttttgaaaaagccacatgatattgaagataggctggatgttactatttcatctaaatcccgagtaccccacctctttactctgtgccaggcactcaggctcaccagcttggatatagtggttcctagagatggacagccatccccactagatggcagagaagagctgctgagctcccgccagaccctgagcagagctgcaggttcctccctattcccaggcttccctctgctgagctcattcaggggccttgtgactctgaccaggcaccctgacgctgcaaaatgtgtcaggttgaaggaactcggaaacagatttattaatgggcaaatcctagacactagcacagctgagctacagctagaaagacccttgagagggtgtcagtagcaggcccctttccacaaagaagatggttggagcccagaagcagagaagtaggctcagagcgaggactcagacctcgaatgctcctttccctcttggccactgtgctgggctttgcagggttgccctctcaaggcgctttaaggaaacccagatctagagggtgatgtgtaagacctacagcttgggacacaggtagtcttagccctgtgttccttggcccatgtgatgcccgcattgcccttttctacgaattcctcttcacaaacacttgtttgccaggttctgactctgatgcctcccttaacgctgcctcccacccctgctcatgctcagaccattcatccgtgttctccaggcatgtggttcgtagttggagagctcttagctctgggaggtgtcatgatctgtttaattgaccagctttccctgttagaatgtggacctctgaattgtggagggggacaggggccgagacatgtttctccctgggtcctcagtctcttgacaggaagcctggtcctgtgggatgaaaagataaagttgcattgtggtcacctgcaaggcaggccggggacttgctcatctcccgaggtcttttcaggagggaggatgccatgctgctgagcagaggctgcaagtggtcaggattgctctgcgtgttcagttcaaagggctctggagctgctgcctcctctaggcacaggtcagcccattttgaatggggcaataaatggtgacagcaaagccacctgaaagcagcctgacctggtggcttgtgctcctccaaaccctgggcagaatctgaaagcagcaaaactagcttagctaacaccagtctgcttgttcctcagaaacttctagaggtccatgagttaaagtctctggctttactgtgagttcaaggcaagggctgcaattttagggtttacataaagagtttgccttccacagacttggtgggattcattccctacccctccaccttcttccagaatctgtctttataccctctcagctttcccctcctctgctccctctgtggtaccaggggctctgggtcccctgtgtctgtggcaccactgggtaggcatagctgtcccctgcattctacccatgttgccaagatgtataggcagtctctcatcagtccatgcatctcatcctctcctgctgtgatgctgcgtgaccccccagagggtcagaccggcttgttcttctttgggtctagagtctcccaaggaggcaccgccacagactgtggcatcacggttttgttttacctgatctcaaaatgactgatgcaactgggatgtctttgctgttctttacatggtccaatcccatggataaagccatgcctcgctgggtggtataacctcctgcacgcacgatgattaatctgtgcttgctcccttcctctcctctgtggctcactgtctagatagagcttgacttcccacccctagccaatcacccacttttgaagccaagaagacagcttattttattctttatttcttcgccacaggccttcatcagagtacaagacctccgatatttagagctcatcagcagcattgaggtaaaagatgaagcatttttccttctcaagaaggcatacttggggttcctgttttaggggcagcccttctaacaggcaagagccttgaggacatgggaacagagctcactggcgtctgggcatctgggccacagccttgctccgggggcagagtggccacactgggggagacaacagcaggtagtgtgagctgttgtgtgatagctgggtgaggcacatgggttccggatctctccagggttgggtttctagtctgtgaaaagggattggacctacctcacaggctgctgtgaggattcagtaggttctcaggaactggtttgcatcctcctggtggcggatagctggtcaccatcctctcagactccagtaatctgatagtgttggaggagtttcccaaatgcacatgagctgagctccattccccagaaatggacctggggagcaaggcccacagtctgaactgagcgccccagagttctggagcaacccctagccctactgtttctggctgagaatattgaccttgtcatccaaacccaataggcctgcagtgtgctaaggaagctggttgtaggtatgccatttgctgggtggtggtcaacactatgctttttttttcttttttttttttttttttctgaaacaaggtctcactctgttccccaggctcaagcgcagtggcacgatcacagcttactgcagcatagacctcccaggctcaaatgatcctcccacctagcctcccaagtagctgggaccacatgcatgtgccaccccgcctgattaattttttgtatattttttagagcagggttttcccatgttgcccaggctggtttcaaattcgtgggctcaagctattagcccaccttagcctcccaaagtgctagcattatagacttgagctaccatgcccggcccttagacactattcttaatttctgtgtatctcagtgctgtctggctgtctgttaaaaggcatatacattttttctcctgaacatatttattgtgaaggtatgggaatgtgagatacatttgaattcccagttggaaacagtgaggaaatagcaaatgtcttgtccctctcattcatttccccataataaacacctgtcatgggccagcccttgtgccgagctcagtgggcacagagctgaggaggagagaggctgacaggagctcacagcctgctaagcctcataacgtaatctgctctgtgccacatgcgtgatttatgtgaatgctgttctagatcctcacattaactgaatgaggcaggtactgttgctctccctattccatgcaggaggaaattaaggctcagcaagacgatgccacatccccatgggtccatagccaaaaacttggtggaattcaagcccagtctatttcctaagctcatgctctctcggccacataccctccctacccgcgtgttgtaaggggcatctgtatattctggggtttacctacccgcgtggtaaagggcttgttcggagctattgctcaaaatgcccagtgctgctgactttcacttgtaaatccactggcctggatctgggggtcttcacctgaagccaaggagcataattttcctctctacaaaagtaactgctgtggggtccaactattacttgtcacatcttactggggtcaaaatgtagtcctctcctcgtatgctatgagctgggaagtgcgttaaagtaaactcctaagattgtctcttgaaaaaaagtaaagtgcctttgagtgtgctctatatcgactgcctgcagacttatttgcacacatctgggtgctcagcataattccagagaactgcagatccttagtgggtgccttttggataggggagatgttcttgtcctgctgacggggggaaagaacctgcccatgttgacatgcacctgctgagtgccatagatcgtttttattggtcatggtgatatcctggggcctagaatggatatggcctgaatttcatgtctagtaaaaccttttttgtttgtttgtttgttttttttttgcagagatagagtctggctatattgaccaggctggcctacaactcctgggctcaagtgatcctcctcttttgacctcccaaagtgtagggatcacaggtgtaagccaccatgtccagccaaaatcaatcttttatctcacggcaagatttcaattcatttccaactattaggagttagtttgtttgatgagcctgagctgtgtgcaggtttttagaatgataatttctgtcagtatggaagcatgttgcctccagctgttaaaactttcaccagcttgtctaagagtttgattcaatgtcttatcgtcctccaatatgctgctctttctagaaaacaagcaaaaggaaactgctagggctcagggtttgggtgctactgagtgtttacaaatactcgagctgtagacaagcgaatgttccctgacacagaaggaagaagctttatcctagctgtgctaagtgtgtgtgtgtgtgtgtgtgtgttgttggggacatcacttgcttcaaaagactacattgtgtgatacaaggaatatctggagtcagacagaactgcgtccaaattccagctctgtctgaccctgacctgttcctcttcttgagtctcagcgtccttcactctaacacttgggtagtgagacctaccctgagggtcactgagaggaataaaggggccatgtgtgtataaagtatatacccagaacctagtggatgttcagcatgcgggatttcttaccttctctttagaagtagggatatcgtaagacttgtcatcctattttattggtctccctcttgggcagaaaccctaaacattctcctgctctgtcatccccatgagccacaactctgccaaacggggcctgcggatttgggagatcttgggagcttaggggtcatggatgagtcagagcacacactattcaaactattccgtcatagccttggaatacacaggaaagcaaccctgaggaatttccattaaacaaacaaaggtttgcatctttttttgatctttgcttgtctggtaaaagcctgcttttgttgtcaagccttcccagcgggaacctaggggagagagacaacagccaggagccaagcccaggttccagtaggaaggcccaggggcctcacttgaaatagccacatctaacctttgtaaaggctgcttcctgcccatggctgcagaggccatttcctttgcttctaatttttccaggagaggaagaagcggggagagaccaacaatgacctgtttctggcagatgtgttttcctaccaggggaagttccatgaggccgccaaactgtacaagaggagtgggcacgagaacctcgcgcttgaaatgtacaccgacctctgcatgtttgagtatgccaaggtaacctaccctgtcccaggcccaagctccagcttggagcccactggtattctcacgtgcggtgtccaagttattttccccaagagtgctgcggacaaaaactagcaatggtctcagaaaggatgtggggaaactggtaaacaaaggacccatctacagccactggttgaaactcacctaaaactgacctttaaggctgacaccaagggggcagactatggcagttcagaccttcatcagtgacagggctggatggctgtgggtctacaccagcacaatcccttcattgagttgagggctcagggcttcagggctgtcccccacaaatcctctcaatccttgtcaggagccgccaagaatcggtgtcttcaggcaggagccggtcctgccgatcatgcaggacgacatggtgcctgccagccaagtttcccatagcacctgctgattgtcctggacttctcactgggcttctgggaagtcaggcagagcctccgccctcccatgttagcgcagcatgcctcacgcctgccggctgcagagtggctaccatgtggttgcagtgggtgatggcagagattcccttttgcattgggacggcccccatgaaccttactccccagcagagctgggccttttaaggcaggtgtaggagaggagcttcctggaccaggctcctgatggcttctgtgggaaggagttgcactaaggagcccagagcagtcaagacatttgcagttcagtctaagcaaggttcaaagaggcttcggtacactgggcaatgagggtcttccttccatcaaggggctttgttaacctgccttttctggaagtgtcaaaagtggctctcagtatgttatgaagtgactcatcagccataacctattggtgggctactaatggtagttctccagctcacaagttcaagatggaaaatcttccccacttttttctgcttttctattcctgaagatggctgtgctcttccaccacctgttcgaccctggggctgaaggtgtgtttggtggcctgtgatgttgcccaggacctattgttcatcaggacttggacgagctcctgggccccagcctgtcttttcaccttagtgatttcttcactccgtacctgagacccagggtgttcaggctccctctactttttcctcgtcacctttcctaccctccctcaggccccaccaaagacacctagaagatttcataacacattcatactgagatcaccagagtcagtgcatctctgcttccggggataacaaaattttaactcaggatgaacccttaagggatcaagaccctagaggtagaatttagggttgggaacccctgaggcctcctcaaggaggcagctgtgctgcagtagaaaatgcctgaccaggctgggcatggtggctcaaacctgtaatactagcactttgggaggctgaagtgggtggattgcttgagctcaggaggtcgagaccagcctgggcaatatggtgaaaccctctctctaccaaaaatgcaaaaaattagctggtgcctgtagtcccagctactgggaggctaaggtggaaagattgcttgagccccagaggtggaagttgcagtgagccaagatcacgccactgcattccagcctgggtgacagagcaagacccatgtcaaaaaaaaataataaaatgcctggccttggtgccccagagctggtgtgagtgcagtttctttctgtgggatgacctggggaaaggctcttcggtttgccaaacctcccttcccttctcagatggtaatagcgacagctcagtttagtcatgagatttgcacagaataatgtataggaaagcgcattagaaatgccaacctgtagaaagattaggaagatgagaggggccacacgtgaccacagagtggattttcatacctctctccctggctggccccactcctgcccctgctctgaggcccctccttacactgtggtggacttcgtgtgcccacagcctcccaccagaactgcagcccatttacacactccatttgctccgtctctctatgaaggtaaatactctgggacttgtttttggttttagtttttgatcactattccaaggaggttggttccttttcaatcccccctgcccccacctggtagtctgaatttgagaaatatgtacctacacattatgtggggggtgggggagatctagtcctgattaacgtggcatatttttgtttacttgaaaattgcttcccaagattcaatctggttttcagaaaattttaaaattacattcccacgtacaaataaattgtatgctttctggataagtgacatgtttatatggtgataaagggaattataatgctcttaactcttatgtagtatgttcttatcaaaatcaccaagcatgagaacactgtttagtctcattcatcactcagcacagcctctttctgtccacttcagggccaagtctttgccatggccccagataatgtgtaacttagcttcaggaaagcaaaaagcctttgaatttccagtttgctgagccttgaaggaagcttttagacccagcttcaatgaagtcacagctccctgagtgaccagctggcctaggcttatggctccctctcagcctctcacccttgccgtggtcacccctggtcccctgagcactcactgaagtccctttgaaggacatttctagtctcctaagatgcctgttttcctccagctgccaccctcatttcaccagccaggtaggcagggtttccagcttcgtgctggcatagagaatccgcgccatagcagctgccagaaggaaaggtgtgtctgtaaaggcccaaactaggcggggacagcggctgctttccaagccccttccctttgtcagctccagggagaaccaaaggccagccagggggcctgtcttctattgggtcccagcatcagggtatacaatgcgctttcctccccttcttaaaatgtatcatatattaggccgacctaatactctgaaagcacatttaccctgaaagcaaatgagggaaaaaagcgagctaattgttcaagtggatttttagcatacattgactgtacttttctgacacatgagtgttaatcatggggaaaggagtgctttttttgttctcagtgaggctgacacaaagtactctccacagggtacattattcctgagacaaaccacttcttaccagtaacatagacctgggctgtaagtgctcccagtttccctttttgaaaagctccacctttaaaagctgcctcaattctggcaaactcccacgtgtgtattttgggtaactactctgaaaagaggtggtgttctgaggctgtttctcacacattgtagggccagcccagagaagctgggcataccacttcagaggtatgctgaggccgaaggaacacaggccctaggcctgatctctgagcctccaggaccacagccatctcttccttctcaggtcctctcctgagcaccttccctgcctcagattcccccatggcctcctgctgtcccactgtcggatcaggttctcacccctgcagacctgacctcagcacaggatccctaaccattcagctgagaagcaactaaccagagagatgtttgcttgttatctgttccaggaaagtaactggggcaaagacaatgtgatgattctctagttcagggcacagaatgtttgctggtgactcagagagggcatggagggcacggagggccggcaaacactgtaagtcattttgtttgtgtaagtttaggggaacccatgctcagcctcactctgaagcatgtggtatcacccatatgatctgaataagatgacaggtctcgatatgtggaattgtgcaccaggttgtctcattgctgtttaggaacagtcctgtattgaccaaactatgtgagagagagacagcctgatcatgaacccccgaccctgcagacttcatgtgcagtgccccaaatagtctagaaagtgttgtttagccgatgaacaaatgcccatttgtgagacgggaaggaagcactgggggccagcgtccctgatgctgtcccaggatcccccaggaacacctgcagggcagcctgagatcactcttcccgagacctgggactcccccaactcagcccctcagggccgggccctgcctacctcctggttgcctgcttcagccatgtggagcccgcccttgctgctagaaaagcctgatgtaacgctggcacaggaagttctgatccagagtgtttttgtttgttgtgcttcctcaggatttccttggatctggagaccccaaagaaacaaagatgctaatcaccaaacaggctgactgggccagaaatatcaaggagcccaaagccgccgtggagatgtacatctcagcaggagagcacgtcaaggccatcgagatctgtggtgaccatggctgggttgacatgtaggttttggtccctgccccgagaagcatttggcagcatgtcatcacatgtcacctcttgactgacaagggaaccaatagtgcttttctaattatctaaagctaatgtgatagtggctaggttcttcaggagacacagagattgcacaaggcagtggctgccttccaggagcttgtggagtcactaggggaagggatggtggggaccagggaagaggagacaccgggacatcacagctgccatttgctgagcgctcactacaacccagacgctgtgataaccttccaggcattaggttttccacctatgccatcagggctggtgtctcctcgcccaccttgcagatgatgaaacagaagctaaagggacaagttattcccaaagtccagatagctggaaagttgtagagctgagctttagcctctgatctgctggatgtcgatgccaactacgcgtgtaatggtaggaacaaaaacaaaacaagttccaaatccatcagggaagaattcttatgggaggaaccatggatatcttctcttaggagacactctttccatgaagggaccttaaagaattccaagaggtaaatagagatggcgggaaaggatatgcaggcaggaagtacagcagaaacacagcgagttggctctggttggaataaaagacgtgtgggaatgggagggtgaaggacatgggctgtgggttgggggaagtgggctggccacactggaagggcctccgatgccaaacggaggtgcttagatttgccaatagtgagtgaccacctacagtcagacaccccctcaggcaggcaggtagaatggagaccagataactggctagtgcagtagagcaggagggaacttggtagctgagggcatgagagagaagtagcagtgttagaaccaagtggcccatcccagggtgttggggcagtggtgagtgtcaggctggctttgctctgtggctgctggtgggttacaccattcgtcaaggtggacaacagggagaggagggggttggggtggggcagcactgagacaggatggattcagccttgggactcagcacaccggaccttgagggggaaggctttgtcctcccagtcagtgagcttcaggctcaagcatgtgcacacacacgtgcacatgctgctgcggtaggcaaaggacacgatgggacaagctcctgagggtggctcaggctgggtcctaaaggctgttgattcttctggaaacaacgttgtggtctacaggtagcagtggcccagccaggatttggggatatggaagaggctggttaatgattaaattgtttccttgggtgctgccatatattaataattggtgtgtgggcccctcacaaagggaccttgatggatgtcctaccaccccatctttttcttgtccgatagtaatttttttaaagacagaggcacagattttgttccccacattattctttaaatgaaggggttcatatagaagagagccaggcagatttagggtgctctgttctctcttctggtttttcttgtcactttcatttgtaagtgctatagtatcaggttaccctgagggtacttgagtaattcaagaaacacattaagcatgttctgcttgctttccagatgtggctataaaaggtgtctttcctccagggacgttgggtgtgatgggtgggaaggtttctaaggctgtaagggctgtctatgccacctttccctaaaaacgtgtcctttttctgctgagcagtgttatttttagatgccattattattctaagtgtagactgacaggcctccgtgccttgcctgtctccagacagggattcgttacagctgcttctccttcctttctcaccaagactagcctgggtagaaccctttctcctgggagagttagtttgactccaaattccagcctgaccagagagaacaagcgcattctatccaggcctcatgtccccatgagtgatgggagggctgctcaccatggggaagcagtggtgagccagtgggtccctgcagctcctccctctttggtcagcacgttggccaggaggacagggaagacttcctgcaggcctttgtccagagctcagagcaggccccacactcacctcttcctttagagggcagtcattgaggtattcttatgccttggcatccacttttccgtgagaattcctgcacccgtggtggaaagagtgctgggcccagtcttgggctgggtgcttcaccttccccacagactttattcttctcatctgagagatggaaataatcatgcccacctcttagggtggtgaagattctgatttcacgcatgggaaagctcatggcgtcatctgggtacctggtaggggattaggagataattgtttctataccctgctggatagctcagtgacttccgagaaagacacacaaggtggctgacaggatcctgtaaaggccacctctcccagatcctggtgatgtttctggagtgtgtattcatgcatttaataactacccactgagcaactcccatgggccatggcatagtatcaacactggggaccacagaatgaatggacatacggcttgccgttgacaagacccagagcccaccctcctacctgccccttccctctccaggttgatcgacatcgcccgcaaactggacaaggctgagcgcgagcccctgctgct

SEQ ID NO: 12505 - DNA, 590 bp, Homo sapiens
atgcatctggttctttccatggctctgaaaacagtcttctttttttcccttgatgaaatcctgcagtccgctcccatgtaccagtacctggataggaaactgttcaaggaagcctaccagattgcttgcttgggtgtcacagacactgattggcgtgaactggccatggaagcgctagaaggtttagattttgaaacagcaaagaaggagaggaagaagcggggagagaccaacaatgacctgtttctggcagatgtgttttcctaccaggggaagttccatgaggccgccaaactgtacaagaggagtgggcacgagaacctcgcgcttgaaatgtacaccgacctctgcatgtttgagtatgccaaggatttccttggatctggagaccccaaagaaacaaagatgctaatcaccaaacaggctgactgggccagaaatatcaaggagcccaaagccgccgtggagatgtacatctcagcaggagagcacgtcaaggccatcgagatctgtggtgaccatggctgggttgacatgttgatcgacatcgcccgcaaactggacaaggctgagcgcgagcccctgctgct

SEQ ID NO: 12506 - DNA, 3824 bp, Homo sapiens
gttgccaggggtaacgcaggtagccaaagtggcttgtggagtggcgaccgttagtgaggcggttgctgagacagacgctgaggcgggtaggaggagcccgagccgtaagggaagccgtgatgagggccgtgttgacgtggagagataaagccgagcactgtataaatgacatcgcatttaagcctgatggaactcaactgattttggctgccggaagcagattactggtttatgacacctctgatggcaccttacttcagcccctcaagggacacaaagacactgtgtactgtgtggcatatgcgaaggatggcaagcgctttgcttctggatcagctgacaaaagcgttattatctggacatcaaaactggaaggcattctgaagtacacatcttggtctgtgatgtcttcattgcacctccatcttccatttctgggcctccacaaaacagtaagagtaacagccacagataaagcacctaaaggccaaggtgggaggattgattgcttgaggccaagcgttcaaaaccaacctggccaaaagcacaatgatgctatacaatgtgtctcctacaatcctattactcatcaactggcatcttgttcctccagtgactttgggttgtggtctcctgaacagaagtctgtctccaaacacaaatcaagcagcaagatcatctgctgcagctggacaaatgatggtcagtacctggcgctggggatgttcaatgggatcatcagcatacggaacaaaaatggcgaggagaaagtaaagatcgagcggccggggggctccctctcgccaatatggtccatctgctggaacccttcaagagaggaacgtaatgacatcctggctgtggctgactggggacagaaagtttccttctaccagctgagtggaaaacagattggaaaggatcgggcactgaactttgacccctgctgcatcagctactttactaaaggcgagtacattttgctggggggttcagacaagcaagtatctcttttcaccaaggatggagtgcggcttgggactgttggggagcagaactcctgggtgtggacgtgtcaagcgaaaccggattccaactatgtggtggtcggctgccaggacggcaccatttccttctaccagcttattttcagcacagtccatgggctttacaaggaccgctatgcctacagggatagcatgactgacgtcattgtgcagcacctgatcactgagcagaaagttcggattaaatgcaaagagcttgtcaagaagattgccatctacagaaatcgattggctatccaactgccagagaaaatcctcatctatgagttgtattcagaggacttatcagacatgcattaccgggtaaaggagaagattatcaagaagtttgagtgcaacctcctggtggtgtgtgccaatcacatcatcctgtgccaggagaaacggctgcagtgcctgtccttcagcggagtgaaggagcgggagtggcagatggagtctctcattcgttacatcaaggtgatcggtggccctcctggaagagaaggcctcttagtggggctgaagaatggacagatcctgaagatcttcgtggacaatctctttgctatcgtcctgctgaagcaggccacagctgtgcgctgcttggacatgagtgcctcccgtaagaagctggccgtggtagatgaaaatgacacttgcctggtgtatgacatcgacaccaaggagctgctttttcaggaaccaaacgccaacagtgtagcttggaacacccagtgtgaggacatgctctgcttctcgggaggaggctacctcaacatcaaagccagcaccttccctgtgcaccggcagaagctgcagggctttgtggtcggctacaatggctccaagatcttctgcctccatgtcttctccatttctgccgtggaggtgccgcagtccgctcccatgtaccagtacctggataggaaactgttcaaggaagcctaccagattgcttgcttgggtgtcacagacactgattggcgtgaactggccatggaagcgctagaaggtttagattttgaaacagcaaagaaggccttcatcagagtacaagacctccgatatttagagctcatcagcagcattgaggagaggaagaagcggggagagaccaacaatgacctgtttctggcagatgtgttttcctaccaggggaagttccatgaggccgccaaactgtacaagaggagtgggcacgagaacctcgcgcttgaaatgtacaccgacctctgcatgtttgagtatgccaaggatttccttggatctggagaccccaaagaaacaaagatgctaatcaccaaacaggctgactgggccagaaatatcaaggagcccaaagccgccgtggagatgtacatctcagcaggagagcacgtcaaggccatcgagatctgtggtgaccatggctgggttgacatgttgatcgacatcgcccgcaaactggacaaggctgagcgcgagcccctgctgctgtgcgctacctacctcaagaagctggacagccctggctatgctgctgagacctacctgaagatgggtgacctcaagtccctggtgcagctgcacgtggagacccagcgctgggatgaggcctttgctttgggtgagaagcatcctgagtttaaggatgacatctacatgccgtatgctcagtggctagcagagaacgatcgctttgaggaagcccagaaagcgttccacaaggctgggcgacagagagaagcggtccaggtgctggagcagctcacaaacaatgccgtggcggagagcaggtttaatgatgctgcctattattactggatgctgtccatgcagtgcctcgatatagctcaagcagatcctgcccagaaggacacaatgcttggcaagttctaccacttccagcgtttggcagagctgtaccatggttaccatgccatccatcgccacacggaagatccgttcagtgtccatcgtcctgaaactcttttcaacatctccaggttcctgctgcacagcctgcccaaggacaccccctcgggcatctctaaagtgaaaatactcttcaccttggccaagcagagcaaggccctcggtgcctacaggctggcccggcacgcctatgacaagctgcgtggcctgtacatccctgccagattccaaaagtccattgagctgggtaccctgaccatccgcgccaagcccttccacgacagtgaggagttggtgcccttgtgctaccgctgctccaccaacaacccgctgctcaacaacctgggcaacgtctgcatcaactgccgccagcccttcatcttctccgcctcttcctacgacgtgctacacctggttgagttctacctggaggaagggatcactgatgaagaagccatctccctcatcgacctggaggtgctgagacccaagcgggatgacagacagctagagattgcaaacaacagctcccagattctgcggctagtggagaccaaggactccatcggagatgaggacccgttcacagctaagctgagctttgagcaaggtggctcagagttcgtgccagtggtggtgagccggctggtgctgcgctccatgagccgccgggatgtcctcatcaagcgatggcccccacccctgaggtggcaatacttccgctcactgctgcctgacgcctccattaccatgtgcccctcctgcttccagatgttccattctgaggactatgagttgctggtgcttcagcatggctgctgcccctactgccgcaggtgcaaggatgaccctggcccatga

SEQ ID NO: 12507 - DNA, 1935 bp, Homo sapiens
gatgcagaggcagagaggcctgtgttcaccatgggatgacacaggagaaaaggctggccagctctccctgtcttcccaactccctctaaagttggcgagaaaaagcccttaattgtattgcaatggttatggattcggaaatggtttttcccttgctgtgtgttctttttcctcagattggaaaggatcgggcactgaactttgacccctgctgcatcagctactttactaaaggcgagtacattttgctggggggttcagacaagcaagtatctcttttcaccaaggatggagtgcggcttgggactgttggggagcagaactcctgggtgtggacgtgtcaagcgaaaccggattccaactatgtggtaagaagagaaagtttgttctgtggggccatggcttgaagaggcactgagcagccgccgtgtctcgagtcacatcactggggtttgtgtctgacaaatgggggaatgcagactttctccagagagctgggaattgacagttctctcaccccgcaggtggtcggctgccaggacggcaccatttccttctaccagcttattttcagcacagtccatgggctttacaaggaccgctatgcctacagggatagcatgactgacgtcattgtgcagcacctgatcactgagcagaaaggtaagaggcaggtccagaccttgggaagagggacaggtggaagcaggtggaaagggctggtgacagggcacttgaaatgacaggaaaaggtttctctttggcgttttgcaaacctgttagccactgggtctgtgtcttgttttcttttttttttttttttggtgggggaagtagggatgccagtctccttgaggatctcatgaaagcaataaatcctctctgaaaaatgtaccaactcagaattttgcacataatttcaaggagtacatgaatttccttagtgagggaggatgatttatgacaggttggagccaggtggttgacctgcatgggtcttcgtggacctttatcctttctggtcagagtcactctggggtgcttctccctcagccctgtctccacttgcctcctggtgggtccttctgccagagatgagcagtggaattggattggcacaggctaggtcagaagatcagagttcccggcctcgcatagtcattctaagccctaagactgcagtctctccctctgtccacttaagttgctgtgctggttaaatagactcaatccacttacttcaggtgtattcatatctggatgtgctggccttagtgcactgctaggtgcctttgcaagggatccaggttgggggttgtcttgtagattcagatgagtgtcctttggtccccctgggggaccctatctttttgaagattctggctgtggtggttggggcaaagccccttgggcagcttcacagtgtcccccttagggacattttctccacctggtctgtagtgggagtgtagagcctggtgtgtaccagaaattacatgtcttccccgtttgtcaaggaggtgggcagggagcggccagaggtgaggtcagttacttaggcaggcttctgatcaccgggggccactagtgctgtgcagaggagtttatatttgtatccagcaagtgatggtaacagtgagtagtttatttccatactcagttgtcagccttggaccatgaagattgtgtcctataggactttggatcccagggttcagcagagttgattgtatgtattagatactctaaagatttttcaatgagagtatctcactttaattgccagtagcgctaagtaaatgatggcttttaatttctctgccttgcaccttacataacaacctcttgctagaactagatatttttttctttgacagttcggattaaatgcaaagagcttgtcaagaagattgccatctacagaaatcgattggc

SEQ ID NO: 12508 - DNA, 565 bp, Homo sapiens
gatgcagaggcagagaggcctgtgttcaccatgggatgacacaggagaaaaggctggccagctctccctgtcttcccaactccctctaaagttggcgagaaaaagcccttaattgtattgcaatggttatggattcggaaatggtttttcccttgctgtgtgttctttttcctcagattggaaaggatcgggcactgaactttgacccctgctgcatcagctactttactaaaggcgagtacattttgctggggggttcagacaagcaagtatctcttttcaccaaggatggagtgcggcttgggactgttggggagcagaactcctgggtgtggacgtgtcaagcgaaaccggattccaactatgtggtggtcggctgccaggacggcaccatttccttctaccagcttattttcagcacagtccatgggctttacaaggaccgctatgcctacagggatagcatgactgacgtcattgtgcagcacctgatcactgagcagaaagttcggattaaatgcaaagagcttgtcaagaagattgccatctacagaaatcgattggc

SEQ ID NO: 12509 - DNA, 14823 bp, Homo sapiens
tataaatgacatcgcatttaagcctgatggaactcaactgattttggctgccggaagcagattactggtaggattttgtcttagtttcctcttaaagtgcttccctaacctccctcttgtgagtactctgaaatttgaccctttttttttttttttgagattaaaaaggcaagggtggaaaaaccttccctattactttttaatagggatggaaatgggctatttaaaacgggcaagtaaactatcagataagaacctgtgaacaataccacctttggggtcattcatctttccctttttactttgagacacccatgaaagagttgaaaacaatcacaatgcctttgaaactggactggtgtcagtttacattttgtcccccagaaaaattcaagcaacaggactgacggtgctgtgtccatgaaaagtcagatagcctgaccccaacttttaggcattggcctatctaaacagttccatatggatgttgtcctatttttcatattttcaaataacataagctccctctggaacctatccaggtatataaaagtaattttcagagaaccccttatgtttgaccaaaaaacctttgtatgatctctctttctgtctaagtctacttcctcttctctgttgtctctagatacgcagactgattaatctccattctttgtatggttaactacataatcttaaaacatggttaaattgttctgcagacttctctccagtgtaaacaatccaaactctattagtttttctacataggttatcttttccaatactctaaccatttcagaaagtttccgcttgatttctcagatggtgtgtgtgtgtgtgttttttttttttttttttttttttggagacagagtctggctctgtcgcccaggctggagtgcagtgacgcgatctcggcttactgcaagctccacctcccgggttcacaccattctcctgcctcagcctcctgagtagctgggactacaggcgcctgccgctacgctcagctaattttttgtatttttagtagagacggggtttctccgtgttagccaggatggtctcgatctcctgacctcgtaatccacccacctcggcctcccaaagtgctgggattacagaggtgagccaccgcgcccggccagatggtgtgtttttaaactctccacatagtgatagatgtcacatggctatcaaatacctaaatccatattacagctgggttttattttatttcttagagacagggttgtgctctgttgcccaagctggtgtgcagtagtgcagtcatagatcactgcagcctcaaactcctgggcttaagggatcttcccacctcagcctcccgagtagctaggactgtggacacacaccacctcgtccacctaatttttatttttttttatttttatttatttttattttttgtagagatggggtttcacttagttgcccaagctggtcttgaactcctggtttcaagcaatcctcccacttcagcctcccagagtgttgggatgacaggagtgagctaccatgcctggcctacagttgggttttataacattccctcctacttgaaagcccagagttctgtgactttcaaattcttggtagcaaatatgaaacatctattatgttgatttagtgcagagctggcattaaaatttaatcatgttgtagctggctctttttatgggctagttttatttaggagggcctgccttgatcaatcatatatccaaattcaggtaaggatgagtataaagaatttccatggagtgagtaattgaacctttggttctcaaggattggtagtatattcctggtcacatagtacatagacctgggtcctctacttcttggttacccaactttaagtcacgttgtttttggttttgcagtgcagtttttattggctacagatttagaatattgacacgtattgttataaaaacaaaaatagcagtagcaaccctgcaggaattctgactaatagatatcacatagataatctgtatttgtctcttttgccaggtttatgacacctctgatggcaccttacttcagcccctcaagggacacaaagacactgtgtactgtgtggcatatgcgaaggatggtaaaaggctgctctgggtttccattctctataatagcctcatcattgttcatttttctctttagtcactttttaattatttctagtaagctggagtacaagttgcaagttcagaagacagtgaagttgctaagacttcagtttggtcattcaatctagcaagtatttattgaggtcatctatgttccaggcactgttcaaggtgcttgagttacttcagagaaaaaaacggtggtccctccccttatggggcttctgttttatggggtggtggtgagaagtgagggaggaagaaagtatgagggaagacatacagtaaacatagtaaaaaggtaaattaagtagtatgctggaaggtgataactgttatggaagaagaaaaagtagagcagaatgagggggattgagagtgctgggcagggcagggggttgggtacagtattgaattagactagtgagggtgggctcattgagatgaggacaggtgaggaaaaagactttgaagtcaggaggcaatgagattgtgccagtgggcatcggggggaagagagctctttgcagaggaagagccattgcagaggccctcaggtgtgggtgtggctgctaggagctggatcaaagagaatcgggaattgtagaggatgaggataaagtggtaacagacatggggtggtcagatcataaagattttgattctcagtcaaaatggaactactgaaaggtcctcagcagaggagggatctgatttgatttgtattttaaaaggatccctctagttgctgagttggaaacaacctgcaagaggtgagggttaggacatctgtgtgaggaagcatcatccagacagggggtgatggtggctcagacctctgtgggggcagaggaggtgatgagaaattatcagactctggatataatgggagggtggagccaactggattgtctgacagattggatatgggctatgaagaaaaaggagtcaagtttttgacctgaggactgaaaggttggagttgccccccccactgagatggaaaagactgcaggtagagaaaagttatggttgaagatcagaaattcagttttatacatgctgaatttgagaaaagttgatgatgtcggagaggggagagaactgctggaacagagttgttgagtaggcaagaggagatgggatctagggcatagacggggtatttgctttagataggggcacagtaggaactgcagaggccagcagatggggacaatgtggtagtaggaatctaatggaaattctcaattccattttttttttcttcagtgaaataggaagcaacagcaactgagagtggcaatggggaagggaggtttcagagagttgaagagaaagggaaaaagtgtaaagtcactgcctcagagaatgggacagcgagtggacccaggaggtgtagtgagatccccggtgacatgaagggccctcttgaagattgtgatcatgaattgaaagtgagattagttggtgtgattgtgtctttttctccagcgattttgagctgcatagttgtagaggcagaagaggtgaatttaaccagaggtggttttgcaagcacatttgaagatgaagtaggagggcaagggagcagaaagtgtatacagataaataattatgtacattaaccttgaattgttggctgaataatgaagggagagaggacagcaatggagaagtagtaggttctggtggtgttgaaggattgttacagttggggtaccaggtgggttgggaaggaagggaagtggtgcatgaaactgagatttaaatttattttaaaataaatccatgttgtcccacagcataggattagtgggaagaaatgggctttggaatgagacagttgtgagttccaaccccaacccaacaccagagttctgtgagtctgagctggttattgagtctgagtcacgatttcttcatgtatcaaatggataacattgagataacattctgtagccactgccaagaagtcacaaaattgtaatgttataattcttgaatgaaccttggagattattccagtcccaggtttttaacttcttttggctgatgggcctctttgataatcagatggaagctttagaccactttctagaaagatgcaaattcttcatgtgtatgcagaatttcatgcatataattttagtctgattagtccagtctcttcactttagtcctgcataaagacataaacaattggccaggcacggtggctcatgcctataatcctactgaaatcctaaagctctgggagcctgagttgggaagattgcttaaggcaggagtttgagaccagcctgggcaacatagtgagactccctaaaatctggcctgggtgacagagctagactctgtctcttaaaaaaaaaaaaaaaagacaagtcatgtgacttgccaaggccatgcagcagattggcccaaagacaaaactaatttcttgcttcatagtcaggtgtgctgtaccatggtagtcatatttgtgtgtgtgtgtgtgtgtgtgtgtgtgtgtgtgtgtgtgtgtgcatgtttgagttcaagttcagaataatgttttagggagacctgtgaggagggagcctggagagctgaactgtttctgtctcatcctagtggctgttgaggaatgtgggtcagtccagggcccagtataaggcccagtaggtacagaagagctattgggcctctggtgcctctggtgtttataagcatagcagggctctttgacctgcaacaccattagggcacttgaggatgtcagagtgtgacccatcagtagtggcatttgcacagcactttgcagagtcctgtcacacacatctcacttgatgcttccaacaactctctgaagcaggcagcaaggggactcttatctccgctcaaagatgagaaaacagacttggagcaattacaggtgatggtggcagaggcaggcctaacccaggttctctgactgcagagtctttgttctttctagtgtatcatgctgcctcttcatgacacctgtataatgattaagaagtcttttagtcctcagaattggttttttcctcttagacctgaagattgagatacactgaattccagctttgctctttaagtctgcttgtttctgatttctcctttaagttcattaagttttttttgtttttttttttgagatgaagtctcgctctgtcgcccaggctggagtgcagtggcgcgatctcggctcatggcaacctctgactccctggttcaagtgattctcctgcctcagcctcctgagtagctgggactacaggcacgcgccaccatgcctagctaatttttgtattttcagtagagacagggtttcaccatgttggtcggcctgatctcaaactcctgacctcgtgatccgcccacctcggcctcccaaagtgctgggattacaggcgtgaaccaccatgcctggcccaagtttaataagtatttaatgagcaaccatgatataaaagtatgtaagacatagtttttttgttcaagaaaaacaatataatatgaagaaataatagaaatagctaatttttttttaattctattccaggcccagttctaagcaacataagggttaggggtgccactgcctgtgcaataaaaaatctgcatgtaatttctgaaccccccaaaactttactattaatagcctactgttgaccagaagccttacctgttacataaacagttaacacatttttaatattatatgtattatatattgtattcttaaaataagctagataaaatgttaattgagaaaaaagaaaaatatatttactcttcattaaatggaagtggatcatcataaaggtcttcatcttcattgtcttcaggttgaataggctgaggaggaggaggaggaggaggaggaggaagagggattggtgatgctgtgccagggagacagaggcaaaagaaaattcacatgtaaaagtggactcatgtagttaaaactcatgttgttcaggggtcaactgtatgtacacatgtacatacactcatttaatcttcacaccaaccatgaggtaaatactaacattgtatccatttttcaaataaggaaatgaaagctcttcagtagcttgtttgggtcatgcagctggtcagtgagatctctaggaattctgacccagagactctgagcccaaagcttatgcttttcatcaccatcacctgctacctaccaggatgagggaggagtgatggaaatagtaagagcagtttctttgtttatttagtatttgcagcaatatcatatggctcaccctaatatctactatttcagctactgtaaaaggtacttggccgggtgtggtggctcatgcttgtgatctcagcactttgggaagccaaggcgggtggatcatgaggtcaggagtttgagacaagcctggccaacacagtgaaacctcgtctgtactaaatatataaaaattagctgggcatggtggtgtgtgcctgtaatcccaactacttgggaggctgaggcaggagaattgcttgaacctgggaggcggagattgcagtgagctgagattatgccactgctctctggcctgggtgacagagctagactccgtctcaaaaagggccagtcgtggtgactcatgcctgtaatcacagcactttggaaggcggatcacctgaggtcaggagtttgagaccagcctgcccaacatggagaaaccccatctctactaaaaatacaaaaaattagccaggtgtggtggtgggcacctgtagtcccagctactcgggaggctgaggcaggataatcgcttgaacccgggagtcggaggttgcggtgagccgagatcgtgccactgcactatagcctgggcaacagagtgagacttagtctcaaaaaaaaggtactttacagatactatcttagttgactcccataaaaagactctgaggaagatactgttcctctgtgtttcagatgaaggcattgaggctcagagaacagtgacttgcccaaggtcaccttccacttgccctgtgaataaagtctaaaagtccttaagatgtacagaatgtggcacatacttacctcttaatcctcgtctctcaccagagtaggtgaagaccccgttatttgctgccatggtaccgtgatcctcttccaaatgcttataaatgtggaacagtgtaattaataacaaattacttgttatatgttgcctctctccagtctgttccttcataaagcccaagtagtatgaaaatgcgaatctgatctatcactctttgcttaaaacctttctttggcttcccattgctttaggataaagagcaaggcctctgctgtgtccctgaggtcccaagagatccttccacaacccacctcacccttccctccgttccatgatgactccgctcattccctcagacatgccaggcttttcctgcttcagggcctttgcacatctgttccatccatgtggatgggtctgtctcctctctacatctggctaagctctgctcatcctttaggtctccactgaaggatctcatccttagagaaatgttccctcatctaaattaggtcccccaggagatgttgaccaaagggtagtttcagtcagacaaaaggagtacatttttgagatctattgcacagcatggtgaccatagttaataatagcgtatatttcaaaactggcacaggaatagtttttttttttttttttttttgagatggagtctcgctctgttgcccaggctggagtgcagtggcgtgatctcggctcactgcaagccccacctcctgggttcactccattttcccacctcagcctccagagtagctgggactacaggcgcccgtcaccaggccggctaattttgtttttgtatttttagtagagacggggtttcaccgtgttggccaggatggtctcgatctcctgacctcgtgatccacccgcctcagccctccaaagtgctgggattacaggtgtgagccactgttcccggccaggaatagattttaaatgttctcactataaaaaaataagtatctgcagtgatggatatgttaattagcttaatcattcttcaatgtgtatgtatataaaataccacattgtacttcataagtagatataattattatttgtcaaaaataaaaatttaagtaaaaaagtaaatcaggttccccagttattctctttcataggatccgtgtcttaccatgttgtatttgtgttagattaatttgatgtgtacttcttacactagactgaactttatgaaagtagggatcatgtgtgttttaatcattacttaatccctagcatagaacatgacagctacatgtagtaggctcccaatacatctttgtttactcagtgtcagacaaagcaggtttggaacccaaatattctgactccaaggtcctgcctcccagtactgataagaactaggaaagaagctaacacttactaggtaccttaaagaactagttttctaaagaattctctctgggaaatgctggtttaagataaatgtaagactttccattttacaaacacttttaggcaagcgctttgcttctggatcagctgacaaaagcgttattatctggacatcaaaactggaaggcattctgaagtacacgtaagtaacttaggtgtacagtattatgagtttgatgcttattgaataattgcagcaaaagcctcttagaaaagatgtaggagaaaacttttttctcttaaattgaacttgaaattaagttgtgggtgtgtgtggttggtataggaaggttgagtagtgaataagttaatgaatatttcttggccacttactggcgtggccagcactgggctaggtgcttttatgtagctcatctcagttcatctgacattgtagactttatcccacccccaacctgtcatcttccagtgtccctgtctcagagaatggccttatatccacccagtgtcaaatgtcagaaacttggggtcagtgtgctccaggcctcctcttactattggggatctgccgtgttcttcccctgttcctctactagttggtccctatttaccctgcagatctcagactcaaatgtcagtttctttgtaaggactttcctgcctctctagactggaacaggtctctttcgaggcatttctcacaattgcagttttaggtttattctggtgactgatcagtattgctcatcggcctgtaagttccataagaacagatactgcatctattttttgttttgttttgttttgttttgagacagagtcttgctctgttgcccaggctggagtgcagtggcacgatctcggctcaccgcaagctccacctcccaggttcacgccattctcctgcctcagcctcccgagtagctgggactataggcgctcaccaccatgccaggctaattttttgtatttttagtagagatggggtttcaccatgttagctaggatggtctcgatctcctgactacatctattttttttttctcactcttgtgtccctgatacaatgcctagcccataattggtactcaccaattttccttccttccttctttccttccttccttccttccttccttccctccctccctcccttcttccttccttccttccctccctccctcccttcttccttccttccttccttccttccttccttccttccttccttccctccctccctcccttcttccttccttccttccttccttccttcctttcttttcagtcttgctctgtctcccaggctacagtgcagtggtaactagctcactgcaactacaaccttccaggctcaaataatcctcttacttcagcttcccaaatagctggaactgcaggtgcacacccccacaccaggccaatttttaaatttttttttttcttggtagagacagggtttcactttgttgcctgtactggtcttgaactcctgggctcaagcagtcctctcaaagtactgggattacagatacgagccactgcacctggcctcttttcaattgtggtaaaatatacatgacataaaatttatcatattaactactttttaagtttacagtttaatgttaaatacatttacattgttgtgcaaccaatctcccaaactcttttatcctgctaaactaaaattctatatccttcaaatacctactcacccttctctcctacccccagcccctgaaaaccagcattctactttctgtctctctgagtttgactgctttacatacctcatataagtagagtcatacaatgtttgttcttttgtggctgagttatttcatttcacgtaatgtcctcaaggctcatctgtgttgtagcatgtgtcagaatttactttctgtgttgtagcatgtgtcagaatttacttccttttttttctttattattatttttttttatgaagacgaggtctcactatgactcctgagctcaagcaatccttctcccttggccgcccaaactgctgggattacaggtgtgagccactgggctcagcttccttcctttttaagtctgaatattattccattgtatatatagaccacattttctttatccattcatctgttgatggacacttgtgttgcttctgcttcttagctattatgaataatgctgctatgaacatgggtgtacaaatcaacaaacaatttttgaaggaatgaatgaatgagtgaagttgtaagtaaagtattacccacaagtgaaggactaaaacgggttgagacgccttgcatggtacatgatttgctcagctttcattgttgtctaaggatttgtcatgtttccagatcttggtctgtgatgtcttcattgcacctccatcttccatttctgggcctccacaaaacagtaagagtaacagccacagataaagcacctaaaggccaaggtgggaggattgattgcttgaggccaagcgttcaaaaccaacctggccaaaagtgagtccccatctctacaaataagaaaacagtgggtgaggagaaggagaattaattctttaggagtaggagaattaatttctgtgctttttgttggtcacttgcagaagagcatgtggtctaaagtcagaggctgtgggctcattattaaaatcttcagttgtagccactgaaatctttgtggtttgctgcatagtaatctacagttgtttacttcccaggcacaatgatgctatacaatgtgtctcctacaatcctattactcatcaactggcatcttgttcctccagtgactttggtacgttctgattcctgatgtcctgtcctggaataactgaaaatctgggctaaaaatgctaaaatgcattcagaatatggtgattttatcctgagagagttaatactacttctctaccttcaatggctgaggggaggctgacagttattctttaaattgtgtggaaaccaagacagtgaatggtgacctttactctggtaagacatcagagactacaggaagggccccagcaaaggaaatggtaacaagattgggagggcacaggcataacttggtgttgctgcctttgggaagccttcccttggtgttgctgcctctgggaagccttccctgactcaccctggcagagacagtgcagttgtcctcacctttgtattgacccacatctatgtttatgtgaaattcttcactgttgcggttctacttcttgtgcaatttgtcgtcattactggtttaggtggctgtagctgtcctccctgaggggctgaacaccttgaggagttcatcctggccacggtcccgtgccagcattacagcactggtgtagtactggcacaaaagaggtgtcagtaaaatgtctgtggagggaggaagggagtgaaattgggcagaggcttgtaggttatttccattaatggttgattctgttttcagctctatcagtctgtgttcgttgctagtggatacaatgaagtcactagatgaggagtcagaggcctaatccctctcagtgttccagttcccttatctaaaaggagcatgctactcactgtgtctcactgatacggttctggttctgaggttcaaaagagagaatggaattgaaagccaattgtataaatacatggagaaaggcctgtcatttgtttaacatattttatagcattttcttcatgtgaagcactggtctgtgtgcttacactggaatattaaaaaggcaaaatagaatccctaccctcaaggagcttgtggtcttaggagaaggtgggattaaaaaaaatataatattaagtactagtatttattgaatgcttgcagtgtgctaggcactgttctaaggattagaaatgaatttctatttgagctttatgacagcccctgaggtgtcaggtattattctcattcccaccctactgatgaaaaagaggtagaggtcccttagctagtaagtggaggaaccagggcttggactttagaccaggtgattgcatacagagcctgctctgctaagcactgctgaaggaggcccaggaggaaggagtttcttccagcttggggctccaggcaggcttagtggaacacagataacatgtgcacacgtcaaaatgtttggaggaagcgttctggaccaggggaaaggcaaaaaataacttgtttgatgttgcacttggccatgtatttgtgcactggagttaccttcttgattgtacttcgcaacttggcaaatagaagaatttgcttatgttgtctagacatacacttgctatgaggcactgagccagggcatctgggacaggggggagcaagccttaggtgaccagtgtgccatgggagaggcacagctcagatagagtcatgtgttgtgattgagacctatgaaagaaaactagattttcagaaagcatcattgttattttaaatgctaggttatactctggttgcagtgtcaaagttataaacaatgaaactgtcatttctttgagagtcaaatccctgaaaagttggctagaactttaccaatctattttatttttcttctgaaagaatgatagattcatagtaagttacaaagatggtaccaagaagtctatgtacttttcatccagtttcccccagtggatccatcttatgtaactattatacaatatcaagaccaggaaactgagactggcacaaagtgtgtatattatatagttctgttgttttatcgcatgtgtagattgccatcagcgtgacacagaactaagccatcaccatgcagttaccacttagtgtcatatctactcaccttacctccagttatctccaaaccctggtaaccacaaatctgttctccatttctataattttgtcattcaagaatgttatataaatggaatcgtacagtatatgaccttttgagattatgttttttcattcagcataaaatcctggagatccatctaagttgttgtatgtttcaattatttgttcctttttattgctgggtagtattccaaccaatccatcttcttttatattattgtgcattgaagggttgtggtctcctgaacagaagtctgtctccaaacacaaatcaagcagcaagatcatctgctgcaggtaagtgcagctctgacgataagatttatgttccttcatcttccacacagactctcaaaatccaattatttcatgcagcagagaaggtcttgtgttaggtagttggtttaggcccctgtatttccttttttcttctttcttcgtctcctcgatgggaaagacttgtgcctttgatcatgaagcaaaagagaactacaagttgccttcatgcagttacttagcaacaagcctcaacatccagctatactgagtggaggcttgttgaaaatgtgaggctgtcattgtccaggcagcatgtgtggggaagaaagctttccctcccacactttgatgctagacctgaattagaatccagaatctctcattgacaggccatgtgacctcaggaaagttactaaatctttctgagctggagctttacgttcctcatctgacagatagggataaaaatactgacttgacgagattgttgtgaaatgcacacaaactcatgagtgtaaagcgtgcaggacagtacctggtgtacagtagacactctaaatggtagctattcttgctgttcagcttctaggagtatatcccttccgttcagcatctgttgagcaccttctacaaagcaagcactgttctaggggttggaagacaccaagtctgttcttaaggtgctctttaagtgggaggggattgagatggagagtgggaagtggtggctggcccagagatgtaggcacaagctaagggctgtcatagaggtatgtacagagggctgggggagctcagaaaaaggcaccaaatggtgccttcacttctcactgtttattacagaactaaatagcattttaagtttgatcctctgactttatgtcaggaccggcaataatgaaaccatatcccagctgttgctgcctcatcagacttttatttcaaaccaaggcatcatcctcactagttttaccttctgtggggtgcttcccctatccccatgccttttgttggttgtgtacacagctggacaaatgatggtcagtacctggcgctggggatgttcaatgggatcatcagcatac

SEQ ID NO: 12510 - DNA, 329 bp, Homo sapiens
tataaatgacatcgcatttaagcctgatggaactcaactgattttggctgccggaagcagattactggtttatgacacctctgatggcaccttacttcagcccctcaagggacacaaagacactgtgcacaatgatgctatacaatgtgtctcctacaatcctattactcatcaactggcatcttgttcctccagtgactttgggttgtggtctcctgaacagaagtctgtctccaaacacaaatcaagcagcaagatcatctgctgcagctggacaaatgatggtcagtacctggcgctggggatgttcaatgggatcatcagcatac

SEQ ID NO: 12511 - DNA, 14824 bp, Homo sapiens
tataaatgacatcgcatttaagcctgatggaactcaactgattttggctgccggaagcagattactggtaggattttgtcttagtttcctcttaaagtgcttccctaacctccctcttgtgagtactctgaaatttgaccctttttttttttttttgagattaaaaaggcaagggtggaaaaaccttccctattactttttaatagggatggaaatgggctatttaaaacgggcaagtaaactatcagataagaacctgtgaacaataccacctttggggtcattcatctttccctttttactttgagacacccatgaaagagttgaaaacaatcacaatgcctttgaaactggactggtgtcagtttacattttgtcccccagaaaaattcaagcaacaggactgacggtgctgtgtccatgaaaagtcagatagcctgaccccaacttttaggcattggcctatctaaacagttccatatggatgttgtcctatttttcatattttcaaataacataagctccctctggaacctatccaggtatataaaagtaattttcagagaaccccttatgtttgaccaaaaaacctttgtatgatctctctttctgtctaagtctacttcctcttctctgttgtctctagatacgcagactgattaatctccattctttgtatggttaactacataatcttaaaacatggttaaattgttctgcagacttctctccagtgtaaacaatccaaactctattagtttttctacataggttatcttttccaatactctaaccatttcagaaagtttccgcttgatttctcagatggtgtgtgtgtgtgtgttttttttttttttttttttttttggagacagagtctggctctgtcgcccaggctggagtgcagtgacgcgatctcggcttactgcaagctccacctcccgggttcacaccattctcctgcctcagcctcctgagtagctgggactacaggcgcctgccgctacgctcagctaattttttgtatttttagtagagacggggtttctccgtgttagccaggatggtctcgatctcctgacctcgtaatccacccacctcggcctcccaaagtgctgggattacagaggtgagccaccgcgcccggccagatggtgtgtttttaaactctccacatagtgatagatgtcacatggctatcaaatacctaaatccatattacagctgggttttattttatttcttagagacagggttgtgctctgttgcccaagctggtgtgcagtagtgcagtcatagatcactgcagcctcaaactcctgggcttaagggatcttcccacctcagcctcccgagtagctaggactgtggacacacaccacctcgtccacctaatttttatttttttttatttttatttatttttattttttgtagagatggggtttcacttagttgcccaagctggtcttgaactcctggtttcaagcaatcctcccacttcagcctcccagagtgttgggatgacaggagtgagctaccatgcctggcctacagttgggttttataacattccctcctacttgaaagcccagagttctgtgactttcaaattcttggtagcaaatatgaaacatctattatgttgatttagtgcagagctggcattaaaatttaatcatgttgtagctggctctttttatgggctagttttatttaggagggcctgccttgatcaatcatatatccaaattcaggtaaggatgagtataaagaatttccatggagtgagtaattgaacctttggttctcaaggattggtagtatattcctggtcacatagtacatagacctgggtcctctacttcttggttacccaactttaagtcacgttgtttttggttttgcagtgcagtttttattggctacagatttagaatattgacacgtattgttataaaaacaaaaatagcagtagcaaccctgcaggaattctgactaatagatatcacatagataatctgtatttgtctcttttgccaggtttatgacacctctgatggcaccttacttcagcccctcaagggacacaaagacactgtgtactgtgtggcatatgcgaaggatggtaaaaggctgctctgggtttccattctctataatagcctcatcattgttcatttttctctttagtcactttttaattatttctagtaagctggagtacaagttgcaagttcagaagacagtgaagttgctaagacttcagtttggtcattcaatctagcaagtatttattgaggtcatctatgttccaggcactgttcaaggtgcttgagttacttcagagaaaaaaacggtggtccctccccttatggggcttctgttttatggggtggtggtgagaagtgagggaggaagaaagtatgagggaagacatacagtaaacatagtaaaaaggtaaattaagtagtatgctggaaggtgataactgttatggaagaagaaaaagtagagcagaatgagggggattgagagtgctgggcagggcagggggttgggtacagtattgaattagactagtgagggtgggctcattgagatgaggacaggtgaggaaaaagactttgaagtcaggaggcaatgagattgtgccagtgggcatcggggggaagagagctctttgcagaggaagagccattgcagaggccctcaggtgtgggtgtggctgctaggagctggatcaaagagaatcgggaattgtagaggatgaggataaagtggtaacagacatggggtggtcagatcataaagattttgattctcagtcaaaatggaactactgaaaggtcctcagcagaggagggatctgatttgatttgtattttaaaaggatccctctagttgctgagttggaaacaacctgcaagaggtgagggttaggacatctgtgtgaggaagcatcatccagacagggggtgatggtggctcagacctctgtgggggcagaggaggtgatgagaaattatcagactctggatataatgggagggtggagccaactggattgtctgacagattggatatgggctatgaagaaaaaggagtcaagtttttgacctgaggactgaaaggttggagttgccccccccactgagatggaaaagactgcaggtagagaaaagttatggttgaagatcagaaattcagttttatacatgctgaatttgagaaaagttgatgatgtcggagaggggagagaactgctggaacagagttgttgagtaggcaagaggagatgggatctagggcatagacggggtatttgctttagataggggcacagtaggaactgcagaggccagcagatggggacaatgtggtagtaggaatctaatggaaattctcaattccattttttttttcttcagtgaaataggaagcaacagcaactgagagtggcaatggggaagggaggtttcagagagttgaagagaaagggaaaaagtgtaaagtcactgcctcagagaatgggacagcgagtggacccaggaggtgtagtgagatccccggtgacatgaagggccctcttgaagattgtgatcatgaattgaaagtgagattagttggtgtgattgtgtctttttctccagcgattttgagctgcatagttgtagaggcagaagaggtgaatttaaccagaggtggttttgcaagcacatttgaagatgaagtaggagggcaagggagcagaaagtgtatacagataaataattatgtacattaaccttgaattgttggctgaataatgaagggagagaggacagcaatggagaagtagtaggttctggtggtgttgaaggattgttacagttggggtaccaggtgggttgggaaggaagggaagtggtgcatgaaactgagatttaaatttattttaaaataaatccatgttgtcccacagcataggattagtgggaagaaatgggctttggaatgagacagttgtgagttccaaccccaacccaacaccagagttctgtgagtctgagctggttattgagtctgagtcacgatttcttcatgtatcaaatggataacattgagataacattctgtagccactgccaagaagtcacaaaattgtaatgttataattcttgaatgaaccttggagattattccagtcccaggtttttaacttcttttggctgatgggcctctttgataatcagatggaagctttagaccactttctagaaagatgcaaattcttcatgtgtatgcagaatttcatgcatataattttagtctgattagtccagtctcttcactttagtcctgcataaagacataaacaattggccaggcacggtggctcatgcctataatcctactgaaatcctaaagctctgggagcctgagttgggaagattgcttaaggcaggagtttgagaccagcctgggcaacatagtgagactccctaaaatctggcctgggtgacagagctagactctgtctcttaaaaaaaaaaaaaaaagacaagtcatgtgacttgccaaggccatgcagcagattggcccaaagacaaaactaatttcttgcttcatagtcaggtgtgctgtaccatggtagtcatatttgtgtgtgtgtgtgtgtgtgtgtgtgtgtgtgtgtgtgtgtgtgcatgtttgagttcaagttcagaataatgttttagggagacctgtgaggagggagcctggagagctgaactgtttctgtctcatcctagtggctgttgaggaatgtgggtcagtccagggcccagtataaggcccagtaggtacagaagagctattgggcctctggtgcctctggtgtttataagcatagcagggctctttgacctgcaacaccattagggcacttgaggatgtcagagtgtgacccatcagtagtggcatttgcacagcactttgcagagtcctgtcacacacatctcacttgatgcttccaacaactctctgaagcaggcagcaaggggactcttatctccgctcaaagatgagaaaacagacttggagcaattacaggtgatggtggcagaggcaggcctaacccaggttctctgactgcagagtctttgttctttctagtgtatcatgctgcctcttcatgacacctgtataatgattaagaagtcttttagtcctcagaattggttttttcctcttagacctgaagattgagatacactgaattccagctttgctctttaagtctgcttgtttctgatttctcctttaagttcattaagttttttttgtttttttttttgagatgaagtctcgctctgtcgcccaggctggagtgcagtggcgcgatctcggctcatggcaacctctgactccctggttcaagtgattctcctgcctcagcctcctgagtagctgggactacaggcacgcgccaccatgcctagctaatttttgtattttcagtagagacagggtttcaccatgttggtcggcctgatctcaaactcctgacctcgtgatccgcccacctcggcctcccaaagtgctgggattacaggcgtgaaccaccatgcctggcccaagtttaataagtatttaatgagcaaccatgatataaaagtatgtaagacatagtttttttgttcaagaaaaacaatataatatgaagaaataatagaaatagctaatttttttttaattctattccaggcccagttctaagcaacataagggttaggggtgccactgcctgtgcaataaaaaatctgcatgtaatttctgaaccccccaaaactttactattaatagcctactgttgaccagaagccttacctgttacataaacagttaacacatttttaatattatatgtattatatattgtattcttaaaataagctagataaaatgttaattgagaaaaaagaaaaatatatttactcttcattaaatggaagtggatcatcataaaggtcttcatcttcattgtcttcaggttgaataggctgaggaggaggaggaggaggaggaggaggaagagggattggtgatgctgtgccagggagacagaggcaaaagaaaattcacatgtaaaagtggactcatgtagttaaaactcatgttgttcaggggtcaactgtatgtacacatgtacatacactcatttaatcttcacaccaaccatgaggtaaatactaacattgtatccatttttcaaataaggaaatgaaagctcttcagtagcttgtttgggtcatgcagctggtcagtgagatctctaggaattctgacccagagactctgagcccaaagcttatgcttttcatcaccatcacctgctacctaccaggatgagggaggagtgatggaaatagtaagagcagtttctttgtttatttagtatttgcagcaatatcatatggctcaccctaatatctactatttcagctactgtaaaaggtacttggccgggtgtggtggctcatgcttgtgatctcagcactttgggaagccaaggcgggtggatcatgaggtcaggagtttgagacaagcctggccaacacagtgaaacctcgtctgtactaaatatataaaaattagctgggcatggtggtgtgtgcctgtaatcccaactacttgggaggctgaggcaggagaattgcttgaacctgggaggcggagattgcagtgagctgagattatgccactgctctctggcctgggtgacagagctagactccgtctcaaaaagggccagtcgtggtgactcatgcctgtaatcacagcactttggaaggcggatcacctgaggtcaggagtttgagaccagcctgcccaacatggagaaaccccatctctactaaaaatacaaaaaattagccaggtgtggtggtgggcacctgtagtcccagctactcgggaggctgaggcaggataatcgcttgaacccgggagtcggaggttgcggtgagccgagatcgtgccactgcactatagcctgggcaacagagtgagacttagtctcaaaaaaaaggtactttacagatactatcttagttgactcccataaaaagactctgaggaagatactgttcctctgtgtttcagatgaaggcattgaggctcagagaacagtgacttgcccaaggtcaccttccacttgccctgtgaataaagtctaaaagtccttaagatgtacagaatgtggcacatacttacctcttaatcctcgtctctcaccagagtaggtgaagaccccgttatttgctgccatggtaccgtgatcctcttccaaatgcttataaatgtggaacagtgtaattaataacaaattacttgttatatgttgcctctctccagtctgttccttcataaagcccaagtagtatgaaaatgcgaatctgatctatcactctttgcttaaaacctttctttggcttcccattgctttaggataaagagcaaggcctctgctgtgtccctgaggtcccaagagatccttccacaacccacctcacccttccctccgttccatgatgactccgctcattccctcagacatgccaggcttttcctgcttcagggcctttgcacatctgttccatccatgtggatgggtctgtctcctctctacatctggctaagctctgctcatcctttaggtctccactgaaggatctcatccttagagaaatgttccctcatctaaattaggtcccccaggagatgttgaccaaagggtagtttcagtcagacaaaaggagtacatttttgagatctattgcacagcatggtgaccatagttaataatagcgtatatttcaaaactggcacaggaatagtttttttttttttttttttttgagatggagtctcgctctgttgcccaggctggagtgcagtggcgtgatctcggctcactgcaagccccacctcctgggttcactccattttcccacctcagcctccagagtagctgggactacaggcgcccgtcaccaggccggctaattttgtttttgtatttttagtagagacggggtttcaccgtgttggccaggatggtctcgatctcctgacctcgtgatccacccgcctcagccctccaaagtgctgggattacaggtgtgagccactgttcccggccaggaatagattttaaatgttctcactataaaaaaataagtatctgcagtgatggatatgttaattagcttaatcattcttcaatgtgtatgtatataaaataccacattgtacttcataagtagatataattattatttgtcaaaaataaaaatttaagtaaaaaagtaaatcaggttccccagttattctctttcataggatccgtgtcttaccatgttgtatttgtgttagattaatttgatgtgtacttcttacactagactgaactttatgaaagtagggatcatgtgtgttttaatcattacttaatccctagcatagaacatgacagctacatgtagtaggctcccaatacatctttgtttactcagtgtcagacaaagcaggtttggaacccaaatattctgactccaaggtcctgcctcccagtactgataagaactaggaaagaagctaacacttactaggtaccttaaagaactagttttctaaagaattctctctgggaaatgctggtttaagataaatgtaagactttccattttacaaacacttttaggcaagcgctttgcttctggatcagctgacaaaagcgttattatctggacatcaaaactggaaggcattctgaagtacacgtaagtaacttaggtgtacagtattatgagtttgatgcttattgaataattgcagcaaaagcctcttagaaaagatgtaggagaaaacttttttctcttaaattgaacttgaaattaagttgtgggtgtgtgtggttggtataggaaggttgagtagtgaataagttaatgaatatttcttggccacttactggcgtggccagcactgggctaggtgcttttatgtagctcatctcagttcatctgacattgtagactttatcccacccccaacctgtcatcttccagtgtccctgtctcagagaatggccttatatccacccagtgtcaaatgtcagaaacttggggtcagtgtgctccaggcctcctcttactattggggatctgccgtgttcttcccctgttcctctactagttggtccctatttaccctgcagatctcagactcaaatgtcagtttctttgtaaggactttcctgcctctctagactggaacaggtctctttcgaggcatttctcacaattgcagttttaggtttattctggtgactgatcagtattgctcatcggcctgtaagttccataagaacagatactgcatctattttttgttttgttttgttttgttttgagacagagtcttgctctgttgcccaggctggagtgcagtggcacgatctcggctcaccgcaagctccacctcccaggttcacgccattctcctgcctcagcctcccgagtagctgggactataggcgctcaccaccatgccaggctaattttttgtatttttagtagagatggggtttcaccatgttagctaggatggtctcgatctcctgactacatctattttttttttctcactcttgtgtccctgatacaatgcctagcccataattggtactcaccaattttccttccttccttctttccttccttccttccttccttccttccctccctccctcccttcttccttccttccttccctccctccctcccttcttccttccttccttccttccttccttccttccttccttccttccctccctccctcccttcttccttccttccttccttccttccttcctttcttttcagtcttgctctgtctcccaggctacagtgcagtggtaactagctcactgcaactacaaccttccaggctcaaataatcctcttacttcagcttcccaaatagctggaactgcaggtgcacacccccacaccaggccaatttttaaatttttttttttcttggtagagacagggtttcactttgttgcctgtactggtcttgaactcctgggctcaagcagtcctctcaaagtactgggattacagatacgagccactgcacctggcctcttttcaattgtggtaaaatatacatgacataaaatttatcatattaactactttttaagtttacagtttaatgttaaatacatttacattgttgtgcaaccaatctcccaaactcttttatcctgctaaactaaaattctatatccttcaaatacctactcacccttctctcctacccccagcccctgaaaaccagcattctactttctgtctctctgagtttgactgctttacatacctcatataagtagagtcatacaatgtttgttcttttgtggctgagttatttcatttcacgtaatgtcctcaaggctcatctgtgttgtagcatgtgtcagaatttactttctgtgttgtagcatgtgtcagaatttacttccttttttttctttattattatttttttttatgaagacgaggtctcactatgactcctgagctcaagcaatccttctcccttggccgcccaaactgctgggattacaggtgtgagccactgggctcagcttccttcctttttaagtctgaatattattccattgtatatatagaccacattttctttatccattcatctgttgatggacacttgtgttgcttctgcttcttagctattatgaataatgctgctatgaacatgggtgtacaaatcaacaaacaatttttgaaggaatgaatgaatgagtgaagttgtaagtaaagtattacccacaagtgaaggactaaaacgggttgagacgccttgcatggtacatgatttgctcagctttcattgttgtctaaggatttgtcatgtttccagatcttggtctgtgatgtcttcattgcacctccatcttccatttctgggcctccacaaaacagtaagagtaacagccacagataaagcacctaaaggccaaggtgggaggattgattgcttgaggccaagcgttcaaaaccaacctggccaaaagtgagtccccatctctacaaataagaaaacagtgggtgaggagaaggagaattaattctttaggagtaggagaattaatttctgtgctttttgttggtcacttgcagaagagcatgtggtctaaagtcagaggctgtgggctcattattaaaatcttcagttgtagccactgaaatctttgtggtttgctgcatagtaatctacagttgtttacttcccaggcacaatgatgctatacaatgtgtctcctacaatcctattactcatcaactggcatcttgttcctccagtgactttggtacgttctgattcctgatgtcctgtcctggaataactgaaaatctgggctaaaaatgctaaaatgcattcagaatatggtgattttatcctgagagagttaatactacttctctaccttcaatggctgaggggaggctgacagttattctttaaattgtgtggaaaccaagacagtgaatggtgacctttactctggtaagacatcagagactacaggaagggccccagcaaaggaaatggtaacaagattgggagggcacaggcataacttggtgttgctgcctttgggaagccttcccttggtgttgctgcctctgggaagccttccctgactcaccctggcagagacagtgcagttgtcctcacctttgtattgacccacatctatgtttatgtgaaattcttcactgttgcggttctacttcttgtgcaatttgtcgtcattactggtttaggtggctgtagctgtcctccctgaggggctgaacaccttgaggagttcatcctggccacggtcccgtgccagcattacagcactggtgtagtactggcacaaaagaggtgtcagtaaaatgtctgtggagggaggaagggagtgaaattgggcagaggcttgtaggttatttccattaatggttgattctgttttcagctctatcagtctgtgttcgttgctagtggatacaatgaagtcactagatgaggagtcagaggcctaatccctctcagtgttccagttcccttatctaaaaggagcatgctactcactgtgtctcactgatacggttctggttctgaggttcaaaagagagaatggaattgaaagccaattgtataaatacatggagaaaggcctgtcatttgtttaacatattttatagcattttcttcatgtgaagcactggtctgtgtgcttacactggaatattaaaaaggcaaaatagaatccctaccctcaaggagcttgtggtcttaggagaaggtgggattaaaaaaaatataatattaagtactagtatttattgaatgcttgcagtgtgctaggcactgttctaaggattagaaatgaatttctatttgagctttatgacagcccctgaggtgtcaggtattattctcattcccaccctactgatgaaaaagaggtagaggtcccttagctagtaagtggaggaaccagggcttggactttagaccaggtgattgcatacagagcctgctctgctaagcactgctgaaggaggcccaggaggaaggagtttcttccagcttggggctccaggcaggcttagtggaacacagataacatgtgcacacgtcaaaatgtttggaggaagcgttctggaccaggggaaaggcaaaaaataacttgtttgatgttgcacttggccatgtatttgtgcactggagttaccttcttgattgtacttcgcaacttggcaaatagaagaatttgcttatgttgtctagacatacacttgctatgaggcactgagccagggcatctgggacaggggggagcaagccttaggtgaccagtgtgccatgggagaggcacagctcagatagagtcatgtgttgtgattgagacctatgaaagaaaactagattttcagaaagcatcattgttattttaaatgctaggttatactctggttgcagtgtcaaagttataaacaatgaaactgtcatttctttgagagtcaaatccctgaaaagttggctagaactttaccaatctattttatttttcttctgaaagaatgatagattcatagtaagttacaaagatggtaccaagaagtctatgtacttttcatccagtttcccccagtggatccatcttatgtaactattatacaatatcaagaccaggaaactgagactggcacaaagtgtgtatattatatagttctgttgttttatcgcatgtgtagattgccatcagcgtgacacagaactaagccatcaccatgcagttaccacttagtgtcatatctactcaccttacctccagttatctccaaaccctggtaaccacaaatctgttctccatttctataattttgtcattcaagaatgttatataaatggaatcgtacagtatatgaccttttgagattatgttttttcattcagcataaaatcctggagatccatctaagttgttgtatgtttcaattatttgttcctttttattgctgggtagtattccaaccaatccatcttcttttatattattgtgcattgaagggttgtggtctcctgaacagaagtctgtctccaaacacaaatcaagcagcaagatcatctgctgcaggtaagtgcagctctgacgataagatttatgttccttcatcttccacacagactctcaaaatccaattatttcatgcagcagagaaggtcttgtgttaggtagttggtttaggcccctgtatttccttttttcttctttcttcgtctcctcgatgggaaagacttgtgcctttgatcatgaagcaaaagagaactacaagttgccttcatgcagttacttagcaacaagcctcaacatccagctatactgagtggaggcttgttgaaaatgtgaggctgtcattgtccaggcagcatgtgtggggaagaaagctttccctcccacactttgatgctagacctgaattagaatccagaatctctcattgacaggccatgtgacctcaggaaagttactaaatctttctgagctggagctttacgttcctcatctgacagatagggataaaaatactgacttgacgagattgttgtgaaatgcacacaaactcatgagtgtaaagcgtgcaggacagtacctggtgtacagtagacactctaaatggtagctattcttgctgttcagcttctaggagtatatcccttccgttcagcatctgttgagcaccttctacaaagcaagcactgttctaggggttggaagacaccaagtctgttcttaaggtgctctttaagtgggaggggattgagatggagagtgggaagtggtggctggcccagagatgtaggcacaagctaagggctgtcatagaggtatgtacagagggctgggggagctcagaaaaaggcaccaaatggtgccttcacttctcactgtttattacagaactaaatagcattttaagtttgatcctctgactttatgtcaggaccggcaataatgaaaccatatcccagctgttgctgcctcatcagacttttatttcaaaccaaggcatcatcctcactagttttaccttctgtggggtgcttcccctatccccatgccttttgttggttgtgtacacagctggacaaatgatggtcagtacctggcgctggggatgttcaatgggatcatcagcatacg

SEQ ID NO: 12512 - DNA, 350 bp, Homo sapiens
tataaatgacatcgcatttaagcctgatggaactcaactgattttggctgccggaagcagattactggcaagcgctttgcttctggatcagctgacaaaagcgttattatctggacatcaaaactggaaggcattctgaagtacacgcacaatgatgctatacaatgtgtctcctacaatcctattactcatcaactggcatcttgttcctccagtgactttgggttgtggtctcctgaacagaagtctgtctccaaacacaaatcaagcagcaagatcatctgctgcagctggacaaatgatggtcagtacctggcgctggggatgttcaatgggatcatcagcatacg

SEQ ID NO: 12513 - DNA, 24532 bp, Homo sapiens
gaaggcctcttagtggggctgaagaatggacaggtgagtgctccctcacgtctcctgtcaggctgataatctgcatgcacacgtgggtgacccgtctagcaatgactctgagctgggttctcagggcaggaaaagggcttctctcctccatgggtgaattgtggggcagcctgagttcagttttttgaggacagcctcaggccaaaggtgctgtggccctcacactcctagcaggcccacgttttggcagagttgagctataacctttggctacatgtagagtgtattagtggcttaaggtctccagaaggtgggagatttgttagagatgttgcttctgtggatttctagagggaggcagagatcgttacctaggtcagctcctgattagggcagcgagtggattaaggcagtgcgttccagcatgtgtcctaaagaatgctgggtcctcaagatactgatagatgtcataagcaaaatgggccctttggccagttagatgtgggatatccaggttacacaaaattctgtgtgtgtgtatacatgtgtacacgtgtgttctttgctcagcataagaaaagttctaagtaggctgctacatggaactttgaaagtgacaatgtagctgcattagcctgacagccaagctgtgcagcagatggcttatggctgaggcttgtcaggtctttgctggggatggaagtcacagggcatgagagcagtgggtgaagtcaagcagcaatgccaaggggaggaagggccgcttatttctcaggcagctctcacttccaatgggagcatggactatggggtcaggtgggccggaggtcgtgttcttacttagctactcactggctttgtcatcctgggcaggtcactttacctctgtgaggctggttttacatgaggataataccacatatttcatagggctgtcaaaaacagatatcatcagggttgggagttaaagccaatgttaaaaacaaaacaaaacaaaaaaaacaccaggggtattaaaacaggcatggtggagggtacctgttttcccagctactcaggaggctgagataggaggatcactttgagcccaggagtttgaggctgcagtgtgatatgattatacctgtgaatagccactgcgatcagcctgggcaacatagcaagaccttatctctaaaaaaaattttttttaaaccagggatatcagtaaatgatagctatcatgatcactatcatcattattataattttctaccacatgtcttgtcagtgttcatagtagctttttcctgtgttagttcgtgactcagatctctgctaggtggcatctcctaaagctgcagtttgggtaatgtcatcaacaaatccccagtccgaacagacactgaagtgagctcggcctgtctcagggctgtcattacttctgcagcctctgatgaacctcgcttctggcctcctaaggataagccattgccccccacccccctctttcttttgatgagtccttttccctgcacagagcttctggtgaaggtggtgggagttgttcttgcagagcacatgggattccaacggcctggcagtgggccaggatcttgttgccatggtgactgacactgttttcgctgaaattttgccagatcctgaagatcttcgtggacaatctctttgctatcgtcctgctgaagcaggccacagctgtgcgctgcttggacatgagtgcctcccgtaagaagctggccgtggtagatgaaaatgacacttgcctggtgtatgacatcgacaccaaggagctgctttttcaggtgaagtccctgagggggcccagggacatcatcctttgattagagactctcctctagcttcccagtccctgcaggaggctctcctgctctggcccaggcaggtctctgggaggggcaggggccaagcacatgcacagagtcccagaggccctgggccacaacctgctcctcccacacaggcacaagccgcagggcctggaccggcctctttaactttggtttccttgccaatggaaaccgaaggctctgagccagcagagcctttcttaagcgtttaccatgaacaagaaatggggcaatgactctgagaggggtgtgacgttggcactcagtgaatggggcgatggatgcacttcctttgcagaagtctgtgtctcacctgctgcaggcctgcctgtgtctatgcgcacctacagcgtgggaaggaaacaggatgttttgtcatctgaaagggggaaggggatgggcaagcctggccttctacttaattcacaagaatgctagaagagccagcagaatgcgaagtgcttggatctttggggttgtaggcgttgttcagtggagtcatccagccctgtggcctgaggaagtgtgtcaccagagaagacagcccggcagctctgtgccccgggcctggttggctttctgctgggctcgcgccattctttctctctttaggtctttgtaggtggtcaggactggttttccagagtgaagttccccccaaagctggagcccctcctgactggtttcctcggccactgcagggtttcctgatgttatgggcagattcagtccccttaccaggctcctccttgttctcagcagcagaatcgatgggggaggggtctggagtggggagcagcctcagtcaattagaaggagttacctggccacctctagcccagaggtaactccatgtcagtctcaactcactcatgtccttgagagagtagaatggtttcggggaaagagagggcatagccttcaagctgacctgggcttgggtcctgcctgcatcccttactgtgtgatcttaagttagtgagcctctctgagccttaattacttttctctaaaatgaaattagtaattgccccttacagaattgctacaggaatacactagatactacagtgcctagctcagtgttgagcacaaaatggggcctgaaatgttacttcccttctccccagcctcacctcccacctatagggggcatagctggccccaaatgtgaatcttgtgtctgagcctagaatcatacaagtgtggaagggcgtctgtgctgccccatccccactgctggctctatggcaggctaggggaggtgattctcagccctgccaggagacatcagcattcccagctgtaacattgcctgctggcttttcctcttctccactgcccctccctctacacataaaacagctatattgattttttctcattataaaaaacaatccatgctgattataaaagatttagtcattataaaagatcctaggcagaaaggtatgagcatatttcaggagaataattttttttcaaaagtaatacttgcttactcaaaaattccaacaacacgcaggtgcatggaggggcttgcctctgttcatttctcttgcctctgttcatttctttgtggtcccctttcatccttttccctccatcccactgtaagcaatttagtgggattcagtctttaagagggtattgggctgaaatgtgtgagcgctgaccaagcccagggtggttctcacaggatccccactgtccctgttccccaggaaccaaacgccaacagtgtagcttggaacacccagtgtgaggacatgctctgcttctcgggaggaggctacctcaacatcaaagccagcaccttccctgtgcaccggcagaagctgcagggctttgtggtcggctacaatggctccaagatcttctgcctccatgtcttctccatttctgccgtggaggtgccgcaggtaactgggggtgcctgtccactcttagcactggcaaggctgacaagaccagggaagctgggccctttgctggtgctttggggagagagtagcaaggagagaagaatggcagctgtgaggtcgtgggaggcagtctgggcctggaacctgccgccctgtctccactccttgcaacctgtgtgactgggggcaaacagctcaacctccctgagtatcagtttcttccttgtcccctttctgtagggatgggaggggtatgcagtgttgtcagcagcgtgtgttttgcagagagcccagcgtggggccgaatggagtgagcagcaaagccgggagtccggcagggtgtgtgtgtgagtacgtgtgtgatggtggtgatgtgtgtgtgagagagaggggagagagagaatgagtgggtggggggtgtgggctgaggtctgtgagccaataagggagcatgggactctgcacaagctctctgaaccaggaggtggccagaacagaaatggggcactgaagggtggagccacagaatgggggagggcagaaccacagacaggcgcctgagattgacctcccgaatgcaggatggtctcccctccaccttctgcaccccaggcagatggtgctcactgtagaattgccataaaacagagacgtgcatagcgagaaactgtagccttcagcatcccatcctcaggacagaatcactcttaaacatgttgaaatacatctgcttagcgcttttctacgtgtatatataatatatgcataatatacaattaggagcatgtggttttataagaacatttttaaacaaaagtggaatcacactgcaaatacttttcatgacttttatgtgtatacgtattgctacctatagatggaacctcagatttactgtattccctgagcctggcctgtaaacaagacttctcatcccttcctttatggctatcttctcatttcacctcacattcggttatggcagccccatcactgtctatgaagtgctggctgtacactagtcatctggccttttcactcaacaatctcctaaagcatcgttctgtgtcagtaaatggtaaatgttcttattctgcatggcaaaatttagggtaattgtagactcacataaattgtaggaaataatacagagatcccttaaaccctttgcctagtttcccccaacggtaacagtgtgcatagctctagagtgatcttcccacccatgttggcatgtgtaatctcccaccacagtcatggcactgaacactgccaccaccacaaggtccctggtgttgtgctttttacagccagcacccctccctcctgcctggtccccacctgccttgtatttacagctgcattttattgtgtcttgtggatgttccacagctttctttaccagtcctactggacatgtttgctgcttatagcttttttgtattattgtaaatagcaggcatctttctagctaggtccttgcacctgtcccaacttggcgccttggcataaattcctagaaatgaaattgctgggtcaaagcacgtgtacctttgaaagacttttagggaaatttccaggtttcccttccgctaggctctgtcagtctgttttccccatacaactcagcttcaggctagagcccacttcttctaagttgatgataccctcgaaactcatgactgcaagacttactggggaaatgcccatcatccatgcctgacacagatcagctattcaagaaatgttagtggaattcagatctgaggaaaaagaccagaaagcaagaggaagaagggaatgaggtgggtggaagtggcagcaggacgaggggcacgaacagcttctcctggactgtgtcctcgtcatccttgtctgccccattacaaacccacgcaccacatccaccaggaactcatctccctcaattgccccaaactagctctgcttattttattaaaaggttttctcccaagattgccatcctgacctcaaaaataaatgcagtttgctgctctctgactgtggccggccaagaggagccagaggggcagcctggggcttcctctgccaggactttaagattcagcagcaaagtcttgctgactgcaccaaggccatcctgctgacgcagcgggtcaggactgccaagggttaggaaacacattctcaagacaaaggctgttcatctgtcgcctctgcctccggccatcctgtggttttggcccagagaggagggagaaagcatcagacccagtcttggaatttttggttgcctttcgaaatttacattgtcttgtgcaagaactggtttgtcagggctgccaagtaggacaacgagccctaggagggcttctcaaggcggtggtgacttcatgtttgaaatccaacagcaagataaagtatagctcagagagtatttgttcagtggggtctatttttaaaactccactcaaattgtgcctcccaagtaagtccaagtgttagccatccatcatatgctcagctgtgatatgcctgcctgagtgcctgtcccactcacggggcagtcagcatggcaagcagttggtgtggttcggggaaggagcaccagctttcagtcctgactctgccatctcaagcagctgtaactagagcaactcatttcactctttggggcctcatttcttttctgtgaaatggggttaattatacccatctttcaggtttcgtcaagccaaatttctattattatttctccttattactgactcataaaatagcaaaaaccacaaaacacaactaaattgcaacaggctgtacttactgacggactttagaaaggaaagctcattgtgtgctttaagaaaagctttcaggagtttgagaaagcttccaggagatggtgaaacttgatctgagccctgagaggtctggaaaggaagagtggagcagggaagcttttcaaacaaagggaaaggtgggggtaggaacaagactggagagcctgggagatggtgaggagctggtgctgagaaaatacagtgaaggtaatgatcatgcctgcattttgcccagtgcttcattatttttggagcacatctctcctttgcccatggtagcctgagctgggcaggacatctaaacagaagttaatggatttacccaaaaagtcaccagcctaggatgtggctgagcctggcctgggttctaggtcacctgctccgtagcctatgcctgctgccccgctaaagggagcatttaatgtgccaatgaggagagatggcatggtggaaaagataagcacttggaagcagccatgttttgctctgagagtagacagactcaaaataaaaaaaattccttcaattctaaagctaaaaaatgggactggaaatttcaaagacagacaaaagccccaaatggagaaaacaatacttcaagctccacatttgggaaccattagcacagaggtcctggctgatttctcttccctgcccaggaagccaggagagatgcaggccactgaagcacactggctggcctaaaacaagggcaaggcctttccttgttaaagatgtcatggcccaactcaagactcattctcaggcctgcacgcacatatgcacatatacacgcgtgcatacatgtggcaggaaggggcacagaacctggagtccagtcacctctggctattgccagctatttgctgggacaggtcatttgtcctctctgagtctcggtctcctgggctgtagccagggagaaataatacctactgcacaggactgtggggacagccaaaagccttttataaacctaagaaagagaagtcgttaggaactattcatgggcactcacagcaaggcaaccccatcttgtaggagggcatctgtccccagggcagggatcaggagagctgtttccagaggcttccagggtaacttggagcaaatcacttacctttcttggactcagtccctggaagaagaggccattccagaccgcttcctcccacgaactcattcattgtgtcagcaaacgtagactggggttctgctgagggaggccgatacaacccaccactgcccacggctgtgcacggctttgctgtgggaacaggcctgtaactgcggcacaacctgcgatctggacaaagggcagaggaagctgagactctttcccctggggtgggggcttgaggggcttgggaggactctgcagaagaggtgacatttcaacagggccttgaaagccaaataggtattttccagaggcagagtggggaggggcaaaggcattccaggtgagggtgacatcctatggcgaggcaggcctgtaggtgggaaggaggggaggatgggcagagagtttgtgctgtggagcacagtagcccagtcatgagagaggtgcaggatggagcacacagggtgggctgggcaggctgggcagggtgctgattggcggctgcagggctgctccccaggcatgggtaatcatcccacgcatctggaggcaggctctgtatgcatctggttctttccatggctctgaaaacagtcttctttttttcccttgatgaaatcctgcagtccgctcccatgtaccagtacctggataggaaactgttcaaggaagcctaccagattgcttgcttgggtgtcacagacactgattggcgtgaactggccatggaagcgctagaaggtttagattttgaaacagcaaagaaggtaagcatctagccagcaggagctggagtttggtccttgtggggtcccttaagaaggcagatggggacccaggtggcacggagaggccatagactgcagcagtctctggagttaggctgacctgggcttgtatcttagccacttcctcactgtgggcctgggtaggtgacaccctttctaagattgcttctctatagacgtaggatgatgacaggccccatcctcacaaagctgtgaggatcaaatgggaggatgcctgtaaagcctgacccaggagcagcatgtcagattctggctgtcactcttattagctgttctctgtgggaagcacctgactagtagcctggcacatcacaggcactccgtaaatggcggcttttattatcggtgtagtcactggccatgatgctgcacacaatgctgcttttcttagcatctgccaactaaggtgggagagatggtcaaggtctctgattctgacagcaatgtgggcacttcccacgtaccttcatggcgggattcatggacttgattcgttgtgtcctttcctggcctagtctatgaaagctagagagatggctgaaaacatctgacccctctctgcacataaggaaaagcccaggtatgttcctgagctgtgtttccatctagaacctcagatggaggaaggaatggcttccaacctccactcccctaccccttccctctttatctccccacagtcaattaatgagctgctcattttgtccatattcccgggctgacattgaaggagtggcaaagagggacgtgatgcccgccttgggttagatcaagacttgtaggcatgaagagaggagactggaccagaccaggactaagaagcctggctgagaacgagctgtgtcacataaggggctctgggacctcaggccagccactttccttggagccccagtcctcccagttctgaaatgggggtggtgagaatgcccgctgcagtcatgaggcttaactgagatgttgtaaaggggaatttaaatcagggatggttgtgcagatgctagccattactaaacaagggaagtgatcgttgtgtaacaatgatctagattatatttttagatgtcctcagtgtaggaaagtggagatggaggaggctgtaagaattcagaggaggggccaggcgcggtggctcacgcctgtaaatcctagcactttgggaggccgaggtgtgcggatcacaaggtcaggagatcgagaccatcctggctaacacggtgaaaccccgtctctactaaaaatacaaaaaattagccgggcatggtggcaggcgcctgtagtcccagctactccggaggctgaggcaggagaatggcgtgaacctgggaggcggagcgtgcagtgagccgagatggtgccactgcactccagcctgggccatagagcaagactctgacttaaaaaaaaaaaaaaaaaagaattcagaggagggaggaggcatctctatggagggagcttccctctcctgccccacccagaaatgccagcagggagggagacgacaaatccctagaatagaaaggattgtaaaaagccacaaggtttaatatgagtgtttactgatatttttataaatatatatatttttatatatttgtttaaatattgagacggggactcactgtgttgcccaggcaggtcttgaactcctgggctcaagcagtcttcttgcctcagcctcccaaagtgctgggattacaggtataaaccaccacacccagccagatttactatagttgaaaagtaagtgtatgtggtatatatctattgtgtacaacatgctgttttgaaaaagccacatgatattgaagataggctggatgttactatttcatctaaatcccgagtaccccacctctttactctgtgccaggcactcaggctcaccagcttggatatagtggttcctagagatggacagccatccccactagatggcagagaagagctgctgagctcccgccagaccctgagcagagctgcaggttcctccctattcccaggcttccctctgctgagctcattcaggggccttgtgactctgaccaggcaccctgacgctgcaaaatgtgtcaggttgaaggaactcggaaacagatttattaatgggcaaatcctagacactagcacagctgagctacagctagaaagacccttgagagggtgtcagtagcaggcccctttccacaaagaagatggttggagcccagaagcagagaagtaggctcagagcgaggactcagacctcgaatgctcctttccctcttggccactgtgctgggctttgcagggttgccctctcaaggcgctttaaggaaacccagatctagagggtgatgtgtaagacctacagcttgggacacaggtagtcttagccctgtgttccttggcccatgtgatgcccgcattgcccttttctacgaattcctcttcacaaacacttgtttgccaggttctgactctgatgcctcccttaacgctgcctcccacccctgctcatgctcagaccattcatccgtgttctccaggcatgtggttcgtagttggagagctcttagctctgggaggtgtcatgatctgtttaattgaccagctttccctgttagaatgtggacctctgaattgtggagggggacaggggccgagacatgtttctccctgggtcctcagtctcttgacaggaagcctggtcctgtgggatgaaaagataaagttgcattgtggtcacctgcaaggcaggccggggacttgctcatctcccgaggtcttttcaggagggaggatgccatgctgctgagcagaggctgcaagtggtcaggattgctctgcgtgttcagttcaaagggctctggagctgctgcctcctctaggcacaggtcagcccattttgaatggggcaataaatggtgacagcaaagccacctgaaagcagcctgacctggtggcttgtgctcctccaaaccctgggcagaatctgaaagcagcaaaactagcttagctaacaccagtctgcttgttcctcagaaacttctagaggtccatgagttaaagtctctggctttactgtgagttcaaggcaagggctgcaattttagggtttacataaagagtttgccttccacagacttggtgggattcattccctacccctccaccttcttccagaatctgtctttataccctctcagctttcccctcctctgctccctctgtggtaccaggggctctgggtcccctgtgtctgtggcaccactgggtaggcatagctgtcccctgcattctacccatgttgccaagatgtataggcagtctctcatcagtccatgcatctcatcctctcctgctgtgatgctgcgtgaccccccagagggtcagaccggcttgttcttctttgggtctagagtctcccaaggaggcaccgccacagactgtggcatcacggttttgttttacctgatctcaaaatgactgatgcaactgggatgtctttgctgttctttacatggtccaatcccatggataaagccatgcctcgctgggtggtataacctcctgcacgcacgatgattaatctgtgcttgctcccttcctctcctctgtggctcactgtctagatagagcttgacttcccacccctagccaatcacccacttttgaagccaagaagacagcttattttattctttatttcttcgccacaggccttcatcagagtacaagacctccgatatttagagctcatcagcagcattgaggtaaaagatgaagcatttttccttctcaagaaggcatacttggggttcctgttttaggggcagcccttctaacaggcaagagccttgaggacatgggaacagagctcactggcgtctgggcatctgggccacagccttgctccgggggcagagtggccacactgggggagacaacagcaggtagtgtgagctgttgtgtgatagctgggtgaggcacatgggttccggatctctccagggttgggtttctagtctgtgaaaagggattggacctacctcacaggctgctgtgaggattcagtaggttctcaggaactggtttgcatcctcctggtggcggatagctggtcaccatcctctcagactccagtaatctgatagtgttggaggagtttcccaaatgcacatgagctgagctccattccccagaaatggacctggggagcaaggcccacagtctgaactgagcgccccagagttctggagcaacccctagccctactgtttctggctgagaatattgaccttgtcatccaaacccaataggcctgcagtgtgctaaggaagctggttgtaggtatgccatttgctgggtggtggtcaacactatgctttttttttcttttttttttttttttttctgaaacaaggtctcactctgttccccaggctcaagcgcagtggcacgatcacagcttactgcagcatagacctcccaggctcaaatgatcctcccacctagcctcccaagtagctgggaccacatgcatgtgccaccccgcctgattaattttttgtatattttttagagcagggttttcccatgttgcccaggctggtttcaaattcgtgggctcaagctattagcccaccttagcctcccaaagtgctagcattatagacttgagctaccatgcccggcccttagacactattcttaatttctgtgtatctcagtgctgtctggctgtctgttaaaaggcatatacattttttctcctgaacatatttattgtgaaggtatgggaatgtgagatacatttgaattcccagttggaaacagtgaggaaatagcaaatgtcttgtccctctcattcatttccccataataaacacctgtcatgggccagcccttgtgccgagctcagtgggcacagagctgaggaggagagaggctgacaggagctcacagcctgctaagcctcataacgtaatctgctctgtgccacatgcgtgatttatgtgaatgctgttctagatcctcacattaactgaatgaggcaggtactgttgctctccctattccatgcaggaggaaattaaggctcagcaagacgatgccacatccccatgggtccatagccaaaaacttggtggaattcaagcccagtctatttcctaagctcatgctctctcggccacataccctccctacccgcgtgttgtaaggggcatctgtatattctggggtttacctacccgcgtggtaaagggcttgttcggagctattgctcaaaatgcccagtgctgctgactttcacttgtaaatccactggcctggatctgggggtcttcacctgaagccaaggagcataattttcctctctacaaaagtaactgctgtggggtccaactattacttgtcacatcttactggggtcaaaatgtagtcctctcctcgtatgctatgagctgggaagtgcgttaaagtaaactcctaagattgtctcttgaaaaaaagtaaagtgcctttgagtgtgctctatatcgactgcctgcagacttatttgcacacatctgggtgctcagcataattccagagaactgcagatccttagtgggtgccttttggataggggagatgttcttgtcctgctgacggggggaaagaacctgcccatgttgacatgcacctgctgagtgccatagatcgtttttattggtcatggtgatatcctggggcctagaatggatatggcctgaatttcatgtctagtaaaaccttttttgtttgtttgtttgttttttttttgcagagatagagtctggctatattgaccaggctggcctacaactcctgggctcaagtgatcctcctcttttgacctcccaaagtgtagggatcacaggtgtaagccaccatgtccagccaaaatcaatcttttatctcacggcaagatttcaattcatttccaactattaggagttagtttgtttgatgagcctgagctgtgtgcaggtttttagaatgataatttctgtcagtatggaagcatgttgcctccagctgttaaaactttcaccagcttgtctaagagtttgattcaatgtcttatcgtcctccaatatgctgctctttctagaaaacaagcaaaaggaaactgctagggctcagggtttgggtgctactgagtgtttacaaatactcgagctgtagacaagcgaatgttccctgacacagaaggaagaagctttatcctagctgtgctaagtgtgtgtgtgtgtgtgtgtgtgttgttggggacatcacttgcttcaaaagactacattgtgtgatacaaggaatatctggagtcagacagaactgcgtccaaattccagctctgtctgaccctgacctgttcctcttcttgagtctcagcgtccttcactctaacacttgggtagtgagacctaccctgagggtcactgagaggaataaaggggccatgtgtgtataaagtatatacccagaacctagtggatgttcagcatgcgggatttcttaccttctctttagaagtagggatatcgtaagacttgtcatcctattttattggtctccctcttgggcagaaaccctaaacattctcctgctctgtcatccccatgagccacaactctgccaaacggggcctgcggatttgggagatcttgggagcttaggggtcatggatgagtcagagcacacactattcaaactattccgtcatagccttggaatacacaggaaagcaaccctgaggaatttccattaaacaaacaaaggtttgcatctttttttgatctttgcttgtctggtaaaagcctgcttttgttgtcaagccttcccagcgggaacctaggggagagagacaacagccaggagccaagcccaggttccagtaggaaggcccaggggcctcacttgaaatagccacatctaacctttgtaaaggctgcttcctgcccatggctgcagaggccatttcctttgcttctaatttttccaggagaggaagaagcggggagagaccaacaatgacctgtttctggcagatgtgttttcctaccaggggaagttccatgaggccgccaaactgtacaagaggagtgggcacgagaacctcgcgcttgaaatgtacaccgacctctgcatgtttgagtatgccaaggtaacctaccctgtcccaggcccaagctccagcttggagcccactggtattctcacgtgcggtgtccaagttattttccccaagagtgctgcggacaaaaactagcaatggtctcagaaaggatgtggggaaactggtaaacaaaggacccatctacagccactggttgaaactcacctaaaactgacctttaaggctgacaccaagggggcagactatggcagttcagaccttcatcagtgacagggctggatggctgtgggtctacaccagcacaatcccttcattgagttgagggctcagggcttcagggctgtcccccacaaatcctctcaatccttgtcaggagccgccaagaatcggtgtcttcaggcaggagccggtcctgccgatcatgcaggacgacatggtgcctgccagccaagtttcccatagcacctgctgattgtcctggacttctcactgggcttctgggaagtcaggcagagcctccgccctcccatgttagcgcagcatgcctcacgcctgccggctgcagagtggctaccatgtggttgcagtgggtgatggcagagattcccttttgcattgggacggcccccatgaaccttactccccagcagagctgggccttttaaggcaggtgtaggagaggagcttcctggaccaggctcctgatggcttctgtgggaaggagttgcactaaggagcccagagcagtcaagacatttgcagttcagtctaagcaaggttcaaagaggcttcggtacactgggcaatgagggtcttccttccatcaaggggctttgttaacctgccttttctggaagtgtcaaaagtggctctcagtatgttatgaagtgactcatcagccataacctattggtgggctactaatggtagttctccagctcacaagttcaagatggaaaatcttccccacttttttctgcttttctattcctgaagatggctgtgctcttccaccacctgttcgaccctggggctgaaggtgtgtttggtggcctgtgatgttgcccaggacctattgttcatcaggacttggacgagctcctgggccccagcctgtcttttcaccttagtgatttcttcactccgtacctgagacccagggtgttcaggctccctctactttttcctcgtcacctttcctaccctccctcaggccccaccaaagacacctagaagatttcataacacattcatactgagatcaccagagtcagtgcatctctgcttccggggataacaaaattttaactcaggatgaacccttaagggatcaagaccctagaggtagaatttagggttgggaacccctgaggcctcctcaaggaggcagctgtgctgcagtagaaaatgcctgaccaggctgggcatggtggctcaaacctgtaatactagcactttgggaggctgaagtgggtggattgcttgagctcaggaggtcgagaccagcctgggcaatatggtgaaaccctctctctaccaaaaatgcaaaaaattagctggtgcctgtagtcccagctactgggaggctaaggtggaaagattgcttgagccccagaggtggaagttgcagtgagccaagatcacgccactgcattccagcctgggtgacagagcaagacccatgtcaaaaaaaaataataaaatgcctggccttggtgccccagagctggtgtgagtgcagtttctttctgtgggatgacctggggaaaggctcttcggtttgccaaacctcccttcccttctcagatggtaatagcgacagctcagtttagtcatgagatttgcacagaataatgtataggaaagcgcattagaaatgccaacctgtagaaagattaggaagatgagaggggccacacgtgaccacagagtggattttcatacctctctccctggctggccccactcctgcccctgctctgaggcccctccttacactgtggtggacttcgtgtgcccacagcctcccaccagaactgcagcccatttacacactccatttgctccgtctctctatgaaggtaaatactctgggacttgtttttggttttagtttttgatcactattccaaggaggttggttccttttcaatcccccctgcccccacctggtagtctgaatttgagaaatatgtacctacacattatgtggggggtgggggagatctagtcctgattaacgtggcatatttttgtttacttgaaaattgcttcccaagattcaatctggttttcagaaaattttaaaattacattcccacgtacaaataaattgtatgctttctggataagtgacatgtttatatggtgataaagggaattataatgctcttaactcttatgtagtatgttcttatcaaaatcaccaagcatgagaacactgtttagtctcattcatcactcagcacagcctctttctgtccacttcagggccaagtctttgccatggccccagataatgtgtaacttagcttcaggaaagcaaaaagcctttgaatttccagtttgctgagccttgaaggaagcttttagacccagcttcaatgaagtcacagctccctgagtgaccagctggcctaggcttatggctccctctcagcctctcacccttgccgtggtcacccctggtcccctgagcactcactgaagtccctttgaaggacatttctagtctcctaagatgcctgttttcctccagctgccaccctcatttcaccagccaggtaggcagggtttccagcttcgtgctggcatagagaatccgcgccatagcagctgccagaaggaaaggtgtgtctgtaaaggcccaaactaggcggggacagcggctgctttccaagccccttccctttgtcagctccagggagaaccaaaggccagccagggggcctgtcttctattgggtcccagcatcagggtatacaatgcgctttcctccccttcttaaaatgtatcatatattaggccgacctaatactctgaaagcacatttaccctgaaagcaaatgagggaaaaaagcgagctaattgttcaagtggatttttagcatacattgactgtacttttctgacacatgagtgttaatcatggggaaaggagtgctttttttgttctcagtgaggctgacacaaagtactctccacagggtacattattcctgagacaaaccacttcttaccagtaacatagacctgggctgtaagtgctcccagtttccctttttgaaaagctccacctttaaaagctgcctcaattctggcaaactcccacgtgtgtattttgggtaactactctgaaaagaggtggtgttctgaggctgtttctcacacattgtagggccagcccagagaagctgggcataccacttcagaggtatgctgaggccgaaggaacacaggccctaggcctgatctctgagcctccaggaccacagccatctcttccttctcaggtcctctcctgagcaccttccctgcctcagattcccccatggcctcctgctgtcccactgtcggatcaggttctcacccctgcagacctgacctcagcacaggatccctaaccattcagctgagaagcaactaaccagagagatgtttgcttgttatctgttccaggaaagtaactggggcaaagacaatgtgatgattctctagttcagggcacagaatgtttgctggtgactcagagagggcatggagggcacggagggccggcaaacactgtaagtcattttgtttgtgtaagtttaggggaacccatgctcagcctcactctgaagcatgtggtatcacccatatgatctgaataagatgacaggtctcgatatgtggaattgtgcaccaggttgtctcattgctgtttaggaacagtcctgtattgaccaaactatgtgagagagagacagcctgatcatgaacccccgaccctgcagacttcatgtgcagtgccccaaatagtctagaaagtgttgtttagccgatgaacaaatgcccatttgtgagacgggaaggaagcactgggggccagcgtccctgatgctgtcccaggatcccccaggaacacctgcagggcagcctgagatcactcttcccgagacctgggactcccccaactcagcccctcagggccgggccctgcctacctcctggttgcctgcttcagccatgtggagcccgcccttgctgctagaaaagcctgatgtaacgctggcacaggaagttctgatccagagtgtttttgtttgttgtgcttcctcaggatttccttggatctggagaccccaaagaaacaaagatgctaatcaccaaacaggctgactgggccagaaatatcaaggagcccaaagccgccgtggagatgtacatctcagcaggagagcacgtcaaggccatcgagatctgtggtgaccatggctgggttgacatgtaggttttggtccctgccccgagaagcatttggcagcatgtcatcacatgtcacctcttgactgacaagggaaccaatagtgcttttctaattatctaaagctaatgtgatagtggctaggttcttcaggagacacagagattgcacaaggcagtggctgccttccaggagcttgtggagtcactaggggaagggatggtggggaccagggaagaggagacaccgggacatcacagctgccatttgctgagcgctcactacaacccagacgctgtgataaccttccaggcattaggttttccacctatgccatcagggctggtgtctcctcgcccaccttgcagatgatgaaacagaagctaaagggacaagttattcccaaagtccagatagctggaaagttgtagagctgagctttagcctctgatctgctggatgtcgatgccaactacgcgtgtaatggtaggaacaaaaacaaaacaagttccaaatccatcagggaagaattcttatgggaggaaccatggatatcttctcttaggagacactctttccatgaagggaccttaaagaattccaagaggtaaatagagatggcgggaaaggatatgcaggcaggaagtacagcagaaacacagcgagttggctctggttggaataaaagacgtgtgggaatgggagggtgaaggacatgggctgtgggttgggggaagtgggctggccacactggaagggcctccgatgccaaacggaggtgcttagatttgccaatagtgagtgaccacctacagtcagacaccccctcaggcaggcaggtagaatggagaccagataactggctagtgcagtagagcaggagggaacttggtagctgagggcatgagagagaagtagcagtgttagaaccaagtggcccatcccagggtgttggggcagtggtgagtgtcaggctggctttgctctgtggctgctggtgggttacaccattcgtcaaggtggacaacagggagaggagggggttggggtggggcagcactgagacaggatggattcagccttgggactcagcacaccggaccttgagggggaaggctttgtcctcccagtcagtgagcttcaggctcaagcatgtgcacacacacgtgcacatgctgctgcggtaggcaaaggacacgatgggacaagctcctgagggtggctcaggctgggtcctaaaggctgttgattcttctggaaacaacgttgtggtctacaggtagcagtggcccagccaggatttggggatatggaagaggctggttaatgattaaattgtttccttgggtgctgccatatattaataattggtgtgtgggcccctcacaaagggaccttgatggatgtcctaccaccccatctttttcttgtccgatagtaatttttttaaagacagaggcacagattttgttccccacattattctttaaatgaaggggttcatatagaagagagccaggcagatttagggtgctctgttctctcttctggtttttcttgtcactttcatttgtaagtgctatagtatcaggttaccctgagggtacttgagtaattcaagaaacacattaagcatgttctgcttgctttccagatgtggctataaaaggtgtctttcctccagggacgttgggtgtgatgggtgggaaggtttctaaggctgtaagggctgtctatgccacctttccctaaaaacgtgtcctttttctgctgagcagtgttatttttagatgccattattattctaagtgtagactgacaggcctccgtgccttgcctgtctccagacagggattcgttacagctgcttctccttcctttctcaccaagactagcctgggtagaaccctttctcctgggagagttagtttgactccaaattccagcctgaccagagagaacaagcgcattctatccaggcctcatgtccccatgagtgatgggagggctgctcaccatggggaagcagtggtgagccagtgggtccctgcagctcctccctctttggtcagcacgttggccaggaggacagggaagacttcctgcaggcctttgtccagagctcagagcaggccccacactcacctcttcctttagagggcagtcattgaggtattcttatgccttggcatccacttttccgtgagaattcctgcacccgtggtggaaagagtgctgggcccagtcttgggctgggtgcttcaccttccccacagactttattcttctcatctgagagatggaaataatcatgcccacctcttagggtggtgaagattctgatttcacgcatgggaaagctcatggcgtcatctgggtacctggtaggggattaggagataattgtttctataccctgctggatagctcagtgacttccgagaaagacacacaaggtggctgacaggatcctgtaaaggccacctctcccagatcctggtgatgtttctggagtgtgtattcatgcatttaataactacccactgagcaactcccatgggccatggcatagtatcaacactggggaccacagaatgaatggacatacggcttgccgttgacaagacccagagcccaccctcctacctgccccttccctctccaggttgatcgacatcgcccgcaaactggacaaggctgagcgcgagcccctgctgctgtgcgctacctacctcaagaagctggacagccctggctatgctgctgagacctacctgaagatgggtgacctcaagtccctggtgcagctgcacgtggagacccagcgctgggatgaggtgaggggaaagcaggcctcatgggctggggccccacctgagccctgggacacaggcgggtgggtacaggggccctttggggttcagatggagagaagctgccctcgtgatggaaggaacattgggctggcagtcaggtaacttaacctcgaattctctgagccacagaatcgtggagggcctttccacttgtcccttcattcagtcattgagaaaatcgttactgacagccagctctgccagggtggtgacaggcaccggggatgttagtgtgaacacgacagctccagtgcctgctgttgggctgagctgcctctgaccagcaccacaggctcagacacatggctgatgtggagatgcacctgcgtgacatttaaaacctgctgggtagcattttggcagaaagcaccatctgtgctttccagatccagactgtgagagccatttcaggggccagttttttccctcccttctctgcccccaccccacaaccactacttctctctggtgtcaggggctgtaaagaattagccaggtcagcgagaaaggtggccagcctcaggctggcagaagcagctgatgctgccccttctatggctcaacccccaccctccagctcactggctccctgttccctgcagagaaatccatccccgagaggattaggagctgtgccaagatcctcccccgactcacccacccacccatcatggtccattttagagtgaaagcaaagccttcactgagaggagccgtctgactgttgtctgctctctgaacagctccattggtgaggtgatgaggtcagtcatgagaaaaggtggggctagggacagaggcaatggtggcttctcaagagaaatttattagatttcccaagcagcatagattagagcatcttagaatgactcagacctcgctgtgcatcaggcagactttctcaccatggctcatgtccggttctcctggcctgacaggtggttctggggcttaggtgagaagcagtcagtgggtccatacagcacgaagcccacagtcatctttgacaactgataagaagtggtgatgatgataatgtcaattctgtttccttaggtgtcgcccgcaattaaaagaaatctgtttgcagcactacaggagcccacgcaaaccctcaaaataaaatgtttccgattctgtgccgcttctgtggtccagaaacagactgtgttgttactgaatccagtcgcttgcatattgctgttaattgccttttgttttcgaagagctgatttgtttttgcatttctgtgggtagttttttgggggaggcactctccccctctgagttgtcaggctggcaaaatatgatgtccctaatggattcagccaagtacagtgttttcatgggggctgcaggggcagctttattaagacttcatttgctccttcccccaggcctttgctttgggtgagaagcatcctgagtttaaggatgacatctacatgccgtatgctcagtggctagcagagaacgatcgctttgaggaagcccagaaag

SEQ ID NO: 12514 - DNA, 1141 bp, Homo sapiens
gaaggcctcttagtggggctgaagaatggacagatcctgaagatcttcgtggacaatctctttgctatcgtcctgctgaagcaggccacagctgtgcgctgcttggacatgagtgcctcccgtaagaagctggccgtggtagatgaaaatgacacttgcctggtgtatgacatcgacaccaaggagctgctttttcaggaaccaaacgccaacagtgtagcttggaacacccagtgtgaggacatgctctgcttctcgggaggaggctacctcaacatcaaagccagcaccttccctgtgcaccggcagaagctgcagggctttgtggtcggctacaatggctccaagatcttctgcctccatgtcttctccatttctgccgtggaggtgccgcagtccgctcccatgtaccagtacctggataggaaactgttcaaggaagcctaccagattgcttgcttgggtgtcacagacactgattggcgtgaactggccatggaagcgctagaaggtttagattttgaaacagcaaagaaggagaggaagaagcggggagagaccaacaatgacctgtttctggcagatgtgttttcctaccaggggaagttccatgaggccgccaaactgtacaagaggagtgggcacgagaacctcgcgcttgaaatgtacaccgacctctgcatgtttgagtatgccaaggatttccttggatctggagaccccaaagaaacaaagatgctaatcaccaaacaggctgactgggccagaaatatcaaggagcccaaagccgccgtggagatgtacatctcagcaggagagcacgtcaaggccatcgagatctgtggtgaccatggctgggttgacatgttgatcgacatcgcccgcaaactggacaaggctgagcgcgagcccctgctgctgtgcgctacctacctcaagaagctggacagccctggctatgctgctgagacctacctgaagatgggtgacctcaagtccctggtgcagctgcacgtggagacccagcgctgggatgaggcctttgctttgggtgagaagcatcctgagtttaaggatgacatctacatgccgtatgctcagtggctagcagagaacgatcgctttgaggaagcccagaaag

SEQ ID NO: 12515 - DNA, 26638 bp, Homo sapiens
tataaatgacatcgcatttaagcctgatggaactcaactgattttggctgccggaagcagattactggtaggattttgtcttagtttcctcttaaagtgcttccctaacctccctcttgtgagtactctgaaatttgaccctttttttttttttttgagattaaaaaggcaagggtggaaaaaccttccctattactttttaatagggatggaaatgggctatttaaaacgggcaagtaaactatcagataagaacctgtgaacaataccacctttggggtcattcatctttccctttttactttgagacacccatgaaagagttgaaaacaatcacaatgcctttgaaactggactggtgtcagtttacattttgtcccccagaaaaattcaagcaacaggactgacggtgctgtgtccatgaaaagtcagatagcctgaccccaacttttaggcattggcctatctaaacagttccatatggatgttgtcctatttttcatattttcaaataacataagctccctctggaacctatccaggtatataaaagtaattttcagagaaccccttatgtttgaccaaaaaacctttgtatgatctctctttctgtctaagtctacttcctcttctctgttgtctctagatacgcagactgattaatctccattctttgtatggttaactacataatcttaaaacatggttaaattgttctgcagacttctctccagtgtaaacaatccaaactctattagtttttctacataggttatcttttccaatactctaaccatttcagaaagtttccgcttgatttctcagatggtgtgtgtgtgtgtgttttttttttttttttttttttttggagacagagtctggctctgtcgcccaggctggagtgcagtgacgcgatctcggcttactgcaagctccacctcccgggttcacaccattctcctgcctcagcctcctgagtagctgggactacaggcgcctgccgctacgctcagctaattttttgtatttttagtagagacggggtttctccgtgttagccaggatggtctcgatctcctgacctcgtaatccacccacctcggcctcccaaagtgctgggattacagaggtgagccaccgcgcccggccagatggtgtgtttttaaactctccacatagtgatagatgtcacatggctatcaaatacctaaatccatattacagctgggttttattttatttcttagagacagggttgtgctctgttgcccaagctggtgtgcagtagtgcagtcatagatcactgcagcctcaaactcctgggcttaagggatcttcccacctcagcctcccgagtagctaggactgtggacacacaccacctcgtccacctaatttttatttttttttatttttatttatttttattttttgtagagatggggtttcacttagttgcccaagctggtcttgaactcctggtttcaagcaatcctcccacttcagcctcccagagtgttgggatgacaggagtgagctaccatgcctggcctacagttgggttttataacattccctcctacttgaaagcccagagttctgtgactttcaaattcttggtagcaaatatgaaacatctattatgttgatttagtgcagagctggcattaaaatttaatcatgttgtagctggctctttttatgggctagttttatttaggagggcctgccttgatcaatcatatatccaaattcaggtaaggatgagtataaagaatttccatggagtgagtaattgaacctttggttctcaaggattggtagtatattcctggtcacatagtacatagacctgggtcctctacttcttggttacccaactttaagtcacgttgtttttggttttgcagtgcagtttttattggctacagatttagaatattgacacgtattgttataaaaacaaaaatagcagtagcaaccctgcaggaattctgactaatagatatcacatagataatctgtatttgtctcttttgccaggtttatgacacctctgatggcaccttacttcagcccctcaagggacacaaagacactgtgtactgtgtggcatatgcgaaggatggtaaaaggctgctctgggtttccattctctataatagcctcatcattgttcatttttctctttagtcactttttaattatttctagtaagctggagtacaagttgcaagttcagaagacagtgaagttgctaagacttcagtttggtcattcaatctagcaagtatttattgaggtcatctatgttccaggcactgttcaaggtgcttgagttacttcagagaaaaaaacggtggtccctccccttatggggcttctgttttatggggtggtggtgagaagtgagggaggaagaaagtatgagggaagacatacagtaaacatagtaaaaaggtaaattaagtagtatgctggaaggtgataactgttatggaagaagaaaaagtagagcagaatgagggggattgagagtgctgggcagggcagggggttgggtacagtattgaattagactagtgagggtgggctcattgagatgaggacaggtgaggaaaaagactttgaagtcaggaggcaatgagattgtgccagtgggcatcggggggaagagagctctttgcagaggaagagccattgcagaggccctcaggtgtgggtgtggctgctaggagctggatcaaagagaatcgggaattgtagaggatgaggataaagtggtaacagacatggggtggtcagatcataaagattttgattctcagtcaaaatggaactactgaaaggtcctcagcagaggagggatctgatttgatttgtattttaaaaggatccctctagttgctgagttggaaacaacctgcaagaggtgagggttaggacatctgtgtgaggaagcatcatccagacagggggtgatggtggctcagacctctgtgggggcagaggaggtgatgagaaattatcagactctggatataatgggagggtggagccaactggattgtctgacagattggatatgggctatgaagaaaaaggagtcaagtttttgacctgaggactgaaaggttggagttgccccccccactgagatggaaaagactgcaggtagagaaaagttatggttgaagatcagaaattcagttttatacatgctgaatttgagaaaagttgatgatgtcggagaggggagagaactgctggaacagagttgttgagtaggcaagaggagatgggatctagggcatagacggggtatttgctttagataggggcacagtaggaactgcagaggccagcagatggggacaatgtggtagtaggaatctaatggaaattctcaattccattttttttttcttcagtgaaataggaagcaacagcaactgagagtggcaatggggaagggaggtttcagagagttgaagagaaagggaaaaagtgtaaagtcactgcctcagagaatgggacagcgagtggacccaggaggtgtagtgagatccccggtgacatgaagggccctcttgaagattgtgatcatgaattgaaagtgagattagttggtgtgattgtgtctttttctccagcgattttgagctgcatagttgtagaggcagaagaggtgaatttaaccagaggtggttttgcaagcacatttgaagatgaagtaggagggcaagggagcagaaagtgtatacagataaataattatgtacattaaccttgaattgttggctgaataatgaagggagagaggacagcaatggagaagtagtaggttctggtggtgttgaaggattgttacagttggggtaccaggtgggttgggaaggaagggaagtggtgcatgaaactgagatttaaatttattttaaaataaatccatgttgtcccacagcataggattagtgggaagaaatgggctttggaatgagacagttgtgagttccaaccccaacccaacaccagagttctgtgagtctgagctggttattgagtctgagtcacgatttcttcatgtatcaaatggataacattgagataacattctgtagccactgccaagaagtcacaaaattgtaatgttataattcttgaatgaaccttggagattattccagtcccaggtttttaacttcttttggctgatgggcctctttgataatcagatggaagctttagaccactttctagaaagatgcaaattcttcatgtgtatgcagaatttcatgcatataattttagtctgattagtccagtctcttcactttagtcctgcataaagacataaacaattggccaggcacggtggctcatgcctataatcctactgaaatcctaaagctctgggagcctgagttgggaagattgcttaaggcaggagtttgagaccagcctgggcaacatagtgagactccctaaaatctggcctgggtgacagagctagactctgtctcttaaaaaaaaaaaaaaaagacaagtcatgtgacttgccaaggccatgcagcagattggcccaaagacaaaactaatttcttgcttcatagtcaggtgtgctgtaccatggtagtcatatttgtgtgtgtgtgtgtgtgtgtgtgtgtgtgtgtgtgtgtgtgtgcatgtttgagttcaagttcagaataatgttttagggagacctgtgaggagggagcctggagagctgaactgtttctgtctcatcctagtggctgttgaggaatgtgggtcagtccagggcccagtataaggcccagtaggtacagaagagctattgggcctctggtgcctctggtgtttataagcatagcagggctctttgacctgcaacaccattagggcacttgaggatgtcagagtgtgacccatcagtagtggcatttgcacagcactttgcagagtcctgtcacacacatctcacttgatgcttccaacaactctctgaagcaggcagcaaggggactcttatctccgctcaaagatgagaaaacagacttggagcaattacaggtgatggtggcagaggcaggcctaacccaggttctctgactgcagagtctttgttctttctagtgtatcatgctgcctcttcatgacacctgtataatgattaagaagtcttttagtcctcagaattggttttttcctcttagacctgaagattgagatacactgaattccagctttgctctttaagtctgcttgtttctgatttctcctttaagttcattaagttttttttgtttttttttttgagatgaagtctcgctctgtcgcccaggctggagtgcagtggcgcgatctcggctcatggcaacctctgactccctggttcaagtgattctcctgcctcagcctcctgagtagctgggactacaggcacgcgccaccatgcctagctaatttttgtattttcagtagagacagggtttcaccatgttggtcggcctgatctcaaactcctgacctcgtgatccgcccacctcggcctcccaaagtgctgggattacaggcgtgaaccaccatgcctggcccaagtttaataagtatttaatgagcaaccatgatataaaagtatgtaagacatagtttttttgttcaagaaaaacaatataatatgaagaaataatagaaatagctaatttttttttaattctattccaggcccagttctaagcaacataagggttaggggtgccactgcctgtgcaataaaaaatctgcatgtaatttctgaaccccccaaaactttactattaatagcctactgttgaccagaagccttacctgttacataaacagttaacacatttttaatattatatgtattatatattgtattcttaaaataagctagataaaatgttaattgagaaaaaagaaaaatatatttactcttcattaaatggaagtggatcatcataaaggtcttcatcttcattgtcttcaggttgaataggctgaggaggaggaggaggaggaggaggaggaagagggattggtgatgctgtgccagggagacagaggcaaaagaaaattcacatgtaaaagtggactcatgtagttaaaactcatgttgttcaggggtcaactgtatgtacacatgtacatacactcatttaatcttcacaccaaccatgaggtaaatactaacattgtatccatttttcaaataaggaaatgaaagctcttcagtagcttgtttgggtcatgcagctggtcagtgagatctctaggaattctgacccagagactctgagcccaaagcttatgcttttcatcaccatcacctgctacctaccaggatgagggaggagtgatggaaatagtaagagcagtttctttgtttatttagtatttgcagcaatatcatatggctcaccctaatatctactatttcagctactgtaaaaggtacttggccgggtgtggtggctcatgcttgtgatctcagcactttgggaagccaaggcgggtggatcatgaggtcaggagtttgagacaagcctggccaacacagtgaaacctcgtctgtactaaatatataaaaattagctgggcatggtggtgtgtgcctgtaatcccaactacttgggaggctgaggcaggagaattgcttgaacctgggaggcggagattgcagtgagctgagattatgccactgctctctggcctgggtgacagagctagactccgtctcaaaaagggccagtcgtggtgactcatgcctgtaatcacagcactttggaaggcggatcacctgaggtcaggagtttgagaccagcctgcccaacatggagaaaccccatctctactaaaaatacaaaaaattagccaggtgtggtggtgggcacctgtagtcccagctactcgggaggctgaggcaggataatcgcttgaacccgggagtcggaggttgcggtgagccgagatcgtgccactgcactatagcctgggcaacagagtgagacttagtctcaaaaaaaaggtactttacagatactatcttagttgactcccataaaaagactctgaggaagatactgttcctctgtgtttcagatgaaggcattgaggctcagagaacagtgacttgcccaaggtcaccttccacttgccctgtgaataaagtctaaaagtccttaagatgtacagaatgtggcacatacttacctcttaatcctcgtctctcaccagagtaggtgaagaccccgttatttgctgccatggtaccgtgatcctcttccaaatgcttataaatgtggaacagtgtaattaataacaaattacttgttatatgttgcctctctccagtctgttccttcataaagcccaagtagtatgaaaatgcgaatctgatctatcactctttgcttaaaacctttctttggcttcccattgctttaggataaagagcaaggcctctgctgtgtccctgaggtcccaagagatccttccacaacccacctcacccttccctccgttccatgatgactccgctcattccctcagacatgccaggcttttcctgcttcagggcctttgcacatctgttccatccatgtggatgggtctgtctcctctctacatctggctaagctctgctcatcctttaggtctccactgaaggatctcatccttagagaaatgttccctcatctaaattaggtcccccaggagatgttgaccaaagggtagtttcagtcagacaaaaggagtacatttttgagatctattgcacagcatggtgaccatagttaataatagcgtatatttcaaaactggcacaggaatagtttttttttttttttttttttgagatggagtctcgctctgttgcccaggctggagtgcagtggcgtgatctcggctcactgcaagccccacctcctgggttcactccattttcccacctcagcctccagagtagctgggactacaggcgcccgtcaccaggccggctaattttgtttttgtatttttagtagagacggggtttcaccgtgttggccaggatggtctcgatctcctgacctcgtgatccacccgcctcagccctccaaagtgctgggattacaggtgtgagccactgttcccggccaggaatagattttaaatgttctcactataaaaaaataagtatctgcagtgatggatatgttaattagcttaatcattcttcaatgtgtatgtatataaaataccacattgtacttcataagtagatataattattatttgtcaaaaataaaaatttaagtaaaaaagtaaatcaggttccccagttattctctttcataggatccgtgtcttaccatgttgtatttgtgttagattaatttgatgtgtacttcttacactagactgaactttatgaaagtagggatcatgtgtgttttaatcattacttaatccctagcatagaacatgacagctacatgtagtaggctcccaatacatctttgtttactcagtgtcagacaaagcaggtttggaacccaaatattctgactccaaggtcctgcctcccagtactgataagaactaggaaagaagctaacacttactaggtaccttaaagaactagttttctaaagaattctctctgggaaatgctggtttaagataaatgtaagactttccattttacaaacacttttaggcaagcgctttgcttctggatcagctgacaaaagcgttattatctggacatcaaaactggaaggcattctgaagtacacgtaagtaacttaggtgtacagtattatgagtttgatgcttattgaataattgcagcaaaagcctcttagaaaagatgtaggagaaaacttttttctcttaaattgaacttgaaattaagttgtgggtgtgtgtggttggtataggaaggttgagtagtgaataagttaatgaatatttcttggccacttactggcgtggccagcactgggctaggtgcttttatgtagctcatctcagttcatctgacattgtagactttatcccacccccaacctgtcatcttccagtgtccctgtctcagagaatggccttatatccacccagtgtcaaatgtcagaaacttggggtcagtgtgctccaggcctcctcttactattggggatctgccgtgttcttcccctgttcctctactagttggtccctatttaccctgcagatctcagactcaaatgtcagtttctttgtaaggactttcctgcctctctagactggaacaggtctctttcgaggcatttctcacaattgcagttttaggtttattctggtgactgatcagtattgctcatcggcctgtaagttccataagaacagatactgcatctattttttgttttgttttgttttgttttgagacagagtcttgctctgttgcccaggctggagtgcagtggcacgatctcggctcaccgcaagctccacctcccaggttcacgccattctcctgcctcagcctcccgagtagctgggactataggcgctcaccaccatgccaggctaattttttgtatttttagtagagatggggtttcaccatgttagctaggatggtctcgatctcctgactacatctattttttttttctcactcttgtgtccctgatacaatgcctagcccataattggtactcaccaattttccttccttccttctttccttccttccttccttccttccttccctccctccctcccttcttccttccttccttccctccctccctcccttcttccttccttccttccttccttccttccttccttccttccttccctccctccctcccttcttccttccttccttccttccttccttcctttcttttcagtcttgctctgtctcccaggctacagtgcagtggtaactagctcactgcaactacaaccttccaggctcaaataatcctcttacttcagcttcccaaatagctggaactgcaggtgcacacccccacaccaggccaatttttaaatttttttttttcttggtagagacagggtttcactttgttgcctgtactggtcttgaactcctgggctcaagcagtcctctcaaagtactgggattacagatacgagccactgcacctggcctcttttcaattgtggtaaaatatacatgacataaaatttatcatattaactactttttaagtttacagtttaatgttaaatacatttacattgttgtgcaaccaatctcccaaactcttttatcctgctaaactaaaattctatatccttcaaatacctactcacccttctctcctacccccagcccctgaaaaccagcattctactttctgtctctctgagtttgactgctttacatacctcatataagtagagtcatacaatgtttgttcttttgtggctgagttatttcatttcacgtaatgtcctcaaggctcatctgtgttgtagcatgtgtcagaatttactttctgtgttgtagcatgtgtcagaatttacttccttttttttctttattattatttttttttatgaagacgaggtctcactatgactcctgagctcaagcaatccttctcccttggccgcccaaactgctgggattacaggtgtgagccactgggctcagcttccttcctttttaagtctgaatattattccattgtatatatagaccacattttctttatccattcatctgttgatggacacttgtgttgcttctgcttcttagctattatgaataatgctgctatgaacatgggtgtacaaatcaacaaacaatttttgaaggaatgaatgaatgagtgaagttgtaagtaaagtattacccacaagtgaaggactaaaacgggttgagacgccttgcatggtacatgatttgctcagctttcattgttgtctaaggatttgtcatgtttccagatcttggtctgtgatgtcttcattgcacctccatcttccatttctgggcctccacaaaacagtaagagtaacagccacagataaagcacctaaaggccaaggtgggaggattgattgcttgaggccaagcgttcaaaaccaacctggccaaaagtgagtccccatctctacaaataagaaaacagtgggtgaggagaaggagaattaattctttaggagtaggagaattaatttctgtgctttttgttggtcacttgcagaagagcatgtggtctaaagtcagaggctgtgggctcattattaaaatcttcagttgtagccactgaaatctttgtggtttgctgcatagtaatctacagttgtttacttcccaggcacaatgatgctatacaatgtgtctcctacaatcctattactcatcaactggcatcttgttcctccagtgactttggtacgttctgattcctgatgtcctgtcctggaataactgaaaatctgggctaaaaatgctaaaatgcattcagaatatggtgattttatcctgagagagttaatactacttctctaccttcaatggctgaggggaggctgacagttattctttaaattgtgtggaaaccaagacagtgaatggtgacctttactctggtaagacatcagagactacaggaagggccccagcaaaggaaatggtaacaagattgggagggcacaggcataacttggtgttgctgcctttgggaagccttcccttggtgttgctgcctctgggaagccttccctgactcaccctggcagagacagtgcagttgtcctcacctttgtattgacccacatctatgtttatgtgaaattcttcactgttgcggttctacttcttgtgcaatttgtcgtcattactggtttaggtggctgtagctgtcctccctgaggggctgaacaccttgaggagttcatcctggccacggtcccgtgccagcattacagcactggtgtagtactggcacaaaagaggtgtcagtaaaatgtctgtggagggaggaagggagtgaaattgggcagaggcttgtaggttatttccattaatggttgattctgttttcagctctatcagtctgtgttcgttgctagtggatacaatgaagtcactagatgaggagtcagaggcctaatccctctcagtgttccagttcccttatctaaaaggagcatgctactcactgtgtctcactgatacggttctggttctgaggttcaaaagagagaatggaattgaaagccaattgtataaatacatggagaaaggcctgtcatttgtttaacatattttatagcattttcttcatgtgaagcactggtctgtgtgcttacactggaatattaaaaaggcaaaatagaatccctaccctcaaggagcttgtggtcttaggagaaggtgggattaaaaaaaatataatattaagtactagtatttattgaatgcttgcagtgtgctaggcactgttctaaggattagaaatgaatttctatttgagctttatgacagcccctgaggtgtcaggtattattctcattcccaccctactgatgaaaaagaggtagaggtcccttagctagtaagtggaggaaccagggcttggactttagaccaggtgattgcatacagagcctgctctgctaagcactgctgaaggaggcccaggaggaaggagtttcttccagcttggggctccaggcaggcttagtggaacacagataacatgtgcacacgtcaaaatgtttggaggaagcgttctggaccaggggaaaggcaaaaaataacttgtttgatgttgcacttggccatgtatttgtgcactggagttaccttcttgattgtacttcgcaacttggcaaatagaagaatttgcttatgttgtctagacatacacttgctatgaggcactgagccagggcatctgggacaggggggagcaagccttaggtgaccagtgtgccatgggagaggcacagctcagatagagtcatgtgttgtgattgagacctatgaaagaaaactagattttcagaaagcatcattgttattttaaatgctaggttatactctggttgcagtgtcaaagttataaacaatgaaactgtcatttctttgagagtcaaatccctgaaaagttggctagaactttaccaatctattttatttttcttctgaaagaatgatagattcatagtaagttacaaagatggtaccaagaagtctatgtacttttcatccagtttcccccagtggatccatcttatgtaactattatacaatatcaagaccaggaaactgagactggcacaaagtgtgtatattatatagttctgttgttttatcgcatgtgtagattgccatcagcgtgacacagaactaagccatcaccatgcagttaccacttagtgtcatatctactcaccttacctccagttatctccaaaccctggtaaccacaaatctgttctccatttctataattttgtcattcaagaatgttatataaatggaatcgtacagtatatgaccttttgagattatgttttttcattcagcataaaatcctggagatccatctaagttgttgtatgtttcaattatttgttcctttttattgctgggtagtattccaaccaatccatcttcttttatattattgtgcattgaagggttgtggtctcctgaacagaagtctgtctccaaacacaaatcaagcagcaagatcatctgctgcaggtaagtgcagctctgacgataagatttatgttccttcatcttccacacagactctcaaaatccaattatttcatgcagcagagaaggtcttgtgttaggtagttggtttaggcccctgtatttccttttttcttctttcttcgtctcctcgatgggaaagacttgtgcctttgatcatgaagcaaaagagaactacaagttgccttcatgcagttacttagcaacaagcctcaacatccagctatactgagtggaggcttgttgaaaatgtgaggctgtcattgtccaggcagcatgtgtggggaagaaagctttccctcccacactttgatgctagacctgaattagaatccagaatctctcattgacaggccatgtgacctcaggaaagttactaaatctttctgagctggagctttacgttcctcatctgacagatagggataaaaatactgacttgacgagattgttgtgaaatgcacacaaactcatgagtgtaaagcgtgcaggacagtacctggtgtacagtagacactctaaatggtagctattcttgctgttcagcttctaggagtatatcccttccgttcagcatctgttgagcaccttctacaaagcaagcactgttctaggggttggaagacaccaagtctgttcttaaggtgctctttaagtgggaggggattgagatggagagtgggaagtggtggctggcccagagatgtaggcacaagctaagggctgtcatagaggtatgtacagagggctgggggagctcagaaaaaggcaccaaatggtgccttcacttctcactgtttattacagaactaaatagcattttaagtttgatcctctgactttatgtcaggaccggcaataatgaaaccatatcccagctgttgctgcctcatcagacttttatttcaaaccaaggcatcatcctcactagttttaccttctgtggggtgcttcccctatccccatgccttttgttggttgtgtacacagctggacaaatgatggtcagtacctggcgctggggatgttcaatgggatcatcagcatacggaacaaaaatggcgaggagaaagtaaagatcgagcggccggggggctccctctcgccaatatggtccatctgctggaacccttcaaggtactcttaaagttgtcctccttctagaacaaacaccatcatgaagaagggctttttgtcttcctgaggtctccctacattcaaaggcttctcacctcacttgaatggtctgttttagaacctgtcccatttgtatggattttttttttaatagtcccgctacctgagaatgtatggaatttattaagagcctcctcaaaagttgagtttaggaatgaatcctggacattttagcaaagcagatgagctatttaggacaggccaaagtgtgtgtgtggcgtgtgtgtctgcgcacatgtgcatgcacacatgtgtacgtgtacatgtatatgagtgtgtgtgtgtgtgtgtgtgtgtgtgtgtgtgtgtgtgtgtgtgtggtgtgtgagtgatgcagcaggaccatttccttatgaatcaatagtggagctctttgctgtggctttatttttgcctttccttttttagttcttccctccaagtttgggcagaatatgtgcccacctgttaataaatagctttttcatgagcctttttttgcccttgtcagaaagtcaaaattaagtctacagacgtccctaaagcctagagatacacaaacaattggcacctaccttcttaaattttatacacactttgctttctatgtccatgtgactttgagagtaaactaattatatgctctttttttttttttttttttttttgagatggagtctcgctcggttgcccagcctggagtgcagtggcacaatctcggctcactgcaacctccacctctcgggttcacgcagttctcctgtctcagcctcctgagtagctgggattacaggtgcctgccaccacgcctggctaattttttttttttttttgagacggagtctcgctctgtcgcccaggccggactgcggactgcagtggcgcaatctcggctcactgcaagctccgcttcccgggttcacgccattctcctgcctcagcctcccgagtagctgggactacaggcgcccgccaccgcgcccggctaattttttgtatttttagtagagacggggtttcaccttgttagccaggatggtctcgatctcctgacctcatgatccacccgcctcggcctcccaaagtgctgggattacaggcgtgagccaccgcgcacgcctggctaattttttgttgccaccacacctggctaattttttgtatttttagtagagacagggtttcaccatgttggccaggctggtcttgaacttctgacctcaggttatccacccacctcagcctcccaaagtgctgagattacaggtgtgagccactgtgcctgaccctatatgctctttatatatcctataatattattaaaccatcagtatcctttacagagtcctctgagggtaaacgaaaggtcctacttgtttaccagctcaatgtcattttacagatggttgcctacttgatttagaaggttgtttggaaggttattatgcttcttcctgaataattttttttggcccatgctgtaccatgcatgtctaatgctgtcaaaggccattagcctgccccagagttcctgctgtttgatttgtggctgcagaggacttggtggctctaggctaccatttttaattcatgagaagcaggaggccctgtatacctggtggctgtcctcctccaggtagggttcagaggctccttttattttttatttttattcttttttttttttttttttttttttgagacggggtctcactctgtcacccaggctgcagtgcagtagtgcgatcttggctcactgcaacctccgcctcccaggttcaagcaatcctctcacctcagcctcccaagtagcttggatcacaggcacatgccactacacctgtctaattttttgtatttttggtagagacagggtttcaccatgttggccaggctggtcttgaactcctgatctcgagcgattcacttgcctcggcctcctgaagtgctgggattacaggcgtgagtcactgcacctggcccccaggggctccttgccaggattttaaattatagttttagtgtagttctaggcaatgtaattttgaacaactacttactgtctacagccgatgggagagtttctggatgaacagagagaatgaggatgccgaggatgtcattgtcaacagatatattcaggaaatcccttccactctgaagtcagcagtgtacagtagtcagggtagtgaggcagaggaggaagaaccagaggaagaggacgacagtcccagggacgacaacttgtgagtgtgtcccagtgagtgggaacccttctggtaagggcccaggccccacacagacttgccaggacagatgttaaactctttggccaagggagtgcagggactagggggaactgtgggtgaaagcgccttcaaaaaaaggagacatacccttaaaacttgtgtgtgggtataaagtgatcctgtgagaaactataggaaatactgaaaagactaaaggagaaagttcaacttttctgataaaaccccatcccctgaggaaatcactgttagcaatctagtgtatttctcctcagtcttttcgtgtgttcatataattaactaagtcatattctgctttttttttcacttaacattatagtgtgaaccctttccagtaacattacaaatccttcgaagaacatgatttttaatgtctgaaaagtgtgcccttttgtggatgccccatcactcgacacttcctctattactggacacgtttcttagcctgttcccacactatcccttaccttaccttgcattttctaggatgtatatcagagaggaagcccttaccttagccacagtcttcactcccaaatcctggctgtctagtcattcttctcttcagttgagattgcctgtagggaaaacatgggcaggccagagtggggaaagctggggtagccaggatatctcagtttggcagtagagatctagcttgagactttccaaactgttttacatagtacctgagtttccttggaagaatcccaccctgaggtcatgggggctgggaagtggggaccagtaaaggaggaaggtatggctttgggtccccatctcagtgcctttgattgtttcaacatgagtttttgtttcataaagaatcctactgccccaggaggtaaaagggggttgaaaatcactgatccatctcacagggactgagcccagcccagagccatatgtggcctccccaagagggctcactggtgggctgggctcctggattgtgtttggactttggacatcagtgccagtcacacaaaggtcatctgcaggctccctcattaacatccctctcggtctttgtctcttttcccttagttttgggttagtgcctatgacatttgccactcttggctgggttttacaaacaaggctttaccttgcctgcctacatatccagtggtgctaccaggttaccacaagacactgggatcagaaaagctggaattaataaacaaagaggcaacattaggtggattaagacccagcctcaagggctaggaatgcttttcttttttttttttgtgacagagtctggctctgtcacctgggctggagtgcagtggcacgatctcggctcactgcaacttccgcctcccgggttctaagcgattcttgtgcctcagcctctggaatagctgggattacagacacgcgacaccacgccgaactaattttgcattttcagtaaagatagggtttccccatgttggccaggctggtctagaactcctgacctcaggtgatccacctgcctcaacctcccaaagtgctggaattacaagcgtgagccatcacgggctgccgcttttctcttgaactagattcccaggtagcttgctctccagcctcaggcaagggagtttctcctgtgtgctggtcctacagtcccagccccacagcactgatccccataggttctcagtttcaaagacagttgtttgttttcagagcccattgctcttttttgaaaattagattcagtcagaaaccatttcacctgtgcaaggacccccgcctgcaggagaacctatttttaggtgttaattttctttcttcaggaagagcaagcaagtttcccttctattaaaaaatgtctttgtgctgcaagagatgtttctctgccatctccccacattttctagtatgtaagagaaaagcagtctcaatattgcagccttgcctatcttagtgttgctccccagtaagctctgaaatgagaggtttatcttcttcagctgcagcagtgtccccagcaccataaggtcatagcaggggactcagtgaaacagcagatcccaggaaggctgaacctcaactctgcttcatcccgtaagactgattgatgggttgggccaaattataacttttggcttcagtaaagctgtacaacatttggcaacctgaggccaggacttccttgttcctgttgtttaagcccttagagctatactcatcagcaggctgtggcccttcataacctcttttatcttctgttgattagagaggaacgtaatgacatcctggctgtggctgactggggacagaaagtttccttctaccagctgagtggaaaacaggtatgtagccctgtacaaatccaattgcagtcatgcctgttatattttcattttctgagattctgttactattaattatacattatcattgttagttcctgcttattgagcatttgctgtggtaccagatactgtgctcactgctttgcatactttatcctattttattcttataaaacccaatgaagtgggtactactttccttatcaactttttagaaatgagtaaaccagaactcagagcagtgaaattatatgcccaagatctcacacagctagtaaatggtggagcctaggagttaaacccaggttggtttgactttaaaatctagctcttaattttgaccttactttcctctattcgctttctttcattcaaccagtatttatgagtacccactcaggaaagccctttcataaaggagctgctgacatagagctgggaaagtgatagcctctacctgcaagagctcacaggctggcggagacacacttgatagcaaagagcccctgtgtggtgtggtatgtgacacaatagaaagctgtacagatagacagctttttgggacacaaaagagggtaacatcactacttggtagagatgggaggtcttgttagaggttatctttgagcaggccatctttgagttaggctaaggacattgggaatggtgtttcaggcagaaaaaaaaatagcatgtatcaaggcaggaaggaatgaaaatatatgacagttcagagaatggtgagttgtacagggtgactgcatctcagagtttgtgacctgaaaacagagctgaagaggaacatgggggtatgattttttatttatttatttatttatttatttatttttaatttttttcgagatggagtctcactctgtggcccaggctggagtgcagtggctcagtcttggctcactgcaagctccgcctcctgggttcacgccattctcctacctcagcctcctgagtagctgggactacaggcgcccaccaccacgcctggctaatattttttgtatttttagtagagacggggtttcactgtgttagccaggatggtctcaatctcctgacctcgtgatccgcccgcctcagcctcccaaagtgctgggattacaggcatgagccaccacgcccggcctatgattttttgtttgtttgttttgagacagagtctcactctgtcgcctaggctggagtgtaatggctcaatctcggttcactgcgacctctgcctcacgggttcaagagattctcctgcctcagcctcctgggtagctgggattacaggcatgtgccaccatgtccggctaattttgtatttttagtagagacggggtttctccatgttggtcaggctggtctcaagctcctgacctcaggtgatccacctgcctcagtctcccaaagtgctgggattacaggcatgagctgccaccacgcctggctggagatgtgattataaaggacctgagtagtgtgaataagaagtttgaacatcatatactgtaagtattcaggagccataggtggcaggaagtggcatcacagattcttgcttcagaagaataacttgtttccatggagggtggattaaaatatagagagcatggtagtaggatgacttattagtaggcaggaaatgccaaggattagagtaaaggtgctgggtacagatttcacaccacagccaagcaagtgagaaatgcaacctgtgcagtgaagcctttaattgcgtagcatccttattcctcaaaacatgtcatgtaagagggaagagttttagatgtgtgtagcccagcttttgggccatttcttctacccctgccttaccattggtcatttcttttgtattcgagtaaagaaaagataaagggagcagataatgaagtattttctcagtttcccatggctgatttcctaaaactctcattttaattaactatcatctagtttccctggccctctctattcatctgcttaatgtgtgtacatcatcattcaacagatacttattggcacacctactgtgtacgaggcactggatgtgggtactgaagactcttgggaacaaataaccacactgcagtgggagggaatggggtcttgttgctatggccacagaagaaaagagctcaacatggccgagggccacaggaaatatcttgcatgtatgcagccccagagctcatgttgtggcccaaagtttctgcacgatgagcaaccttaacctgctgagatggtaaccccaacttgtttgggacagtaaaattgttttcttgctgggtgtcttcccttcccaatctaggaagatttagaattcaatataggatgatgaagtaaatcaaacccatacttttgtgttagtctgaggtataatttgtgtatttttgtcatttgaagtgttagtaatacttaaggggatctggcttaataataataatagctaacatttattgaattccaggcattatataaactctttacaaggattaactcttttaatccttataacaaccctatgaggtaaatactgttatcatcaccattttacatgtacgaaaattgaagcacagagaggctcaataatttgcccaaaggcacacatttagtctgtggtccaccctgctgaaacccaggcatactggtgccagaatccatattagaatgtctatcagattagtcttgcaatgaccattcaaaagttgtattgagtaatttcatatgtctgattttatttactttttgagaaaaggcctcaccctgttacccaggctggagtgcagtggtatgatcatggttcactgcagccttgatccccctgggctcaaggaatcttcccactttggccttccaagtagctgggactacaggcacatgccaccacatcctgctaattaaaaaaaaaaattttttttttttggtagagatagggtctcctatgttgtccaggctggtctcaaactcctgggctcaaatgattcttctgccttggcttcccaaactgctgggaatacaggtgtgagccaccatatctggcctacttctgattttaagtggaaagataagaattatatttaaagtgtatattatttaaggttcctaagcaatattggaatgcttaagcaatttgttacatttttcttcttggtgttcactgagctttttgaatctacacattgatatcgttctgtctttcaccaaatgtgaaaacattttggccatgatttcttgaaatatttcttcttctccattctttcctttcctctggaactctaattacacttacattagaccttttgttactgttctccaagtcatcgaggccctgttattatttttttaaatcccttcttttccctctgatcttcagattagaggatttctgttgttcagtattaaatttcattgactcttctgcaacttccaatatttttcttaagctcattcagtgtgtatttgtttcagttattattgcatttttccttttctagaatttccatttggttcttttttcctttttattcattacaagcgtatttttctttatagccttaatcatagttataataactgttttaaaattctcatctgcagctgggcatggtggctcatgcctgtaatcttagtacttctggaggccaaggagggacgattgcttgaggccaggagttcaagactagcctgggctacatagagagactccatccctaaaaacgaacaaacaaattggccagggaggtggcaggcacccattgtcctaacaactctgtaggctgaggtgggagtattctcaagctgaggagttcaaggctgcagtgaactcttaccactgcactccagtgtgggtgacagagcaagacctgtgcccaaaaagcaaacaaaaattcttatctgctatttctaacatttgggtcgtcatggttcagtctccattgatttttttcccttgaatatggttcacattttcctgctttggggaattttgaattgtactcaatattgtgagtaatatgtcataaagactcatatccatcatgttcctctgaagattattgtgtatgtttgtgtgtatatatgtttaagcaggcagtttactttgctgggctcaaaatcaaaactccatgttttcagtggtgtcagcagctgacatctctgtgcagttctttagctgtagctaggctgcttggcatcttgtcacagtttatagttcaagggtttccagatattcagtggagtttatgtgcagaatttaagctcttactttgcttctcttttctgggatttcccacttcactttccgggtgctgtggtcctcccaaattctatactcacccagcatgatggtgaagagggctgccctcaggcaaaaacccttaaaaaaatgagaagttcacctagtgtttgttcccttcttctaaatgtgcatgtgtcttcagtttctgcctgcttttggtcgccctgaaatggttgttgtttatagttggtccagagtttattgttgttactttgtgggaagattggtccgatgggaactagtgagccatttccagaagctgctagccttccatgtcgtgattcataagaatttttagttttcttgttaggttttctagcatcagataagtgctagggaaagttttcgttgctaggcatttgaaattcctatacaggaaaggaaatttgaatgtattaaacttataattgcagtttaaattggtgtaagggaattaatttaactaagttttaaatgggactggatatttaagggattttataatctgttcaaaattggatgccttaaacagtcaaagtcaattggctgttcactttaactagatttataaataggaaaatatttgtaaattgaacttaagaacttaaggagaaaccagttccctaaagttatttcttttataaattgaatattagtttaataatgttaatcacaaatcgtctttttattcacaaaagacacccttggggcagcaaaaaactccagtggtaataaggaacttgggctttagtggggcagacctgattaaccctgtgtctacagacaacgagagaagtgcaatgggataggcgagcacaagtgctgtgggaggatgaggggatggggattggagatgttcctggaggagatgacacctggcagacaaagtgagggaaagagcattcctggctgggtctaggaatggtgtggagtgtagcacctgtgaggatgtggaggcctgaaaaagcattgcccgcttaggaaacttacaagttcattttggctgagagaatgaccttgggggctgagctcgggagtttgacctgcatcctagaagctgaggaagcaccatcaagaaagagaaaagacaacccacagaatgagagaagttttacaactcatatatctgataaaggacttgtatctggaatatataaagagctataaagacagggctgggcatggtggttcacacgtgtaatcccagtgctttgggaggcagagacagggagatcacttgagaacaggagttcaggaccaacctgggtaacagtgggaccccacctctaaaaaaatatatttttaattagctgagtgtggtggtatatgcctctagtcccagctactgggggtggtgaggggctgaggcagaggaattgagcccagaagttcaaggttgcattgagttatgatcatacgactgcattccagcctaagccacagagtgtgacatttctctgtggccaataagcacatgaaatgatgctccatatcattagccatcaggaaaatgcaaattgaaaccacaatgagataattcgcactcactaaaatggagaaattggaatcctcatacactgctaatgcaaatataaagtggtgcattcacttgaaaagtgtagcagttcctaaaaaaggttcaacgtagagtttaaaaataaaaaaatataggccaggagctatgactcactcctgtaatcccagcactttgggaggccaaggtgggtggatcatctgagctcaggagtttgagactagccgggacaacaaggagaaacaccgtctctgcaaaaaatacaaaaattagccaggcgtgttctcacacatctgtagtcccagctacttgggaggctgaggtaggaggatcacgtgaagctgggaagtggaggttgcagtaagccaagatggcgccactgcactccagcctgggcaacagagtcagaccctttttcaaaaaaaaaattttttgccaggcatggtggcactcacctatggtcccagctacttaggaggctgaggcaggaagatcgcttgagtccaggagttgaaggctgcagtgagccgtaattgcaccactgcactccagcctgggtgacagagtgagaccccatcttgaaataaacaagaattaaaaaatgaagagaagtagtatgggtgtagttgcagaataaaggacagtctttaaactgaataaactcagctttataaaatacttttttaaaaaggcggagaaaagaagctgagggaacccattgaactataggaagaactatatttgcagagggaggggggcctttgggaacaaaaccacccacagtctccatcttggcggaggagccctgacacactcctgcactcctggagcacttgggtgggactaggggaggtgccactgactccaggagctgaggtttgggctgtgtagaggatgagtagggagatgcagaggcagagaggcctgtgttcaccatgggatgacacaggagaaaaggctggccagctctccctgtcttcccaactccctctaaagttggcgagaaaaagcccttaattgtattgcaatggttatggattcggaaatggtttttcccttgctgtgtgttctttttcctcagattggaaaggatcgggcactgaactttgacccctgctgcatcagctactttactaaaggcgagtacattttgctggggggttcagacaagcaagtatctcttttcaccaaggatggagtgcggcttgggactgttggggagcagaactcctgggtgtggacgtgtcaagcgaaaccggattccaactatgtggt

SEQ ID NO: 12516 - DNA, 422 bp, Homo sapiens
tataaatgacatcgcatttaagcctgatggaactcaactgattttggctgccggaagcagattactggtttatgacacctctgatggcaccttacttcagcccctcaagggacacaaagacactgtgtactgtgtggcatatgcgaaggatgagaggaacgtaatgacatcctggctgtggctgactggggacagaaagtttccttctaccagctgagtggaaaacagattggaaaggatcgggcactgaactttgacccctgctgcatcagctactttactaaaggcgagtacattttgctggggggttcagacaagcaagtatctcttttcaccaaggatggagtgcggcttgggactgttggggagcagaactcctgggtgtggacgtgtcaagcgaaaccggattccaactatgtggt

SEQ ID NO: 12517 - DNA, 11407 bp, Homo sapiens
tataaatgacatcgcatttaagcctgatggaactcaactgattttggctgccggaagcagattactggtaggattttgtcttagtttcctcttaaagtgcttccctaacctccctcttgtgagtactctgaaatttgaccctttttttttttttttgagattaaaaaggcaagggtggaaaaaccttccctattactttttaatagggatggaaatgggctatttaaaacgggcaagtaaactatcagataagaacctgtgaacaataccacctttggggtcattcatctttccctttttactttgagacacccatgaaagagttgaaaacaatcacaatgcctttgaaactggactggtgtcagtttacattttgtcccccagaaaaattcaagcaacaggactgacggtgctgtgtccatgaaaagtcagatagcctgaccccaacttttaggcattggcctatctaaacagttccatatggatgttgtcctatttttcatattttcaaataacataagctccctctggaacctatccaggtatataaaagtaattttcagagaaccccttatgtttgaccaaaaaacctttgtatgatctctctttctgtctaagtctacttcctcttctctgttgtctctagatacgcagactgattaatctccattctttgtatggttaactacataatcttaaaacatggttaaattgttctgcagacttctctccagtgtaaacaatccaaactctattagtttttctacataggttatcttttccaatactctaaccatttcagaaagtttccgcttgatttctcagatggtgtgtgtgtgtgtgttttttttttttttttttttttttggagacagagtctggctctgtcgcccaggctggagtgcagtgacgcgatctcggcttactgcaagctccacctcccgggttcacaccattctcctgcctcagcctcctgagtagctgggactacaggcgcctgccgctacgctcagctaattttttgtatttttagtagagacggggtttctccgtgttagccaggatggtctcgatctcctgacctcgtaatccacccacctcggcctcccaaagtgctgggattacagaggtgagccaccgcgcccggccagatggtgtgtttttaaactctccacatagtgatagatgtcacatggctatcaaatacctaaatccatattacagctgggttttattttatttcttagagacagggttgtgctctgttgcccaagctggtgtgcagtagtgcagtcatagatcactgcagcctcaaactcctgggcttaagggatcttcccacctcagcctcccgagtagctaggactgtggacacacaccacctcgtccacctaatttttatttttttttatttttatttatttttattttttgtagagatggggtttcacttagttgcccaagctggtcttgaactcctggtttcaagcaatcctcccacttcagcctcccagagtgttgggatgacaggagtgagctaccatgcctggcctacagttgggttttataacattccctcctacttgaaagcccagagttctgtgactttcaaattcttggtagcaaatatgaaacatctattatgttgatttagtgcagagctggcattaaaatttaatcatgttgtagctggctctttttatgggctagttttatttaggagggcctgccttgatcaatcatatatccaaattcaggtaaggatgagtataaagaatttccatggagtgagtaattgaacctttggttctcaaggattggtagtatattcctggtcacatagtacatagacctgggtcctctacttcttggttacccaactttaagtcacgttgtttttggttttgcagtgcagtttttattggctacagatttagaatattgacacgtattgttataaaaacaaaaatagcagtagcaaccctgcaggaattctgactaatagatatcacatagataatctgtatttgtctcttttgccaggtttatgacacctctgatggcaccttacttcagcccctcaagggacacaaagacactgtgtactgtgtggcatatgcgaaggatggtaaaaggctgctctgggtttccattctctataatagcctcatcattgttcatttttctctttagtcactttttaattatttctagtaagctggagtacaagttgcaagttcagaagacagtgaagttgctaagacttcagtttggtcattcaatctagcaagtatttattgaggtcatctatgttccaggcactgttcaaggtgcttgagttacttcagagaaaaaaacggtggtccctccccttatggggcttctgttttatggggtggtggtgagaagtgagggaggaagaaagtatgagggaagacatacagtaaacatagtaaaaaggtaaattaagtagtatgctggaaggtgataactgttatggaagaagaaaaagtagagcagaatgagggggattgagagtgctgggcagggcagggggttgggtacagtattgaattagactagtgagggtgggctcattgagatgaggacaggtgaggaaaaagactttgaagtcaggaggcaatgagattgtgccagtgggcatcggggggaagagagctctttgcagaggaagagccattgcagaggccctcaggtgtgggtgtggctgctaggagctggatcaaagagaatcgggaattgtagaggatgaggataaagtggtaacagacatggggtggtcagatcataaagattttgattctcagtcaaaatggaactactgaaaggtcctcagcagaggagggatctgatttgatttgtattttaaaaggatccctctagttgctgagttggaaacaacctgcaagaggtgagggttaggacatctgtgtgaggaagcatcatccagacagggggtgatggtggctcagacctctgtgggggcagaggaggtgatgagaaattatcagactctggatataatgggagggtggagccaactggattgtctgacagattggatatgggctatgaagaaaaaggagtcaagtttttgacctgaggactgaaaggttggagttgccccccccactgagatggaaaagactgcaggtagagaaaagttatggttgaagatcagaaattcagttttatacatgctgaatttgagaaaagttgatgatgtcggagaggggagagaactgctggaacagagttgttgagtaggcaagaggagatgggatctagggcatagacggggtatttgctttagataggggcacagtaggaactgcagaggccagcagatggggacaatgtggtagtaggaatctaatggaaattctcaattccattttttttttcttcagtgaaataggaagcaacagcaactgagagtggcaatggggaagggaggtttcagagagttgaagagaaagggaaaaagtgtaaagtcactgcctcagagaatgggacagcgagtggacccaggaggtgtagtgagatccccggtgacatgaagggccctcttgaagattgtgatcatgaattgaaagtgagattagttggtgtgattgtgtctttttctccagcgattttgagctgcatagttgtagaggcagaagaggtgaatttaaccagaggtggttttgcaagcacatttgaagatgaagtaggagggcaagggagcagaaagtgtatacagataaataattatgtacattaaccttgaattgttggctgaataatgaagggagagaggacagcaatggagaagtagtaggttctggtggtgttgaaggattgttacagttggggtaccaggtgggttgggaaggaagggaagtggtgcatgaaactgagatttaaatttattttaaaataaatccatgttgtcccacagcataggattagtgggaagaaatgggctttggaatgagacagttgtgagttccaaccccaacccaacaccagagttctgtgagtctgagctggttattgagtctgagtcacgatttcttcatgtatcaaatggataacattgagataacattctgtagccactgccaagaagtcacaaaattgtaatgttataattcttgaatgaaccttggagattattccagtcccaggtttttaacttcttttggctgatgggcctctttgataatcagatggaagctttagaccactttctagaaagatgcaaattcttcatgtgtatgcagaatttcatgcatataattttagtctgattagtccagtctcttcactttagtcctgcataaagacataaacaattggccaggcacggtggctcatgcctataatcctactgaaatcctaaagctctgggagcctgagttgggaagattgcttaaggcaggagtttgagaccagcctgggcaacatagtgagactccctaaaatctggcctgggtgacagagctagactctgtctcttaaaaaaaaaaaaaaaagacaagtcatgtgacttgccaaggccatgcagcagattggcccaaagacaaaactaatttcttgcttcatagtcaggtgtgctgtaccatggtagtcatatttgtgtgtgtgtgtgtgtgtgtgtgtgtgtgtgtgtgtgtgtgtgcatgtttgagttcaagttcagaataatgttttagggagacctgtgaggagggagcctggagagctgaactgtttctgtctcatcctagtggctgttgaggaatgtgggtcagtccagggcccagtataaggcccagtaggtacagaagagctattgggcctctggtgcctctggtgtttataagcatagcagggctctttgacctgcaacaccattagggcacttgaggatgtcagagtgtgacccatcagtagtggcatttgcacagcactttgcagagtcctgtcacacacatctcacttgatgcttccaacaactctctgaagcaggcagcaaggggactcttatctccgctcaaagatgagaaaacagacttggagcaattacaggtgatggtggcagaggcaggcctaacccaggttctctgactgcagagtctttgttctttctagtgtatcatgctgcctcttcatgacacctgtataatgattaagaagtcttttagtcctcagaattggttttttcctcttagacctgaagattgagatacactgaattccagctttgctctttaagtctgcttgtttctgatttctcctttaagttcattaagttttttttgtttttttttttgagatgaagtctcgctctgtcgcccaggctggagtgcagtggcgcgatctcggctcatggcaacctctgactccctggttcaagtgattctcctgcctcagcctcctgagtagctgggactacaggcacgcgccaccatgcctagctaatttttgtattttcagtagagacagggtttcaccatgttggtcggcctgatctcaaactcctgacctcgtgatccgcccacctcggcctcccaaagtgctgggattacaggcgtgaaccaccatgcctggcccaagtttaataagtatttaatgagcaaccatgatataaaagtatgtaagacatagtttttttgttcaagaaaaacaatataatatgaagaaataatagaaatagctaatttttttttaattctattccaggcccagttctaagcaacataagggttaggggtgccactgcctgtgcaataaaaaatctgcatgtaatttctgaaccccccaaaactttactattaatagcctactgttgaccagaagccttacctgttacataaacagttaacacatttttaatattatatgtattatatattgtattcttaaaataagctagataaaatgttaattgagaaaaaagaaaaatatatttactcttcattaaatggaagtggatcatcataaaggtcttcatcttcattgtcttcaggttgaataggctgaggaggaggaggaggaggaggaggaggaagagggattggtgatgctgtgccagggagacagaggcaaaagaaaattcacatgtaaaagtggactcatgtagttaaaactcatgttgttcaggggtcaactgtatgtacacatgtacatacactcatttaatcttcacaccaaccatgaggtaaatactaacattgtatccatttttcaaataaggaaatgaaagctcttcagtagcttgtttgggtcatgcagctggtcagtgagatctctaggaattctgacccagagactctgagcccaaagcttatgcttttcatcaccatcacctgctacctaccaggatgagggaggagtgatggaaatagtaagagcagtttctttgtttatttagtatttgcagcaatatcatatggctcaccctaatatctactatttcagctactgtaaaaggtacttggccgggtgtggtggctcatgcttgtgatctcagcactttgggaagccaaggcgggtggatcatgaggtcaggagtttgagacaagcctggccaacacagtgaaacctcgtctgtactaaatatataaaaattagctgggcatggtggtgtgtgcctgtaatcccaactacttgggaggctgaggcaggagaattgcttgaacctgggaggcggagattgcagtgagctgagattatgccactgctctctggcctgggtgacagagctagactccgtctcaaaaagggccagtcgtggtgactcatgcctgtaatcacagcactttggaaggcggatcacctgaggtcaggagtttgagaccagcctgcccaacatggagaaaccccatctctactaaaaatacaaaaaattagccaggtgtggtggtgggcacctgtagtcccagctactcgggaggctgaggcaggataatcgcttgaacccgggagtcggaggttgcggtgagccgagatcgtgccactgcactatagcctgggcaacagagtgagacttagtctcaaaaaaaaggtactttacagatactatcttagttgactcccataaaaagactctgaggaagatactgttcctctgtgtttcagatgaaggcattgaggctcagagaacagtgacttgcccaaggtcaccttccacttgccctgtgaataaagtctaaaagtccttaagatgtacagaatgtggcacatacttacctcttaatcctcgtctctcaccagagtaggtgaagaccccgttatttgctgccatggtaccgtgatcctcttccaaatgcttataaatgtggaacagtgtaattaataacaaattacttgttatatgttgcctctctccagtctgttccttcataaagcccaagtagtatgaaaatgcgaatctgatctatcactctttgcttaaaacctttctttggcttcccattgctttaggataaagagcaaggcctctgctgtgtccctgaggtcccaagagatccttccacaacccacctcacccttccctccgttccatgatgactccgctcattccctcagacatgccaggcttttcctgcttcagggcctttgcacatctgttccatccatgtggatgggtctgtctcctctctacatctggctaagctctgctcatcctttaggtctccactgaaggatctcatccttagagaaatgttccctcatctaaattaggtcccccaggagatgttgaccaaagggtagtttcagtcagacaaaaggagtacatttttgagatctattgcacagcatggtgaccatagttaataatagcgtatatttcaaaactggcacaggaatagtttttttttttttttttttttgagatggagtctcgctctgttgcccaggctggagtgcagtggcgtgatctcggctcactgcaagccccacctcctgggttcactccattttcccacctcagcctccagagtagctgggactacaggcgcccgtcaccaggccggctaattttgtttttgtatttttagtagagacggggtttcaccgtgttggccaggatggtctcgatctcctgacctcgtgatccacccgcctcagccctccaaagtgctgggattacaggtgtgagccactgttcccggccaggaatagattttaaatgttctcactataaaaaaataagtatctgcagtgatggatatgttaattagcttaatcattcttcaatgtgtatgtatataaaataccacattgtacttcataagtagatataattattatttgtcaaaaataaaaatttaagtaaaaaagtaaatcaggttccccagttattctctttcataggatccgtgtcttaccatgttgtatttgtgttagattaatttgatgtgtacttcttacactagactgaactttatgaaagtagggatcatgtgtgttttaatcattacttaatccctagcatagaacatgacagctacatgtagtaggctcccaatacatctttgtttactcagtgtcagacaaagcaggtttggaacccaaatattctgactccaaggtcctgcctcccagtactgataagaactaggaaagaagctaacacttactaggtaccttaaagaactagttttctaaagaattctctctgggaaatgctggtttaagataaatgtaagactttccattttacaaacacttttaggcaagcgctttgcttctggatcagctgacaaaagcgttattatctggacatcaaaactggaaggcattctgaagtacacgtaagtaacttaggtgtacagtattatgagtttgatgcttattgaataattgcagcaaaagcctcttagaaaagatgtaggagaaaacttttttctcttaaattgaacttgaaattaagttgtgggtgtgtgtggttggtataggaaggttgagtagtgaataagttaatgaatatttcttggccacttactggcgtggccagcactgggctaggtgcttttatgtagctcatctcagttcatctgacattgtagactttatcccacccccaacctgtcatcttccagtgtccctgtctcagagaatggccttatatccacccagtgtcaaatgtcagaaacttggggtcagtgtgctccaggcctcctcttactattggggatctgccgtgttcttcccctgttcctctactagttggtccctatttaccctgcagatctcagactcaaatgtcagtttctttgtaaggactttcctgcctctctagactggaacaggtctctttcgaggcatttctcacaattgcagttttaggtttattctggtgactgatcagtattgctcatcggcctgtaagttccataagaacagatactgcatctattttttgttttgttttgttttgttttgagacagagtcttgctctgttgcccaggctggagtgcagtggcacgatctcggctcaccgcaagctccacctcccaggttcacgccattctcctgcctcagcctcccgagtagctgggactataggcgctcaccaccatgccaggctaattttttgtatttttagtagagatggggtttcaccatgttagctaggatggtctcgatctcctgactacatctattttttttttctcactcttgtgtccctgatacaatgcctagcccataattggtactcaccaattttccttccttccttctttccttccttccttccttccttccttccctccctccctcccttcttccttccttccttccctccctccctcccttcttccttccttccttccttccttccttccttccttccttccttccctccctccctcccttcttccttccttccttccttccttccttcctttcttttcagtcttgctctgtctcccaggctacagtgcagtggtaactagctcactgcaactacaaccttccaggctcaaataatcctcttacttcagcttcccaaatagctggaactgcaggtgcacacccccacaccaggccaatttttaaatttttttttttcttggtagagacagggtttcactttgttgcctgtactggtcttgaactcctgggctcaagcagtcctctcaaagtactgggattacagatacgagccactgcacctggcctcttttcaattgtggtaaaatatacatgacataaaatttatcatattaactactttttaagtttacagtttaatgttaaatacatttacattgttgtgcaaccaatctcccaaactcttttatcctgctaaactaaaattctatatccttcaaatacctactcacccttctctcctacccccagcccctgaaaaccagcattctactttctgtctctctgagtttgactgctttacatacctcatataagtagagtcatacaatgtttgttcttttgtggctgagttatttcatttcacgtaatgtcctcaaggctcatctgtgttgtagcatgtgtcagaatttactttctgtgttgtagcatgtgtcagaatttacttccttttttttctttattattatttttttttatgaagacgaggtctcactatgactcctgagctcaagcaatccttctcccttggccgcccaaactgctgggattacaggtgtgagccactgggctcagcttccttcctttttaagtctgaatattattccattgtatatatagaccacattttctttatccattcatctgttgatggacacttgtgttgcttctgcttcttagctattatgaataatgctgctatgaacatgggtgtacaaatcaacaaacaatttttgaaggaatgaatgaatgagtgaagttgtaagtaaagtattacccacaagtgaaggactaaaacgggttgagacgccttgcatggtacatgatttgctcagctttcattgttgtctaaggatttgtcatgtttccagatcttggtctgtgatgtcttcattgcacctccatcttccatttctgggcctccacaaaacagtaagagtaacagccacagataaagcacctaaaggccaaggtgggaggattgattgcttgaggccaagcgttcaaaaccaacctggccaaaagtgagtccccatctctacaaataagaaaacagtgggtgaggagaaggagaattaattctttaggagtaggagaattaatttctgtgctttttgttggtcacttgcagaagagcatgtggtctaaagtcagaggctgtgggctcattattaaaatcttcagttgtagccactgaaatctttgtggtttgctgcatagtaatctacagttgtttacttcccaggcacaatgatgctatacaatgtgtctcctacaatcctattactcatcaac

SEQ ID NO: 12518 - DNA, 418 bp, Homo sapiens
tataaatgacatcgcatttaagcctgatggaactcaactgattttggctgccggaagcagattactggtttatgacacctctgatggcaccttacttcagcccctcaagggacacaaagacactgtgtactgtgtggcatatgcgaaggatggcaagcgctttgcttctggatcagctgacaaaagcgttattatctggacatcaaaactggaaggcattctgaagtacacagtcttgctctgttgcccaggctggagtgcagtggcacgatctcggctcaccgcaagctccacctcccaggttcacgccattctcctgcctcagcctcccgagtagctgggactataggcgctcaccaccatgccaggcacaatgatgctatacaatgtgtctcctacaatcctattactcatcaac

SEQ ID NO: 12519 - DNA, 2225 bp, Homo sapiens
aactattcatgggcactcacagcaaggcaaccccatcttgtaggagggcatctgtccccagggcagggatcaggagagctgtttccagaggcttccagggtaacttggagcaaatcacttacctttcttggactcagtccctggaagaagaggccattccagaccgcttcctcccacgaactcattcattgtgtcagcaaacgtagactggggttctgctgagggaggccgatacaacccaccactgcccacggctgtgcacggctttgctgtgggaacaggcctgtaactgcggcacaacctgcgatctggacaaagggcagaggaagctgagactctttcccctggggtgggggcttgaggggcttgggaggactctgcagaagaggtgacatttcaacagggccttgaaagccaaatagtccgctcccatgtaccagtacctggataggaaactgttcaaggaagcctaccagattgcttgcttgggtgtcacagacactgattggcgtgaactggccatggaagcgctagaaggtttagattttgaaacagcaaagaaggccttcatcagagtacaagacctccgatatttagagctcatcagcagcattgaggatttccttggatctggagaccccaaagaaacaaagatgctaatcaccaaacaggctgactgggccagaaatatcaaggagcccaaagccgccgtggagatgtacatctcagcaggagagcacgtcaaggccatcgagatctgtggtgaccatggctgggttgacatgttgatcgacatcgcccgcaaactggacaaggctgagcgcgagcccctgctgctgtgcgctacctacctcaagaagctggacagccctggctatgctgctgagacctacctgaagatgggtgacctcaagtccctggtgcagctgcacgtggagacccagcgctgggatgaggcctttgctttgggtgagaagcatcctgagtttaaggatgacatctacatgccgtatgctcagtggctagcagagaacgatcgctttgaggaagcccagaaagcgttccacaaggctgggcgacagagagaagcggtccaggtgctggagcagctcacaaacaatgccgtggcggagagcaggtttaatgatgctgcctattattactggatgctgtccatgcagtgcctcgatatagctcaagatcctgcccagaaggacacaatgcttggcaagttctaccacttccagcgtttggcagagctgtaccatggttaccatgccatccatcgccacacggaagatccgttcagtgtccatcgtcctgaaactcttttcaacatctccaggttcctgctgcacagcctgcccaaggacaccccctcgggcatctctaaagtgaaaatactcttcaccttggccaagcagagcaaggccctcggtgcctacaggctggcccggcacgcctatgacaagctgcgtggcctgtacatccctgccagattccaaaagtccattgagctgggtaccctgaccatccgcgccaagcccttccacgacagtgaggagttggtgcccttgtgctaccgctgctccaccaacaacccgctgctcaacaacctgggcaacgtctgcatcaactgccgccagcccttcatcttctccgcctcttcctacgacgtgctacacctggttgagttctacctggaggaagggatcactgatgaagaagccatctccctcatcgacctggaggtgctgagacccaagcgggatgacagacagctagagattgcaaacaacagctcccagattctgcggctagtggagaccaaggactccatcggagatgaggacccgttcacagctaagctgagctttgagcaaggtggctcagagttcgtgccagtggtggtgagccggctggtgctgcgctccatgagccgccgggatgtcctcatcaagcgatggcccccacccctgaggtggcaatacttccgctcactgctgcctgacgcctccattaccatgtgcccctcctgcttccagatgttccattctgaggactatgagttgctggtgcttcagcatggctgctgcccctactgccgcaggtgcaaggatgaccctggcccatgaccagcatcctggggacggcctgcaccctctgcccgccttggggtctgctgggctgtgaaggagaataaagagttaaactgtcagaatgtg

SEQ ID NO: 12520 - DNA, 15107 bp, Homo sapiens
gttctgattcctgatgtcctgtcctggaataactgaaaatctgggctaaaaatgctaaaatgcattcagaatatggtgattttatcctgagagagttaatactacttctctaccttcaatggctgaggggaggctgacagttattctttaaattgtgtggaaaccaagacagtgaatggtgacctttactctggtaagacatcagagactacaggaagggccccagcaaaggaaatggtaacaagattgggagggcacaggcataacttggtgttgctgcctttgggaagccttcccttggtgttgctgcctctgggaagccttccctgactcaccctggcagagacagtgcagttgtcctcacctttgtattgacccacatctatgtttatgtgaaattcttcactgttgcggttctacttcttgtgcaatttgtcgtcattactggtttaggtggctgtagctgtcctccctgaggggctgaacaccttgaggagttcatcctggccacggtcccgtgccagcattacagcactggtgtagtactggcacaaaagaggtgtcagtaaaatgtctgtggagggaggaagggagtgaaattgggcagaggcttgtaggttatttccattaatggttgattctgttttcagctctatcagtctgtgttcgttgctagtggatacaatgaagtcactagatgaggagtcagaggcctaatccctctcagtgttccagttcccttatctaaaaggagcatgctactcactgtgtctcactgatacggttctggttctgaggttcaaaagagagaatggaattgaaagccaattgtataaatacatggagaaaggcctgtcatttgtttaacatattttatagcattttcttcatgtgaagcactggtctgtgtgcttacactggaatattaaaaaggcaaaatagaatccctaccctcaaggagcttgtggtcttaggagaaggtgggattaaaaaaaatataatattaagtactagtatttattgaatgcttgcagtgtgctaggcactgttctaaggattagaaatgaatttctatttgagctttatgacagcccctgaggtgtcaggtattattctcattcccaccctactgatgaaaaagaggtagaggtcccttagctagtaagtggaggaaccagggcttggactttagaccaggtgattgcatacagagcctgctctgctaagcactgctgaaggaggcccaggaggaaggagtttcttccagcttggggctccaggcaggcttagtggaacacagataacatgtgcacacgtcaaaatgtttggaggaagcgttctggaccaggggaaaggcaaaaaataacttgtttgatgttgcacttggccatgtatttgtgcactggagttaccttcttgattgtacttcgcaacttggcaaatagaagaatttgcttatgttgtctagacatacacttgctatgaggcactgagccagggcatctgggacaggggggagcaagccttaggtgaccagtgtgccatgggagaggcacagctcagatagagtcatgtgttgtgattgagacctatgaaagaaaactagattttcagaaagcatcattgttattttaaatgctaggttatactctggttgcagtgtcaaagttataaacaatgaaactgtcatttctttgagagtcaaatccctgaaaagttggctagaactttaccaatctattttatttttcttctgaaagaatgatagattcatagtaagttacaaagatggtaccaagaagtctatgtacttttcatccagtttcccccagtggatccatcttatgtaactattatacaatatcaagaccaggaaactgagactggcacaaagtgtgtatattatatagttctgttgttttatcgcatgtgtagattgccatcagcgtgacacagaactaagccatcaccatgcagttaccacttagtgtcatatctactcaccttacctccagttatctccaaaccctggtaaccacaaatctgttctccatttctataattttgtcattcaagaatgttatataaatggaatcgtacagtatatgaccttttgagattatgttttttcattcagcataaaatcctggagatccatctaagttgttgtatgtttcaattatttgttcctttttattgctgggtagtattccaaccaatccatcttcttttatattattgtgcattgaagggttgtggtctcctgaacagaagtctgtctccaaacacaaatcaagcagcaagatcatctgctgcaggtaagtgcagctctgacgataagatttatgttccttcatcttccacacagactctcaaaatccaattatttcatgcagcagagaaggtcttgtgttaggtagttggtttaggcccctgtatttccttttttcttctttcttcgtctcctcgatgggaaagacttgtgcctttgatcatgaagcaaaagagaactacaagttgccttcatgcagttacttagcaacaagcctcaacatccagctatactgagtggaggcttgttgaaaatgtgaggctgtcattgtccaggcagcatgtgtggggaagaaagctttccctcccacactttgatgctagacctgaattagaatccagaatctctcattgacaggccatgtgacctcaggaaagttactaaatctttctgagctggagctttacgttcctcatctgacagatagggataaaaatactgacttgacgagattgttgtgaaatgcacacaaactcatgagtgtaaagcgtgcaggacagtacctggtgtacagtagacactctaaatggtagctattcttgctgttcagcttctaggagtatatcccttccgttcagcatctgttgagcaccttctacaaagcaagcactgttctaggggttggaagacaccaagtctgttcttaaggtgctctttaagtgggaggggattgagatggagagtgggaagtggtggctggcccagagatgtaggcacaagctaagggctgtcatagaggtatgtacagagggctgggggagctcagaaaaaggcaccaaatggtgccttcacttctcactgtttattacagaactaaatagcattttaagtttgatcctctgactttatgtcaggaccggcaataatgaaaccatatcccagctgttgctgcctcatcagacttttatttcaaaccaaggcatcatcctcactagttttaccttctgtggggtgcttcccctatccccatgccttttgttggttgtgtacacagctggacaaatgatggtcagtacctggcgctggggatgttcaatgggatcatcagcatacggaacaaaaatggcgaggagaaagtaaagatcgagcggccggggggctccctctcgccaatatggtccatctgctggaacccttcaaggtactcttaaagttgtcctccttctagaacaaacaccatcatgaagaagggctttttgtcttcctgaggtctccctacattcaaaggcttctcacctcacttgaatggtctgttttagaacctgtcccatttgtatggattttttttttaatagtcccgctacctgagaatgtatggaatttattaagagcctcctcaaaagttgagtttaggaatgaatcctggacattttagcaaagcagatgagctatttaggacaggccaaagtgtgtgtgtggcgtgtgtgtctgcgcacatgtgcatgcacacatgtgtacgtgtacatgtatatgagtgtgtgtgtgtgtgtgtgtgtgtgtgtgtgtgtgtgtgtgtgtgtggtgtgtgagtgatgcagcaggaccatttccttatgaatcaatagtggagctctttgctgtggctttatttttgcctttccttttttagttcttccctccaagtttgggcagaatatgtgcccacctgttaataaatagctttttcatgagcctttttttgcccttgtcagaaagtcaaaattaagtctacagacgtccctaaagcctagagatacacaaacaattggcacctaccttcttaaattttatacacactttgctttctatgtccatgtgactttgagagtaaactaattatatgctctttttttttttttttttttttttgagatggagtctcgctcggttgcccagcctggagtgcagtggcacaatctcggctcactgcaacctccacctctcgggttcacgcagttctcctgtctcagcctcctgagtagctgggattacaggtgcctgccaccacgcctggctaattttttttttttttttgagacggagtctcgctctgtcgcccaggccggactgcggactgcagtggcgcaatctcggctcactgcaagctccgcttcccgggttcacgccattctcctgcctcagcctcccgagtagctgggactacaggcgcccgccaccgcgcccggctaattttttgtatttttagtagagacggggtttcaccttgttagccaggatggtctcgatctcctgacctcatgatccacccgcctcggcctcccaaagtgctgggattacaggcgtgagccaccgcgcacgcctggctaattttttgttgccaccacacctggctaattttttgtatttttagtagagacagggtttcaccatgttggccaggctggtcttgaacttctgacctcaggttatccacccacctcagcctcccaaagtgctgagattacaggtgtgagccactgtgcctgaccctatatgctctttatatatcctataatattattaaaccatcagtatcctttacagagtcctctgagggtaaacgaaaggtcctacttgtttaccagctcaatgtcattttacagatggttgcctacttgatttagaaggttgtttggaaggttattatgcttcttcctgaataattttttttggcccatgctgtaccatgcatgtctaatgctgtcaaaggccattagcctgccccagagttcctgctgtttgatttgtggctgcagaggacttggtggctctaggctaccatttttaattcatgagaagcaggaggccctgtatacctggtggctgtcctcctccaggtagggttcagaggctccttttattttttatttttattcttttttttttttttttttttttttgagacggggtctcactctgtcacccaggctgcagtgcagtagtgcgatcttggctcactgcaacctccgcctcccaggttcaagcaatcctctcacctcagcctcccaagtagcttggatcacaggcacatgccactacacctgtctaattttttgtatttttggtagagacagggtttcaccatgttggccaggctggtcttgaactcctgatctcgagcgattcacttgcctcggcctcctgaagtgctgggattacaggcgtgagtcactgcacctggcccccaggggctccttgccaggattttaaattatagttttagtgtagttctaggcaatgtaattttgaacaactacttactgtctacagccgatgggagagtttctggatgaacagagagaatgaggatgccgaggatgtcattgtcaacagatatattcaggaaatcccttccactctgaagtcagcagtgtacagtagtcagggtagtgaggcagaggaggaagaaccagaggaagaggacgacagtcccagggacgacaacttgtgagtgtgtcccagtgagtgggaacccttctggtaagggcccaggccccacacagacttgccaggacagatgttaaactctttggccaagggagtgcagggactagggggaactgtgggtgaaagcgccttcaaaaaaaggagacatacccttaaaacttgtgtgtgggtataaagtgatcctgtgagaaactataggaaatactgaaaagactaaaggagaaagttcaacttttctgataaaaccccatcccctgaggaaatcactgttagcaatctagtgtatttctcctcagtcttttcgtgtgttcatataattaactaagtcatattctgctttttttttcacttaacattatagtgtgaaccctttccagtaacattacaaatccttcgaagaacatgatttttaatgtctgaaaagtgtgcccttttgtggatgccccatcactcgacacttcctctattactggacacgtttcttagcctgttcccacactatcccttaccttaccttgcattttctaggatgtatatcagagaggaagcccttaccttagccacagtcttcactcccaaatcctggctgtctagtcattcttctcttcagttgagattgcctgtagggaaaacatgggcaggccagagtggggaaagctggggtagccaggatatctcagtttggcagtagagatctagcttgagactttccaaactgttttacatagtacctgagtttccttggaagaatcccaccctgaggtcatgggggctgggaagtggggaccagtaaaggaggaaggtatggctttgggtccccatctcagtgcctttgattgtttcaacatgagtttttgtttcataaagaatcctactgccccaggaggtaaaagggggttgaaaatcactgatccatctcacagggactgagcccagcccagagccatatgtggcctccccaagagggctcactggtgggctgggctcctggattgtgtttggactttggacatcagtgccagtcacacaaaggtcatctgcaggctccctcattaacatccctctcggtctttgtctcttttcccttagttttgggttagtgcctatgacatttgccactcttggctgggttttacaaacaaggctttaccttgcctgcctacatatccagtggtgctaccaggttaccacaagacactgggatcagaaaagctggaattaataaacaaagaggcaacattaggtggattaagacccagcctcaagggctaggaatgcttttcttttttttttttgtgacagagtctggctctgtcacctgggctggagtgcagtggcacgatctcggctcactgcaacttccgcctcccgggttctaagcgattcttgtgcctcagcctctggaatagctgggattacagacacgcgacaccacgccgaactaattttgcattttcagtaaagatagggtttccccatgttggccaggctggtctagaactcctgacctcaggtgatccacctgcctcaacctcccaaagtgctggaattacaagcgtgagccatcacgggctgccgcttttctcttgaactagattcccaggtagcttgctctccagcctcaggcaagggagtttctcctgtgtgctggtcctacagtcccagccccacagcactgatccccataggttctcagtttcaaagacagttgtttgttttcagagcccattgctcttttttgaaaattagattcagtcagaaaccatttcacctgtgcaaggacccccgcctgcaggagaacctatttttaggtgttaattttctttcttcaggaagagcaagcaagtttcccttctattaaaaaatgtctttgtgctgcaagagatgtttctctgccatctccccacattttctagtatgtaagagaaaagcagtctcaatattgcagccttgcctatcttagtgttgctccccagtaagctctgaaatgagaggtttatcttcttcagctgcagcagtgtccccagcaccataaggtcatagcaggggactcagtgaaacagcagatcccaggaaggctgaacctcaactctgcttcatcccgtaagactgattgatgggttgggccaaattataacttttggcttcagtaaagctgtacaacatttggcaacctgaggccaggacttccttgttcctgttgtttaagcccttagagctatactcatcagcaggctgtggcccttcataacctcttttatcttctgttgattagagaggaacgtaatgacatcctggctgtggctgactggggacagaaagtttccttctaccagctgagtggaaaacaggtatgtagccctgtacaaatccaattgcagtcatgcctgttatattttcattttctgagattctgttactattaattatacattatcattgttagttcctgcttattgagcatttgctgtggtaccagatactgtgctcactgctttgcatactttatcctattttattcttataaaacccaatgaagtgggtactactttccttatcaactttttagaaatgagtaaaccagaactcagagcagtgaaattatatgcccaagatctcacacagctagtaaatggtggagcctaggagttaaacccaggttggtttgactttaaaatctagctcttaattttgaccttactttcctctattcgctttctttcattcaaccagtatttatgagtacccactcaggaaagccctttcataaaggagctgctgacatagagctgggaaagtgatagcctctacctgcaagagctcacaggctggcggagacacacttgatagcaaagagcccctgtgtggtgtggtatgtgacacaatagaaagctgtacagatagacagctttttgggacacaaaagagggtaacatcactacttggtagagatgggaggtcttgttagaggttatctttgagcaggccatctttgagttaggctaaggacattgggaatggtgtttcaggcagaaaaaaaaatagcatgtatcaaggcaggaaggaatgaaaatatatgacagttcagagaatggtgagttgtacagggtgactgcatctcagagtttgtgacctgaaaacagagctgaagaggaacatgggggtatgattttttatttatttatttatttatttatttatttttaatttttttcgagatggagtctcactctgtggcccaggctggagtgcagtggctcagtcttggctcactgcaagctccgcctcctgggttcacgccattctcctacctcagcctcctgagtagctgggactacaggcgcccaccaccacgcctggctaatattttttgtatttttagtagagacggggtttcactgtgttagccaggatggtctcaatctcctgacctcgtgatccgcccgcctcagcctcccaaagtgctgggattacaggcatgagccaccacgcccggcctatgattttttgtttgtttgttttgagacagagtctcactctgtcgcctaggctggagtgtaatggctcaatctcggttcactgcgacctctgcctcacgggttcaagagattctcctgcctcagcctcctgggtagctgggattacaggcatgtgccaccatgtccggctaattttgtatttttagtagagacggggtttctccatgttggtcaggctggtctcaagctcctgacctcaggtgatccacctgcctcagtctcccaaagtgctgggattacaggcatgagctgccaccacgcctggctggagatgtgattataaaggacctgagtagtgtgaataagaagtttgaacatcatatactgtaagtattcaggagccataggtggcaggaagtggcatcacagattcttgcttcagaagaataacttgtttccatggagggtggattaaaatatagagagcatggtagtaggatgacttattagtaggcaggaaatgccaaggattagagtaaaggtgctgggtacagatttcacaccacagccaagcaagtgagaaatgcaacctgtgcagtgaagcctttaattgcgtagcatccttattcctcaaaacatgtcatgtaagagggaagagttttagatgtgtgtagcccagcttttgggccatttcttctacccctgccttaccattggtcatttcttttgtattcgagtaaagaaaagataaagggagcagataatgaagtattttctcagtttcccatggctgatttcctaaaactctcattttaattaactatcatctagtttccctggccctctctattcatctgcttaatgtgtgtacatcatcattcaacagatacttattggcacacctactgtgtacgaggcactggatgtgggtactgaagactcttgggaacaaataaccacactgcagtgggagggaatggggtcttgttgctatggccacagaagaaaagagctcaacatggccgagggccacaggaaatatcttgcatgtatgcagccccagagctcatgttgtggcccaaagtttctgcacgatgagcaaccttaacctgctgagatggtaaccccaacttgtttgggacagtaaaattgttttcttgctgggtgtcttcccttcccaatctaggaagatttagaattcaatataggatgatgaagtaaatcaaacccatacttttgtgttagtctgaggtataatttgtgtatttttgtcatttgaagtgttagtaatacttaaggggatctggcttaataataataatagctaacatttattgaattccaggcattatataaactctttacaaggattaactcttttaatccttataacaaccctatgaggtaaatactgttatcatcaccattttacatgtacgaaaattgaagcacagagaggctcaataatttgcccaaaggcacacatttagtctgtggtccaccctgctgaaacccaggcatactggtgccagaatccatattagaatgtctatcagattagtcttgcaatgaccattcaaaagttgtattgagtaatttcatatgtctgattttatttactttttgagaaaaggcctcaccctgttacccaggctggagtgcagtggtatgatcatggttcactgcagccttgatccccctgggctcaaggaatcttcccactttggccttccaagtagctgggactacaggcacatgccaccacatcctgctaattaaaaaaaaaaattttttttttttggtagagatagggtctcctatgttgtccaggctggtctcaaactcctgggctcaaatgattcttctgccttggcttcccaaactgctgggaatacaggtgtgagccaccatatctggcctacttctgattttaagtggaaagataagaattatatttaaagtgtatattatttaaggttcctaagcaatattggaatgcttaagcaatttgttacatttttcttcttggtgttcactgagctttttgaatctacacattgatatcgttctgtctttcaccaaatgtgaaaacattttggccatgatttcttgaaatatttcttcttctccattctttcctttcctctggaactctaattacacttacattagaccttttgttactgttctccaagtcatcgaggccctgttattatttttttaaatcccttcttttccctctgatcttcagattagaggatttctgttgttcagtattaaatttcattgactcttctgcaacttccaatatttttcttaagctcattcagtgtgtatttgtttcagttattattgcatttttccttttctagaatttccatttggttcttttttcctttttattcattacaagcgtatttttctttatagccttaatcatagttataataactgttttaaaattctcatctgcagctgggcatggtggctcatgcctgtaatcttagtacttctggaggccaaggagggacgattgcttgaggccaggagttcaagactagcctgggctacatagagagactccatccctaaaaacgaacaaacaaattggccagggaggtggcaggcacccattgtcctaacaactctgtaggctgaggtgggagtattctcaagctgaggagttcaaggctgcagtgaactcttaccactgcactccagtgtgggtgacagagcaagacctgtgcccaaaaagcaaacaaaaattcttatctgctatttctaacatttgggtcgtcatggttcagtctccattgatttttttcccttgaatatggttcacattttcctgctttggggaattttgaattgtactcaatattgtgagtaatatgtcataaagactcatatccatcatgttcctctgaagattattgtgtatgtttgtgtgtatatatgtttaagcaggcagtttactttgctgggctcaaaatcaaaactccatgttttcagtggtgtcagcagctgacatctctgtgcagttctttagctgtagctaggctgcttggcatcttgtcacagtttatagttcaagggtttccagatattcagtggagtttatgtgcagaatttaagctcttactttgcttctcttttctgggatttcccacttcactttccgggtgctgtggtcctcccaaattctatactcacccagcatgatggtgaagagggctgccctcaggcaaaaacccttaaaaaaatgagaagttcacctagtgtttgttcccttcttctaaatgtgcatgtgtcttcagtttctgcctgcttttggtcgccctgaaatggttgttgtttatagttggtccagagtttattgttgttactttgtgggaagattggtccgatgggaactagtgagccatttccagaagctgctagccttccatgtcgtgattcataagaatttttagttttcttgttaggttttctagcatcagataagtgctagggaaagttttcgttgctaggcatttgaaattcctatacaggaaaggaaatttgaatgtattaaacttataattgcagtttaaattggtgtaagggaattaatttaactaagttttaaatgggactggatatttaagggattttataatctgttcaaaattggatgccttaaacagtcaaagtcaattggctgttcactttaactagatttataaataggaaaatatttgtaaattgaacttaagaacttaaggagaaaccagttccctaaagttatttcttttataaattgaatattagtttaataatgttaatcacaaatcgtctttttattcacaaaagacacccttggggcagcaaaaaactccagtggtaataaggaacttgggctttagtggggcagacctgattaaccctgtgtctacagacaacgagagaagtgcaatgggataggcgagcacaagtgctgtgggaggatgaggggatggggattggagatgttcctggaggagatgacacctggcagacaaagtgagggaaagagcattcctggctgggtctaggaatggtgtggagtgtagcacctgtgaggatgtggaggcctgaaaaagcattgcccgcttaggaaacttacaagttcattttggctgagagaatgaccttgggggctgagctcgggagtttgacctgcatcctagaagctgaggaagcaccatcaagaaagagaaaagacaacccacagaatgagagaagttttacaactcatatatctgataaaggacttgtatctggaatatataaagagctataaagacagggctgggcatggtggttcacacgtgtaatcccagtgctttgggaggcagagacagggagatcacttgagaacaggagttcaggaccaacctgggtaacagtgggaccccacctctaaaaaaatatatttttaattagctgagtgtggtggtatatgcctctagtcccagctactgggggtggtgaggggctgaggcagaggaattgagcccagaagttcaaggttgcattgagttatgatcatacgactgcattccagcctaagccacagagtgtgacatttctctgtggccaataagcacatgaaatgatgctccatatcattagccatcaggaaaatgcaaattgaaaccacaatgagataattcgcactcactaaaatggagaaattggaatcctcatacactgctaatgcaaatataaagtggtgcattcacttgaaaagtgtagcagttcctaaaaaaggttcaacgtagagtttaaaaataaaaaaatataggccaggagctatgactcactcctgtaatcccagcactttgggaggccaaggtgggtggatcatctgagctcaggagtttgagactagccgggacaacaaggagaaacaccgtctctgcaaaaaatacaaaaattagccaggcgtgttctcacacatctgtagtcccagctacttgggaggctgaggtaggaggatcacgtgaagctgggaagtggaggttgcagtaagccaagatggcgccactgcactccagcctgggcaacagagtcagaccctttttcaaaaaaaaaattttttgccaggcatggtggcactcacctatggtcccagctacttaggaggctgaggcaggaagatcgcttgagtccaggagttgaaggctgcagtgagccgtaattgcaccactgcactccagcctgggtgacagagtgagaccccatcttgaaataaacaagaattaaaaaatgaagagaagtagtatgggtgtagttgcagaataaaggacagtctttaaactgaataaactcagctttataaaatacttttttaaaaaggcggagaaaagaagctgagggaacccattgaactataggaagaactatatttgcagagggaggggggcctttgggaacaaaaccacccacagtctccatcttggcggaggagccctgacacactcctgcactcctggagcacttgggtgggactaggggaggtgccactgactccaggagctgaggtttgggctgtgtagaggatgagtagggagatgcagaggcagagaggcctgtgttcaccatgggatgacacaggagaaaaggctggccagctctccctgtcttcccaactccctctaaagttggcgagaaaaagcccttaattgtattgcaatggttatggattcggaaatggtttttcccttgctgtgtgttctttttcctcagattggaaaggatcgggcactgaactttgacccctgctgcatcagctactttactaaaggcgagtacattttgctggggggttcagacaagcaagtatctct

SEQ ID NO: 12521 - DNA, 584 bp, Homo sapiens
gttctgattcctgatgtcctgtcctggaataactgaaaatctgggctaaaaatgctaaaatgcattcagaatatggtgattttatcctgagagagttaatactacttctctaccttcaatggctgaggggaggctgacagttattctttaaattgtgtggaaaccaagacagtgaatggtgacctttactctgggttgtggtctcctgaacagaagtctgtctccaaacacaaatcaagcagcaagatcatctgctgcagctggacaaatgatggtcagtacctggcgctggggatgttcaatgggatcatcagcatacggaacaaaaatggcgaggagaaagtaaagatcgagcggccggggggctccctctcgccaatatggtccatctgctggaacccttcaagagaggaacgtaatgacatcctggctgtggctgactggggacagaaagtttccttctaccagctgagtggaaaacagattggaaaggatcgggcactgaactttgacccctgctgcatcagctactttactaaaggcgagtacattttgctggggggttcagacaagcaagtatctct

SEQ ID NO: 12522 - DNA, 26883 bp, Homo sapiens
tataaatgacatcgcatttaagcctgatggaactcaactgattttggctgccggaagcagattactggtaggattttgtcttagtttcctcttaaagtgcttccctaacctccctcttgtgagtactctgaaatttgaccctttttttttttttttgagattaaaaaggcaagggtggaaaaaccttccctattactttttaatagggatggaaatgggctatttaaaacgggcaagtaaactatcagataagaacctgtgaacaataccacctttggggtcattcatctttccctttttactttgagacacccatgaaagagttgaaaacaatcacaatgcctttgaaactggactggtgtcagtttacattttgtcccccagaaaaattcaagcaacaggactgacggtgctgtgtccatgaaaagtcagatagcctgaccccaacttttaggcattggcctatctaaacagttccatatggatgttgtcctatttttcatattttcaaataacataagctccctctggaacctatccaggtatataaaagtaattttcagagaaccccttatgtttgaccaaaaaacctttgtatgatctctctttctgtctaagtctacttcctcttctctgttgtctctagatacgcagactgattaatctccattctttgtatggttaactacataatcttaaaacatggttaaattgttctgcagacttctctccagtgtaaacaatccaaactctattagtttttctacataggttatcttttccaatactctaaccatttcagaaagtttccgcttgatttctcagatggtgtgtgtgtgtgtgttttttttttttttttttttttttggagacagagtctggctctgtcgcccaggctggagtgcagtgacgcgatctcggcttactgcaagctccacctcccgggttcacaccattctcctgcctcagcctcctgagtagctgggactacaggcgcctgccgctacgctcagctaattttttgtatttttagtagagacggggtttctccgtgttagccaggatggtctcgatctcctgacctcgtaatccacccacctcggcctcccaaagtgctgggattacagaggtgagccaccgcgcccggccagatggtgtgtttttaaactctccacatagtgatagatgtcacatggctatcaaatacctaaatccatattacagctgggttttattttatttcttagagacagggttgtgctctgttgcccaagctggtgtgcagtagtgcagtcatagatcactgcagcctcaaactcctgggcttaagggatcttcccacctcagcctcccgagtagctaggactgtggacacacaccacctcgtccacctaatttttatttttttttatttttatttatttttattttttgtagagatggggtttcacttagttgcccaagctggtcttgaactcctggtttcaagcaatcctcccacttcagcctcccagagtgttgggatgacaggagtgagctaccatgcctggcctacagttgggttttataacattccctcctacttgaaagcccagagttctgtgactttcaaattcttggtagcaaatatgaaacatctattatgttgatttagtgcagagctggcattaaaatttaatcatgttgtagctggctctttttatgggctagttttatttaggagggcctgccttgatcaatcatatatccaaattcaggtaaggatgagtataaagaatttccatggagtgagtaattgaacctttggttctcaaggattggtagtatattcctggtcacatagtacatagacctgggtcctctacttcttggttacccaactttaagtcacgttgtttttggttttgcagtgcagtttttattggctacagatttagaatattgacacgtattgttataaaaacaaaaatagcagtagcaaccctgcaggaattctgactaatagatatcacatagataatctgtatttgtctcttttgccaggtttatgacacctctgatggcaccttacttcagcccctcaagggacacaaagacactgtgtactgtgtggcatatgcgaaggatggtaaaaggctgctctgggtttccattctctataatagcctcatcattgttcatttttctctttagtcactttttaattatttctagtaagctggagtacaagttgcaagttcagaagacagtgaagttgctaagacttcagtttggtcattcaatctagcaagtatttattgaggtcatctatgttccaggcactgttcaaggtgcttgagttacttcagagaaaaaaacggtggtccctccccttatggggcttctgttttatggggtggtggtgagaagtgagggaggaagaaagtatgagggaagacatacagtaaacatagtaaaaaggtaaattaagtagtatgctggaaggtgataactgttatggaagaagaaaaagtagagcagaatgagggggattgagagtgctgggcagggcagggggttgggtacagtattgaattagactagtgagggtgggctcattgagatgaggacaggtgaggaaaaagactttgaagtcaggaggcaatgagattgtgccagtgggcatcggggggaagagagctctttgcagaggaagagccattgcagaggccctcaggtgtgggtgtggctgctaggagctggatcaaagagaatcgggaattgtagaggatgaggataaagtggtaacagacatggggtggtcagatcataaagattttgattctcagtcaaaatggaactactgaaaggtcctcagcagaggagggatctgatttgatttgtattttaaaaggatccctctagttgctgagttggaaacaacctgcaagaggtgagggttaggacatctgtgtgaggaagcatcatccagacagggggtgatggtggctcagacctctgtgggggcagaggaggtgatgagaaattatcagactctggatataatgggagggtggagccaactggattgtctgacagattggatatgggctatgaagaaaaaggagtcaagtttttgacctgaggactgaaaggttggagttgccccccccactgagatggaaaagactgcaggtagagaaaagttatggttgaagatcagaaattcagttttatacatgctgaatttgagaaaagttgatgatgtcggagaggggagagaactgctggaacagagttgttgagtaggcaagaggagatgggatctagggcatagacggggtatttgctttagataggggcacagtaggaactgcagaggccagcagatggggacaatgtggtagtaggaatctaatggaaattctcaattccattttttttttcttcagtgaaataggaagcaacagcaactgagagtggcaatggggaagggaggtttcagagagttgaagagaaagggaaaaagtgtaaagtcactgcctcagagaatgggacagcgagtggacccaggaggtgtagtgagatccccggtgacatgaagggccctcttgaagattgtgatcatgaattgaaagtgagattagttggtgtgattgtgtctttttctccagcgattttgagctgcatagttgtagaggcagaagaggtgaatttaaccagaggtggttttgcaagcacatttgaagatgaagtaggagggcaagggagcagaaagtgtatacagataaataattatgtacattaaccttgaattgttggctgaataatgaagggagagaggacagcaatggagaagtagtaggttctggtggtgttgaaggattgttacagttggggtaccaggtgggttgggaaggaagggaagtggtgcatgaaactgagatttaaatttattttaaaataaatccatgttgtcccacagcataggattagtgggaagaaatgggctttggaatgagacagttgtgagttccaaccccaacccaacaccagagttctgtgagtctgagctggttattgagtctgagtcacgatttcttcatgtatcaaatggataacattgagataacattctgtagccactgccaagaagtcacaaaattgtaatgttataattcttgaatgaaccttggagattattccagtcccaggtttttaacttcttttggctgatgggcctctttgataatcagatggaagctttagaccactttctagaaagatgcaaattcttcatgtgtatgcagaatttcatgcatataattttagtctgattagtccagtctcttcactttagtcctgcataaagacataaacaattggccaggcacggtggctcatgcctataatcctactgaaatcctaaagctctgggagcctgagttgggaagattgcttaaggcaggagtttgagaccagcctgggcaacatagtgagactccctaaaatctggcctgggtgacagagctagactctgtctcttaaaaaaaaaaaaaaaagacaagtcatgtgacttgccaaggccatgcagcagattggcccaaagacaaaactaatttcttgcttcatagtcaggtgtgctgtaccatggtagtcatatttgtgtgtgtgtgtgtgtgtgtgtgtgtgtgtgtgtgtgtgtgtgcatgtttgagttcaagttcagaataatgttttagggagacctgtgaggagggagcctggagagctgaactgtttctgtctcatcctagtggctgttgaggaatgtgggtcagtccagggcccagtataaggcccagtaggtacagaagagctattgggcctctggtgcctctggtgtttataagcatagcagggctctttgacctgcaacaccattagggcacttgaggatgtcagagtgtgacccatcagtagtggcatttgcacagcactttgcagagtcctgtcacacacatctcacttgatgcttccaacaactctctgaagcaggcagcaaggggactcttatctccgctcaaagatgagaaaacagacttggagcaattacaggtgatggtggcagaggcaggcctaacccaggttctctgactgcagagtctttgttctttctagtgtatcatgctgcctcttcatgacacctgtataatgattaagaagtcttttagtcctcagaattggttttttcctcttagacctgaagattgagatacactgaattccagctttgctctttaagtctgcttgtttctgatttctcctttaagttcattaagttttttttgtttttttttttgagatgaagtctcgctctgtcgcccaggctggagtgcagtggcgcgatctcggctcatggcaacctctgactccctggttcaagtgattctcctgcctcagcctcctgagtagctgggactacaggcacgcgccaccatgcctagctaatttttgtattttcagtagagacagggtttcaccatgttggtcggcctgatctcaaactcctgacctcgtgatccgcccacctcggcctcccaaagtgctgggattacaggcgtgaaccaccatgcctggcccaagtttaataagtatttaatgagcaaccatgatataaaagtatgtaagacatagtttttttgttcaagaaaaacaatataatatgaagaaataatagaaatagctaatttttttttaattctattccaggcccagttctaagcaacataagggttaggggtgccactgcctgtgcaataaaaaatctgcatgtaatttctgaaccccccaaaactttactattaatagcctactgttgaccagaagccttacctgttacataaacagttaacacatttttaatattatatgtattatatattgtattcttaaaataagctagataaaatgttaattgagaaaaaagaaaaatatatttactcttcattaaatggaagtggatcatcataaaggtcttcatcttcattgtcttcaggttgaataggctgaggaggaggaggaggaggaggaggaggaagagggattggtgatgctgtgccagggagacagaggcaaaagaaaattcacatgtaaaagtggactcatgtagttaaaactcatgttgttcaggggtcaactgtatgtacacatgtacatacactcatttaatcttcacaccaaccatgaggtaaatactaacattgtatccatttttcaaataaggaaatgaaagctcttcagtagcttgtttgggtcatgcagctggtcagtgagatctctaggaattctgacccagagactctgagcccaaagcttatgcttttcatcaccatcacctgctacctaccaggatgagggaggagtgatggaaatagtaagagcagtttctttgtttatttagtatttgcagcaatatcatatggctcaccctaatatctactatttcagctactgtaaaaggtacttggccgggtgtggtggctcatgcttgtgatctcagcactttgggaagccaaggcgggtggatcatgaggtcaggagtttgagacaagcctggccaacacagtgaaacctcgtctgtactaaatatataaaaattagctgggcatggtggtgtgtgcctgtaatcccaactacttgggaggctgaggcaggagaattgcttgaacctgggaggcggagattgcagtgagctgagattatgccactgctctctggcctgggtgacagagctagactccgtctcaaaaagggccagtcgtggtgactcatgcctgtaatcacagcactttggaaggcggatcacctgaggtcaggagtttgagaccagcctgcccaacatggagaaaccccatctctactaaaaatacaaaaaattagccaggtgtggtggtgggcacctgtagtcccagctactcgggaggctgaggcaggataatcgcttgaacccgggagtcggaggttgcggtgagccgagatcgtgccactgcactatagcctgggcaacagagtgagacttagtctcaaaaaaaaggtactttacagatactatcttagttgactcccataaaaagactctgaggaagatactgttcctctgtgtttcagatgaaggcattgaggctcagagaacagtgacttgcccaaggtcaccttccacttgccctgtgaataaagtctaaaagtccttaagatgtacagaatgtggcacatacttacctcttaatcctcgtctctcaccagagtaggtgaagaccccgttatttgctgccatggtaccgtgatcctcttccaaatgcttataaatgtggaacagtgtaattaataacaaattacttgttatatgttgcctctctccagtctgttccttcataaagcccaagtagtatgaaaatgcgaatctgatctatcactctttgcttaaaacctttctttggcttcccattgctttaggataaagagcaaggcctctgctgtgtccctgaggtcccaagagatccttccacaacccacctcacccttccctccgttccatgatgactccgctcattccctcagacatgccaggcttttcctgcttcagggcctttgcacatctgttccatccatgtggatgggtctgtctcctctctacatctggctaagctctgctcatcctttaggtctccactgaaggatctcatccttagagaaatgttccctcatctaaattaggtcccccaggagatgttgaccaaagggtagtttcagtcagacaaaaggagtacatttttgagatctattgcacagcatggtgaccatagttaataatagcgtatatttcaaaactggcacaggaatagtttttttttttttttttttttgagatggagtctcgctctgttgcccaggctggagtgcagtggcgtgatctcggctcactgcaagccccacctcctgggttcactccattttcccacctcagcctccagagtagctgggactacaggcgcccgtcaccaggccggctaattttgtttttgtatttttagtagagacggggtttcaccgtgttggccaggatggtctcgatctcctgacctcgtgatccacccgcctcagccctccaaagtgctgggattacaggtgtgagccactgttcccggccaggaatagattttaaatgttctcactataaaaaaataagtatctgcagtgatggatatgttaattagcttaatcattcttcaatgtgtatgtatataaaataccacattgtacttcataagtagatataattattatttgtcaaaaataaaaatttaagtaaaaaagtaaatcaggttccccagttattctctttcataggatccgtgtcttaccatgttgtatttgtgttagattaatttgatgtgtacttcttacactagactgaactttatgaaagtagggatcatgtgtgttttaatcattacttaatccctagcatagaacatgacagctacatgtagtaggctcccaatacatctttgtttactcagtgtcagacaaagcaggtttggaacccaaatattctgactccaaggtcctgcctcccagtactgataagaactaggaaagaagctaacacttactaggtaccttaaagaactagttttctaaagaattctctctgggaaatgctggtttaagataaatgtaagactttccattttacaaacacttttaggcaagcgctttgcttctggatcagctgacaaaagcgttattatctggacatcaaaactggaaggcattctgaagtacacgtaagtaacttaggtgtacagtattatgagtttgatgcttattgaataattgcagcaaaagcctcttagaaaagatgtaggagaaaacttttttctcttaaattgaacttgaaattaagttgtgggtgtgtgtggttggtataggaaggttgagtagtgaataagttaatgaatatttcttggccacttactggcgtggccagcactgggctaggtgcttttatgtagctcatctcagttcatctgacattgtagactttatcccacccccaacctgtcatcttccagtgtccctgtctcagagaatggccttatatccacccagtgtcaaatgtcagaaacttggggtcagtgtgctccaggcctcctcttactattggggatctgccgtgttcttcccctgttcctctactagttggtccctatttaccctgcagatctcagactcaaatgtcagtttctttgtaaggactttcctgcctctctagactggaacaggtctctttcgaggcatttctcacaattgcagttttaggtttattctggtgactgatcagtattgctcatcggcctgtaagttccataagaacagatactgcatctattttttgttttgttttgttttgttttgagacagagtcttgctctgttgcccaggctggagtgcagtggcacgatctcggctcaccgcaagctccacctcccaggttcacgccattctcctgcctcagcctcccgagtagctgggactataggcgctcaccaccatgccaggctaattttttgtatttttagtagagatggggtttcaccatgttagctaggatggtctcgatctcctgactacatctattttttttttctcactcttgtgtccctgatacaatgcctagcccataattggtactcaccaattttccttccttccttctttccttccttccttccttccttccttccctccctccctcccttcttccttccttccttccctccctccctcccttcttccttccttccttccttccttccttccttccttccttccttccctccctccctcccttcttccttccttccttccttccttccttcctttcttttcagtcttgctctgtctcccaggctacagtgcagtggtaactagctcactgcaactacaaccttccaggctcaaataatcctcttacttcagcttcccaaatagctggaactgcaggtgcacacccccacaccaggccaatttttaaatttttttttttcttggtagagacagggtttcactttgttgcctgtactggtcttgaactcctgggctcaagcagtcctctcaaagtactgggattacagatacgagccactgcacctggcctcttttcaattgtggtaaaatatacatgacataaaatttatcatattaactactttttaagtttacagtttaatgttaaatacatttacattgttgtgcaaccaatctcccaaactcttttatcctgctaaactaaaattctatatccttcaaatacctactcacccttctctcctacccccagcccctgaaaaccagcattctactttctgtctctctgagtttgactgctttacatacctcatataagtagagtcatacaatgtttgttcttttgtggctgagttatttcatttcacgtaatgtcctcaaggctcatctgtgttgtagcatgtgtcagaatttactttctgtgttgtagcatgtgtcagaatttacttccttttttttctttattattatttttttttatgaagacgaggtctcactatgactcctgagctcaagcaatccttctcccttggccgcccaaactgctgggattacaggtgtgagccactgggctcagcttccttcctttttaagtctgaatattattccattgtatatatagaccacattttctttatccattcatctgttgatggacacttgtgttgcttctgcttcttagctattatgaataatgctgctatgaacatgggtgtacaaatcaacaaacaatttttgaaggaatgaatgaatgagtgaagttgtaagtaaagtattacccacaagtgaaggactaaaacgggttgagacgccttgcatggtacatgatttgctcagctttcattgttgtctaaggatttgtcatgtttccagatcttggtctgtgatgtcttcattgcacctccatcttccatttctgggcctccacaaaacagtaagagtaacagccacagataaagcacctaaaggccaaggtgggaggattgattgcttgaggccaagcgttcaaaaccaacctggccaaaagtgagtccccatctctacaaataagaaaacagtgggtgaggagaaggagaattaattctttaggagtaggagaattaatttctgtgctttttgttggtcacttgcagaagagcatgtggtctaaagtcagaggctgtgggctcattattaaaatcttcagttgtagccactgaaatctttgtggtttgctgcatagtaatctacagttgtttacttcccaggcacaatgatgctatacaatgtgtctcctacaatcctattactcatcaactggcatcttgttcctccagtgactttggtacgttctgattcctgatgtcctgtcctggaataactgaaaatctgggctaaaaatgctaaaatgcattcagaatatggtgattttatcctgagagagttaatactacttctctaccttcaatggctgaggggaggctgacagttattctttaaattgtgtggaaaccaagacagtgaatggtgacctttactctggtaagacatcagagactacaggaagggccccagcaaaggaaatggtaacaagattgggagggcacaggcataacttggtgttgctgcctttgggaagccttcccttggtgttgctgcctctgggaagccttccctgactcaccctggcagagacagtgcagttgtcctcacctttgtattgacccacatctatgtttatgtgaaattcttcactgttgcggttctacttcttgtgcaatttgtcgtcattactggtttaggtggctgtagctgtcctccctgaggggctgaacaccttgaggagttcatcctggccacggtcccgtgccagcattacagcactggtgtagtactggcacaaaagaggtgtcagtaaaatgtctgtggagggaggaagggagtgaaattgggcagaggcttgtaggttatttccattaatggttgattctgttttcagctctatcagtctgtgttcgttgctagtggatacaatgaagtcactagatgaggagtcagaggcctaatccctctcagtgttccagttcccttatctaaaaggagcatgctactcactgtgtctcactgatacggttctggttctgaggttcaaaagagagaatggaattgaaagccaattgtataaatacatggagaaaggcctgtcatttgtttaacatattttatagcattttcttcatgtgaagcactggtctgtgtgcttacactggaatattaaaaaggcaaaatagaatccctaccctcaaggagcttgtggtcttaggagaaggtgggattaaaaaaaatataatattaagtactagtatttattgaatgcttgcagtgtgctaggcactgttctaaggattagaaatgaatttctatttgagctttatgacagcccctgaggtgtcaggtattattctcattcccaccctactgatgaaaaagaggtagaggtcccttagctagtaagtggaggaaccagggcttggactttagaccaggtgattgcatacagagcctgctctgctaagcactgctgaaggaggcccaggaggaaggagtttcttccagcttggggctccaggcaggcttagtggaacacagataacatgtgcacacgtcaaaatgtttggaggaagcgttctggaccaggggaaaggcaaaaaataacttgtttgatgttgcacttggccatgtatttgtgcactggagttaccttcttgattgtacttcgcaacttggcaaatagaagaatttgcttatgttgtctagacatacacttgctatgaggcactgagccagggcatctgggacaggggggagcaagccttaggtgaccagtgtgccatgggagaggcacagctcagatagagtcatgtgttgtgattgagacctatgaaagaaaactagattttcagaaagcatcattgttattttaaatgctaggttatactctggttgcagtgtcaaagttataaacaatgaaactgtcatttctttgagagtcaaatccctgaaaagttggctagaactttaccaatctattttatttttcttctgaaagaatgatagattcatagtaagttacaaagatggtaccaagaagtctatgtacttttcatccagtttcccccagtggatccatcttatgtaactattatacaatatcaagaccaggaaactgagactggcacaaagtgtgtatattatatagttctgttgttttatcgcatgtgtagattgccatcagcgtgacacagaactaagccatcaccatgcagttaccacttagtgtcatatctactcaccttacctccagttatctccaaaccctggtaaccacaaatctgttctccatttctataattttgtcattcaagaatgttatataaatggaatcgtacagtatatgaccttttgagattatgttttttcattcagcataaaatcctggagatccatctaagttgttgtatgtttcaattatttgttcctttttattgctgggtagtattccaaccaatccatcttcttttatattattgtgcattgaagggttgtggtctcctgaacagaagtctgtctccaaacacaaatcaagcagcaagatcatctgctgcaggtaagtgcagctctgacgataagatttatgttccttcatcttccacacagactctcaaaatccaattatttcatgcagcagagaaggtcttgtgttaggtagttggtttaggcccctgtatttccttttttcttctttcttcgtctcctcgatgggaaagacttgtgcctttgatcatgaagcaaaagagaactacaagttgccttcatgcagttacttagcaacaagcctcaacatccagctatactgagtggaggcttgttgaaaatgtgaggctgtcattgtccaggcagcatgtgtggggaagaaagctttccctcccacactttgatgctagacctgaattagaatccagaatctctcattgacaggccatgtgacctcaggaaagttactaaatctttctgagctggagctttacgttcctcatctgacagatagggataaaaatactgacttgacgagattgttgtgaaatgcacacaaactcatgagtgtaaagcgtgcaggacagtacctggtgtacagtagacactctaaatggtagctattcttgctgttcagcttctaggagtatatcccttccgttcagcatctgttgagcaccttctacaaagcaagcactgttctaggggttggaagacaccaagtctgttcttaaggtgctctttaagtgggaggggattgagatggagagtgggaagtggtggctggcccagagatgtaggcacaagctaagggctgtcatagaggtatgtacagagggctgggggagctcagaaaaaggcaccaaatggtgccttcacttctcactgtttattacagaactaaatagcattttaagtttgatcctctgactttatgtcaggaccggcaataatgaaaccatatcccagctgttgctgcctcatcagacttttatttcaaaccaaggcatcatcctcactagttttaccttctgtggggtgcttcccctatccccatgccttttgttggttgtgtacacagctggacaaatgatggtcagtacctggcgctggggatgttcaatgggatcatcagcatacggaacaaaaatggcgaggagaaagtaaagatcgagcggccggggggctccctctcgccaatatggtccatctgctggaacccttcaaggtactcttaaagttgtcctccttctagaacaaacaccatcatgaagaagggctttttgtcttcctgaggtctccctacattcaaaggcttctcacctcacttgaatggtctgttttagaacctgtcccatttgtatggattttttttttaatagtcccgctacctgagaatgtatggaatttattaagagcctcctcaaaagttgagtttaggaatgaatcctggacattttagcaaagcagatgagctatttaggacaggccaaagtgtgtgtgtggcgtgtgtgtctgcgcacatgtgcatgcacacatgtgtacgtgtacatgtatatgagtgtgtgtgtgtgtgtgtgtgtgtgtgtgtgtgtgtgtgtgtgtgtggtgtgtgagtgatgcagcaggaccatttccttatgaatcaatagtggagctctttgctgtggctttatttttgcctttccttttttagttcttccctccaagtttgggcagaatatgtgcccacctgttaataaatagctttttcatgagcctttttttgcccttgtcagaaagtcaaaattaagtctacagacgtccctaaagcctagagatacacaaacaattggcacctaccttcttaaattttatacacactttgctttctatgtccatgtgactttgagagtaaactaattatatgctctttttttttttttttttttttttgagatggagtctcgctcggttgcccagcctggagtgcagtggcacaatctcggctcactgcaacctccacctctcgggttcacgcagttctcctgtctcagcctcctgagtagctgggattacaggtgcctgccaccacgcctggctaattttttttttttttttgagacggagtctcgctctgtcgcccaggccggactgcggactgcagtggcgcaatctcggctcactgcaagctccgcttcccgggttcacgccattctcctgcctcagcctcccgagtagctgggactacaggcgcccgccaccgcgcccggctaattttttgtatttttagtagagacggggtttcaccttgttagccaggatggtctcgatctcctgacctcatgatccacccgcctcggcctcccaaagtgctgggattacaggcgtgagccaccgcgcacgcctggctaattttttgttgccaccacacctggctaattttttgtatttttagtagagacagggtttcaccatgttggccaggctggtcttgaacttctgacctcaggttatccacccacctcagcctcccaaagtgctgagattacaggtgtgagccactgtgcctgaccctatatgctctttatatatcctataatattattaaaccatcagtatcctttacagagtcctctgagggtaaacgaaaggtcctacttgtttaccagctcaatgtcattttacagatggttgcctacttgatttagaaggttgtttggaaggttattatgcttcttcctgaataattttttttggcccatgctgtaccatgcatgtctaatgctgtcaaaggccattagcctgccccagagttcctgctgtttgatttgtggctgcagaggacttggtggctctaggctaccatttttaattcatgagaagcaggaggccctgtatacctggtggctgtcctcctccaggtagggttcagaggctccttttattttttatttttattcttttttttttttttttttttttttgagacggggtctcactctgtcacccaggctgcagtgcagtagtgcgatcttggctcactgcaacctccgcctcccaggttcaagcaatcctctcacctcagcctcccaagtagcttggatcacaggcacatgccactacacctgtctaattttttgtatttttggtagagacagggtttcaccatgttggccaggctggtcttgaactcctgatctcgagcgattcacttgcctcggcctcctgaagtgctgggattacaggcgtgagtcactgcacctggcccccaggggctccttgccaggattttaaattatagttttagtgtagttctaggcaatgtaattttgaacaactacttactgtctacagccgatgggagagtttctggatgaacagagagaatgaggatgccgaggatgtcattgtcaacagatatattcaggaaatcccttccactctgaagtcagcagtgtacagtagtcagggtagtgaggcagaggaggaagaaccagaggaagaggacgacagtcccagggacgacaacttgtgagtgtgtcccagtgagtgggaacccttctggtaagggcccaggccccacacagacttgccaggacagatgttaaactctttggccaagggagtgcagggactagggggaactgtgggtgaaagcgccttcaaaaaaaggagacatacccttaaaacttgtgtgtgggtataaagtgatcctgtgagaaactataggaaatactgaaaagactaaaggagaaagttcaacttttctgataaaaccccatcccctgaggaaatcactgttagcaatctagtgtatttctcctcagtcttttcgtgtgttcatataattaactaagtcatattctgctttttttttcacttaacattatagtgtgaaccctttccagtaacattacaaatccttcgaagaacatgatttttaatgtctgaaaagtgtgcccttttgtggatgccccatcactcgacacttcctctattactggacacgtttcttagcctgttcccacactatcccttaccttaccttgcattttctaggatgtatatcagagaggaagcccttaccttagccacagtcttcactcccaaatcctggctgtctagtcattcttctcttcagttgagattgcctgtagggaaaacatgggcaggccagagtggggaaagctggggtagccaggatatctcagtttggcagtagagatctagcttgagactttccaaactgttttacatagtacctgagtttccttggaagaatcccaccctgaggtcatgggggctgggaagtggggaccagtaaaggaggaaggtatggctttgggtccccatctcagtgcctttgattgtttcaacatgagtttttgtttcataaagaatcctactgccccaggaggtaaaagggggttgaaaatcactgatccatctcacagggactgagcccagcccagagccatatgtggcctccccaagagggctcactggtgggctgggctcctggattgtgtttggactttggacatcagtgccagtcacacaaaggtcatctgcaggctccctcattaacatccctctcggtctttgtctcttttcccttagttttgggttagtgcctatgacatttgccactcttggctgggttttacaaacaaggctttaccttgcctgcctacatatccagtggtgctaccaggttaccacaagacactgggatcagaaaagctggaattaataaacaaagaggcaacattaggtggattaagacccagcctcaagggctaggaatgcttttcttttttttttttgtgacagagtctggctctgtcacctgggctggagtgcagtggcacgatctcggctcactgcaacttccgcctcccgggttctaagcgattcttgtgcctcagcctctggaatagctgggattacagacacgcgacaccacgccgaactaattttgcattttcagtaaagatagggtttccccatgttggccaggctggtctagaactcctgacctcaggtgatccacctgcctcaacctcccaaagtgctggaattacaagcgtgagccatcacgggctgccgcttttctcttgaactagattcccaggtagcttgctctccagcctcaggcaagggagtttctcctgtgtgctggtcctacagtcccagccccacagcactgatccccataggttctcagtttcaaagacagttgtttgttttcagagcccattgctcttttttgaaaattagattcagtcagaaaccatttcacctgtgcaaggacccccgcctgcaggagaacctatttttaggtgttaattttctttcttcaggaagagcaagcaagtttcccttctattaaaaaatgtctttgtgctgcaagagatgtttctctgccatctccccacattttctagtatgtaagagaaaagcagtctcaatattgcagccttgcctatcttagtgttgctccccagtaagctctgaaatgagaggtttatcttcttcagctgcagcagtgtccccagcaccataaggtcatagcaggggactcagtgaaacagcagatcccaggaaggctgaacctcaactctgcttcatcccgtaagactgattgatgggttgggccaaattataacttttggcttcagtaaagctgtacaacatttggcaacctgaggccaggacttccttgttcctgttgtttaagcccttagagctatactcatcagcaggctgtggcccttcataacctcttttatcttctgttgattagagaggaacgtaatgacatcctggctgtggctgactggggacagaaagtttccttctaccagctgagtggaaaacaggtatgtagccctgtacaaatccaattgcagtcatgcctgttatattttcattttctgagattctgttactattaattatacattatcattgttagttcctgcttattgagcatttgctgtggtaccagatactgtgctcactgctttgcatactttatcctattttattcttataaaacccaatgaagtgggtactactttccttatcaactttttagaaatgagtaaaccagaactcagagcagtgaaattatatgcccaagatctcacacagctagtaaatggtggagcctaggagttaaacccaggttggtttgactttaaaatctagctcttaattttgaccttactttcctctattcgctttctttcattcaaccagtatttatgagtacccactcaggaaagccctttcataaaggagctgctgacatagagctgggaaagtgatagcctctacctgcaagagctcacaggctggcggagacacacttgatagcaaagagcccctgtgtggtgtggtatgtgacacaatagaaagctgtacagatagacagctttttgggacacaaaagagggtaacatcactacttggtagagatgggaggtcttgttagaggttatctttgagcaggccatctttgagttaggctaaggacattgggaatggtgtttcaggcagaaaaaaaaatagcatgtatcaaggcaggaaggaatgaaaatatatgacagttcagagaatggtgagttgtacagggtgactgcatctcagagtttgtgacctgaaaacagagctgaagaggaacatgggggtatgattttttatttatttatttatttatttatttatttttaatttttttcgagatggagtctcactctgtggcccaggctggagtgcagtggctcagtcttggctcactgcaagctccgcctcctgggttcacgccattctcctacctcagcctcctgagtagctgggactacaggcgcccaccaccacgcctggctaatattttttgtatttttagtagagacggggtttcactgtgttagccaggatggtctcaatctcctgacctcgtgatccgcccgcctcagcctcccaaagtgctgggattacaggcatgagccaccacgcccggcctatgattttttgtttgtttgttttgagacagagtctcactctgtcgcctaggctggagtgtaatggctcaatctcggttcactgcgacctctgcctcacgggttcaagagattctcctgcctcagcctcctgggtagctgggattacaggcatgtgccaccatgtccggctaattttgtatttttagtagagacggggtttctccatgttggtcaggctggtctcaagctcctgacctcaggtgatccacctgcctcagtctcccaaagtgctgggattacaggcatgagctgccaccacgcctggctggagatgtgattataaaggacctgagtagtgtgaataagaagtttgaacatcatatactgtaagtattcaggagccataggtggcaggaagtggcatcacagattcttgcttcagaagaataacttgtttccatggagggtggattaaaatatagagagcatggtagtaggatgacttattagtaggcaggaaatgccaaggattagagtaaaggtgctgggtacagatttcacaccacagccaagcaagtgagaaatgcaacctgtgcagtgaagcctttaattgcgtagcatccttattcctcaaaacatgtcatgtaagagggaagagttttagatgtgtgtagcccagcttttgggccatttcttctacccctgccttaccattggtcatttcttttgtattcgagtaaagaaaagataaagggagcagataatgaagtattttctcagtttcccatggctgatttcctaaaactctcattttaattaactatcatctagtttccctggccctctctattcatctgcttaatgtgtgtacatcatcattcaacagatacttattggcacacctactgtgtacgaggcactggatgtgggtactgaagactcttgggaacaaataaccacactgcagtgggagggaatggggtcttgttgctatggccacagaagaaaagagctcaacatggccgagggccacaggaaatatcttgcatgtatgcagccccagagctcatgttgtggcccaaagtttctgcacgatgagcaaccttaacctgctgagatggtaaccccaacttgtttgggacagtaaaattgttttcttgctgggtgtcttcccttcccaatctaggaagatttagaattcaatataggatgatgaagtaaatcaaacccatacttttgtgttagtctgaggtataatttgtgtatttttgtcatttgaagtgttagtaatacttaaggggatctggcttaataataataatagctaacatttattgaattccaggcattatataaactctttacaaggattaactcttttaatccttataacaaccctatgaggtaaatactgttatcatcaccattttacatgtacgaaaattgaagcacagagaggctcaataatttgcccaaaggcacacatttagtctgtggtccaccctgctgaaacccaggcatactggtgccagaatccatattagaatgtctatcagattagtcttgcaatgaccattcaaaagttgtattgagtaatttcatatgtctgattttatttactttttgagaaaaggcctcaccctgttacccaggctggagtgcagtggtatgatcatggttcactgcagccttgatccccctgggctcaaggaatcttcccactttggccttccaagtagctgggactacaggcacatgccaccacatcctgctaattaaaaaaaaaaattttttttttttggtagagatagggtctcctatgttgtccaggctggtctcaaactcctgggctcaaatgattcttctgccttggcttcccaaactgctgggaatacaggtgtgagccaccatatctggcctacttctgattttaagtggaaagataagaattatatttaaagtgtatattatttaaggttcctaagcaatattggaatgcttaagcaatttgttacatttttcttcttggtgttcactgagctttttgaatctacacattgatatcgttctgtctttcaccaaatgtgaaaacattttggccatgatttcttgaaatatttcttcttctccattctttcctttcctctggaactctaattacacttacattagaccttttgttactgttctccaagtcatcgaggccctgttattatttttttaaatcccttcttttccctctgatcttcagattagaggatttctgttgttcagtattaaatttcattgactcttctgcaacttccaatatttttcttaagctcattcagtgtgtatttgtttcagttattattgcatttttccttttctagaatttccatttggttcttttttcctttttattcattacaagcgtatttttctttatagccttaatcatagttataataactgttttaaaattctcatctgcagctgggcatggtggctcatgcctgtaatcttagtacttctggaggccaaggagggacgattgcttgaggccaggagttcaagactagcctgggctacatagagagactccatccctaaaaacgaacaaacaaattggccagggaggtggcaggcacccattgtcctaacaactctgtaggctgaggtgggagtattctcaagctgaggagttcaaggctgcagtgaactcttaccactgcactccagtgtgggtgacagagcaagacctgtgcccaaaaagcaaacaaaaattcttatctgctatttctaacatttgggtcgtcatggttcagtctccattgatttttttcccttgaatatggttcacattttcctgctttggggaattttgaattgtactcaatattgtgagtaatatgtcataaagactcatatccatcatgttcctctgaagattattgtgtatgtttgtgtgtatatatgtttaagcaggcagtttactttgctgggctcaaaatcaaaactccatgttttcagtggtgtcagcagctgacatctctgtgcagttctttagctgtagctaggctgcttggcatcttgtcacagtttatagttcaagggtttccagatattcagtggagtttatgtgcagaatttaagctcttactttgcttctcttttctgggatttcccacttcactttccgggtgctgtggtcctcccaaattctatactcacccagcatgatggtgaagagggctgccctcaggcaaaaacccttaaaaaaatgagaagttcacctagtgtttgttcccttcttctaaatgtgcatgtgtcttcagtttctgcctgcttttggtcgccctgaaatggttgttgtttatagttggtccagagtttattgttgttactttgtgggaagattggtccgatgggaactagtgagccatttccagaagctgctagccttccatgtcgtgattcataagaatttttagttttcttgttaggttttctagcatcagataagtgctagggaaagttttcgttgctaggcatttgaaattcctatacaggaaaggaaatttgaatgtattaaacttataattgcagtttaaattggtgtaagggaattaatttaactaagttttaaatgggactggatatttaagggattttataatctgttcaaaattggatgccttaaacagtcaaagtcaattggctgttcactttaactagatttataaataggaaaatatttgtaaattgaacttaagaacttaaggagaaaccagttccctaaagttatttcttttataaattgaatattagtttaataatgttaatcacaaatcgtctttttattcacaaaagacacccttggggcagcaaaaaactccagtggtaataaggaacttgggctttagtggggcagacctgattaaccctgtgtctacagacaacgagagaagtgcaatgggataggcgagcacaagtgctgtgggaggatgaggggatggggattggagatgttcctggaggagatgacacctggcagacaaagtgagggaaagagcattcctggctgggtctaggaatggtgtggagtgtagcacctgtgaggatgtggaggcctgaaaaagcattgcccgcttaggaaacttacaagttcattttggctgagagaatgaccttgggggctgagctcgggagtttgacctgcatcctagaagctgaggaagcaccatcaagaaagagaaaagacaacccacagaatgagagaagttttacaactcatatatctgataaaggacttgtatctggaatatataaagagctataaagacagggctgggcatggtggttcacacgtgtaatcccagtgctttgggaggcagagacagggagatcacttgagaacaggagttcaggaccaacctgggtaacagtgggaccccacctctaaaaaaatatatttttaattagctgagtgtggtggtatatgcctctagtcccagctactgggggtggtgaggggctgaggcagaggaattgagcccagaagttcaaggttgcattgagttatgatcatacgactgcattccagcctaagccacagagtgtgacatttctctgtggccaataagcacatgaaatgatgctccatatcattagccatcaggaaaatgcaaattgaaaccacaatgagataattcgcactcactaaaatggagaaattggaatcctcatacactgctaatgcaaatataaagtggtgcattcacttgaaaagtgtagcagttcctaaaaaaggttcaacgtagagtttaaaaataaaaaaatataggccaggagctatgactcactcctgtaatcccagcactttgggaggccaaggtgggtggatcatctgagctcaggagtttgagactagccgggacaacaaggagaaacaccgtctctgcaaaaaatacaaaaattagccaggcgtgttctcacacatctgtagtcccagctacttgggaggctgaggtaggaggatcacgtgaagctgggaagtggaggttgcagtaagccaagatggcgccactgcactccagcctgggcaacagagtcagaccctttttcaaaaaaaaaattttttgccaggcatggtggcactcacctatggtcccagctacttaggaggctgaggcaggaagatcgcttgagtccaggagttgaaggctgcagtgagccgtaattgcaccactgcactccagcctgggtgacagagtgagaccccatcttgaaataaacaagaattaaaaaatgaagagaagtagtatgggtgtagttgcagaataaaggacagtctttaaactgaataaactcagctttataaaatacttttttaaaaaggcggagaaaagaagctgagggaacccattgaactataggaagaactatatttgcagagggaggggggcctttgggaacaaaaccacccacagtctccatcttggcggaggagccctgacacactcctgcactcctggagcacttgggtgggactaggggaggtgccactgactccaggagctgaggtttgggctgtgtagaggatgagtagggagatgcagaggcagagaggcctgtgttcaccatgggatgacacaggagaaaaggctggccagctctccctgtcttcccaactccctctaaagttggcgagaaaaagcccttaattgtattgcaatggttatggattcggaaatggtttttcccttgctgtgtgttctttttcctcagattggaaaggatcgggcactgaactttgacccctgctgcatcagctactttactaaaggcgagtacattttgctggggggttcagacaagcaagtatctcttttcaccaaggatggagtgcggcttgggactgttggggagcagaactcctgggtgtggacgtgtcaagcgaaaccggattccaactatgtggtaagaagagaaagtttgttctgtggggccatggcttgaagaggcactgagcagccgccgtgtctcgagtcacatcactggggtttgtgtctgacaaatgggggaatgcagactttctccagagagctgggaattgacagttctctcaccccgcaggtggtcggctgccaggacggcaccatttccttctaccagcttattttcagcacagtccatgggctttacaaggaccgctatgcctacaggg

SEQ ID NO: 12523 - DNA, 734 bp, Homo sapiens
tataaatgacatcgcatttaagcctgatggaactcaactgattttggctgccggaagcagattactggtttatgacacctctgatggcaccttacttcagcccctcaagggacacaaagacactgtgtactgtgtggcatatgcgaaggatggcaagcgctttgcttctggatcagctgacaaaagcgttattatctggacatcaaaactggaaggcattctgaagtacacgcacaatgatgctatacaatgtgtctcctacaatcctattactcatcaactggcatcttgttcctccagtgactttgggttgtggtctcctgaacagaagtctgtctccaaacacaaatcaagcagcaagatcatctgctgcagagaggaacgtaatgacatcctggctgtggctgactggggacagaaagtttccttctaccagctgagtggaaaacagattggaaaggatcgggcactgaactttgacccctgctgcatcagctactttactaaaggcgagtacattttgctggggggttcagacaagcaagtatctcttttcaccaaggatggagtgcggcttgggactgttggggagcagaactcctgggtgtggacgtgtcaagcgaaaccggattccaactatgtggtggtcggctgccaggacggcaccatttccttctaccagcttattttcagcacagtccatgggctttacaaggaccgctatgcctacaggg

SEQ ID NO: 12524 - DNA, 4057 bp, Homo sapiens
agccaaagtggcttgtggagtggcgaccgttagtgaggcggttgctgagacagacgctgaggcgggtaggaggagcccgagccgtaagggaagccgtgatgagggccgtgttgacgtggagagataaagccgagcactgtataaatgacatcgcatttaagcctgatggaactcaactgattttggctgccggaagcagattactggtttatgacacctctgatggcaccttacttcagcccctcaagggacacaaagacactgtgtactgtgtggcatatgcgaaggatggaaatgaaagctcttcagtagcttgtttgggtcatgcagctggtcagtgagatctctaggaattctgacccagagactctgagcccaaagcttatgcttttcatcaccatcacctgctacctaccaggatgagggaggagtgatggaaatagcaagcgctttgcttctggatcagctgacaaaagcgttattatctggacatcaaaactggaaggcattctgaagtacacgcacaatgatgctatacaatgtgtctcctacaatcctattactcatcaactggcatcttgttcctccagtgactttgggttgtggtctcctgaacagaagtctgtctccaaacacaaatcaagcagcaagatcatctgctgcagctggacaaatgatggtcagtacctggcgctggggatgttcaatgggatcatcagcatacggaacaaaaatggcgaggagaaagtaaagatcgagcggccggggggctccctctcgccaatatggtccatctgctggaacccttcaagccgatgggagagtttctggatgaacagagagaatgaggatgccgaggatgtcattgtcaacagatatattcaggaaatcccttccactctgaagtcagcagtgtacagtagtcagggtagtgaggcagaggaggaagaaccagaggaagaggacgacagtcccagggacgacaacttagaggaacgtaatgacatcctggctgtggctgactggggacagaaagtttccttctaccagctgagtggaaaacagattggaaaggatcgggcactgaactttgacccctgctgcatcagctactttactaaaggcgagtacattttgctggggggttcagacaagcaagtatctcttttcaccaaggatggagtgcggcttgggactgttggggagcagaactcctgggtgtggacgtgtcaagcgaaaccggattccaactatgtggtggtcggctgccaggacggcaccatttccttctaccagcttattttcagcacagtccatgggctttacaaggaccgctatgcctacagggatagcatgactgacgtcattgtgcagcacctgatcactgagcagaaagttcggattaaatgcaaagagcttgtcaagaagattgccatctacagaaatcgattggctatccaactgccagagaaaatcctcatctatgagttgtattcagaggacttatcagacatgcattaccgggtaaaggagaagattatcaagaagtttgagtgcaacctcctggtggtgtgtgccaatcacatcatcctgtgccaggagaaacggctgcagtgcctgtccttcagcggagtgaaggagcgggagtggcagatggagtctctcattcgttacatcaaggtgatcggtggccctcctggaagagaaggcctcttagtggggctgaagaatggacagatcctgaagatcttcgtggacaatctctttgctatcgtcctgctgaagcaggccacagctgtgcgctgcttggacatgagtgcctcccgtaagaagctggccgtggtagatgaaaatgacacttgcctggtgtatgacatcgacaccaaggagctgctttttcaggaaccaaacgccaacagtgtagcttggaacacccagtgtgaggacatgctctgcttctcgggaggaggctacctcaacatcaaagccagcaccttccctgtgcaccggcagaagctgcagggctttgtggtcggctacaatggctccaagatcttctgcctccatgtcttctccatttctgccgtggaggtgccgcagtccgctcccatgtaccagtacctggataggaaactgttcaaggaagcctaccagattgcttgcttgggtgtcacagacactgattggcgtgaactggccatggaagcgctagaaggtttagattttgaaacagcaaagaaggccttcatcagagtacaagacctccgatatttagagctcatcagcagcattgaggagaggaagaagcggggagagaccaacaatgacctgtttctggcagatgtgttttcctaccaggggaagttccatgaggccgccaaactgtacaagaggagtgggcacgagaacctcgcgcttgaaatgtacaccgacctctgcatgtttgagtatgccaaggatttccttggatctggagaccccaaagaaacaaagatgctaatcaccaaacaggctgactgggccagaaatatcaaggagcccaaagccgccgtggagatgtacatctcagcaggagagcacgtcaaggccatcgagatctgtggtgaccatggctgggttgacatgttgatcgacatcgcccgcaaactggacaaggctgagcgcgagcccctgctgctgtgcgctacctacctcaagaagctggacagccctggctatgctgctgagacctacctgaagatgggtgacctcaagtccctggtgcagctgcacgtggagacccagcgctgggatgaggcctttgctttgggtgagaagcatcctgagtttaaggatgacatctacatgccgtatgctcagtggctagcagagaacgatcgctttgaggaagcccagaaagcgttccacaaggctgggcgacagagagaagcggtccaggtgctggagcagctcacaaacaatgccgtggcggagagcaggtttaatgatgctgcctattattactggatgctgtccatgcagtgcctcgatatagctcaagatcctgcccagaaggacacaatgcttggcaagttctaccacttccagcgtttggcagagctgtaccatggttaccatgccatccatcgccacacggaagatccgttcagtgtccatcgtcctgaaactcttttcaacatctccaggttcctgctgcacagcctgcccaaggacaccccctcgggcatctctaaagtgaaaatactcttcaccttggccaagcagagcaaggccctcggtgcctacaggctggcccggcacgcctatgacaagctgcgtggcctgtacatccctgccagattccaaaagtccattgagctgggtaccctgaccatccgcgccaagcccttccacgacagtgaggagttggtgcccttgtgctaccgctgctccaccaacaacccgctgctcaacaacctgggcaacgtctgcatcaactgccgccagcccttcatcttctccgcctcttcctacgacgtgctacacctggttgagttctacctggaggaagggatcactgatgaagaagccatctccctcatcgacctggaggtgctgagacccaagcgggatgacagacagctagagattgcaaacaacagctcccagattctgcggctagtggagaccaaggactccatcggagatgaggacccgttcacagctaagctgagctttgagcaaggtggctcagagttcgtgccagtggtggtgagccggctggtgctgcgctccatgagccgccgggatgtcctcatcaagcgatggcccccacccctgaggtggcaatacttccgctcactgctgcctgacgcctccattaccatgtgcccctcctgcttccagatgttccattctgaggactatgagttgctggtgcttcagcatggctgctgcccctactgccgcaggtgcaaggatgaccctggcccatgaccagcatcctggggacggcctgcaccctctgcccgccttggggtctgctgggctgtgaaggagaataaagagttaaactgtc

SEQ ID NO: 12525 - DNA, 13979 bp, Homo sapiens
ttttcgctgaaattttgccagatcctgaagatcttcgtggacaatctctttgctatcgtcctgctgaagcaggccacagctgtgcgctgcttggacatgagtgcctcccgtaagaagctggccgtggtagatgaaaatgacacttgcctggtgtatgacatcgacaccaaggagctgctttttcaggtgaagtccctgagggggcccagggacatcatcctttgattagagactctcctctagcttcccagtccctgcaggaggctctcctgctctggcccaggcaggtctctgggaggggcaggggccaagcacatgcacagagtcccagaggccctgggccacaacctgctcctcccacacaggcacaagccgcagggcctggaccggcctctttaactttggtttccttgccaatggaaaccgaaggctctgagccagcagagcctttcttaagcgtttaccatgaacaagaaatggggcaatgactctgagaggggtgtgacgttggcactcagtgaatggggcgatggatgcacttcctttgcagaagtctgtgtctcacctgctgcaggcctgcctgtgtctatgcgcacctacagcgtgggaaggaaacaggatgttttgtcatctgaaagggggaaggggatgggcaagcctggccttctacttaattcacaagaatgctagaagagccagcagaatgcgaagtgcttggatctttggggttgtaggcgttgttcagtggagtcatccagccctgtggcctgaggaagtgtgtcaccagagaagacagcccggcagctctgtgccccgggcctggttggctttctgctgggctcgcgccattctttctctctttaggtctttgtaggtggtcaggactggttttccagagtgaagttccccccaaagctggagcccctcctgactggtttcctcggccactgcagggtttcctgatgttatgggcagattcagtccccttaccaggctcctccttgttctcagcagcagaatcgatgggggaggggtctggagtggggagcagcctcagtcaattagaaggagttacctggccacctctagcccagaggtaactccatgtcagtctcaactcactcatgtccttgagagagtagaatggtttcggggaaagagagggcatagccttcaagctgacctgggcttgggtcctgcctgcatcccttactgtgtgatcttaagttagtgagcctctctgagccttaattacttttctctaaaatgaaattagtaattgccccttacagaattgctacaggaatacactagatactacagtgcctagctcagtgttgagcacaaaatggggcctgaaatgttacttcccttctccccagcctcacctcccacctatagggggcatagctggccccaaatgtgaatcttgtgtctgagcctagaatcatacaagtgtggaagggcgtctgtgctgccccatccccactgctggctctatggcaggctaggggaggtgattctcagccctgccaggagacatcagcattcccagctgtaacattgcctgctggcttttcctcttctccactgcccctccctctacacataaaacagctatattgattttttctcattataaaaaacaatccatgctgattataaaagatttagtcattataaaagatcctaggcagaaaggtatgagcatatttcaggagaataattttttttcaaaagtaatacttgcttactcaaaaattccaacaacacgcaggtgcatggaggggcttgcctctgttcatttctcttgcctctgttcatttctttgtggtcccctttcatccttttccctccatcccactgtaagcaatttagtgggattcagtctttaagagggtattgggctgaaatgtgtgagcgctgaccaagcccagggtggttctcacaggatccccactgtccctgttccccaggaaccaaacgccaacagtgtagcttggaacacccagtgtgaggacatgctctgcttctcgggaggaggctacctcaacatcaaagccagcaccttccctgtgcaccggcagaagctgcagggctttgtggtcggctacaatggctccaagatcttctgcctccatgtcttctccatttctgccgtggaggtgccgcaggtaactgggggtgcctgtccactcttagcactggcaaggctgacaagaccagggaagctgggccctttgctggtgctttggggagagagtagcaaggagagaagaatggcagctgtgaggtcgtgggaggcagtctgggcctggaacctgccgccctgtctccactccttgcaacctgtgtgactgggggcaaacagctcaacctccctgagtatcagtttcttccttgtcccctttctgtagggatgggaggggtatgcagtgttgtcagcagcgtgtgttttgcagagagcccagcgtggggccgaatggagtgagcagcaaagccgggagtccggcagggtgtgtgtgtgagtacgtgtgtgatggtggtgatgtgtgtgtgagagagaggggagagagagaatgagtgggtggggggtgtgggctgaggtctgtgagccaataagggagcatgggactctgcacaagctctctgaaccaggaggtggccagaacagaaatggggcactgaagggtggagccacagaatgggggagggcagaaccacagacaggcgcctgagattgacctcccgaatgcaggatggtctcccctccaccttctgcaccccaggcagatggtgctcactgtagaattgccataaaacagagacgtgcatagcgagaaactgtagccttcagcatcccatcctcaggacagaatcactcttaaacatgttgaaatacatctgcttagcgcttttctacgtgtatatataatatatgcataatatacaattaggagcatgtggttttataagaacatttttaaacaaaagtggaatcacactgcaaatacttttcatgacttttatgtgtatacgtattgctacctatagatggaacctcagatttactgtattccctgagcctggcctgtaaacaagacttctcatcccttcctttatggctatcttctcatttcacctcacattcggttatggcagccccatcactgtctatgaagtgctggctgtacactagtcatctggccttttcactcaacaatctcctaaagcatcgttctgtgtcagtaaatggtaaatgttcttattctgcatggcaaaatttagggtaattgtagactcacataaattgtaggaaataatacagagatcccttaaaccctttgcctagtttcccccaacggtaacagtgtgcatagctctagagtgatcttcccacccatgttggcatgtgtaatctcccaccacagtcatggcactgaacactgccaccaccacaaggtccctggtgttgtgctttttacagccagcacccctccctcctgcctggtccccacctgccttgtatttacagctgcattttattgtgtcttgtggatgttccacagctttctttaccagtcctactggacatgtttgctgcttatagcttttttgtattattgtaaatagcaggcatctttctagctaggtccttgcacctgtcccaacttggcgccttggcataaattcctagaaatgaaattgctgggtcaaagcacgtgtacctttgaaagacttttagggaaatttccaggtttcccttccgctaggctctgtcagtctgttttccccatacaactcagcttcaggctagagcccacttcttctaagttgatgataccctcgaaactcatgactgcaagacttactggggaaatgcccatcatccatgcctgacacagatcagctattcaagaaatgttagtggaattcagatctgaggaaaaagaccagaaagcaagaggaagaagggaatgaggtgggtggaagtggcagcaggacgaggggcacgaacagcttctcctggactgtgtcctcgtcatccttgtctgccccattacaaacccacgcaccacatccaccaggaactcatctccctcaattgccccaaactagctctgcttattttattaaaaggttttctcccaagattgccatcctgacctcaaaaataaatgcagtttgctgctctctgactgtggccggccaagaggagccagaggggcagcctggggcttcctctgccaggactttaagattcagcagcaaagtcttgctgactgcaccaaggccatcctgctgacgcagcgggtcaggactgccaagggttaggaaacacattctcaagacaaaggctgttcatctgtcgcctctgcctccggccatcctgtggttttggcccagagaggagggagaaagcatcagacccagtcttggaatttttggttgcctttcgaaatttacattgtcttgtgcaagaactggtttgtcagggctgccaagtaggacaacgagccctaggagggcttctcaaggcggtggtgacttcatgtttgaaatccaacagcaagataaagtatagctcagagagtatttgttcagtggggtctatttttaaaactccactcaaattgtgcctcccaagtaagtccaagtgttagccatccatcatatgctcagctgtgatatgcctgcctgagtgcctgtcccactcacggggcagtcagcatggcaagcagttggtgtggttcggggaaggagcaccagctttcagtcctgactctgccatctcaagcagctgtaactagagcaactcatttcactctttggggcctcatttcttttctgtgaaatggggttaattatacccatctttcaggtttcgtcaagccaaatttctattattatttctccttattactgactcataaaatagcaaaaaccacaaaacacaactaaattgcaacaggctgtacttactgacggactttagaaaggaaagctcattgtgtgctttaagaaaagctttcaggagtttgagaaagcttccaggagatggtgaaacttgatctgagccctgagaggtctggaaaggaagagtggagcagggaagcttttcaaacaaagggaaaggtgggggtaggaacaagactggagagcctgggagatggtgaggagctggtgctgagaaaatacagtgaaggtaatgatcatgcctgcattttgcccagtgcttcattatttttggagcacatctctcctttgcccatggtagcctgagctgggcaggacatctaaacagaagttaatggatttacccaaaaagtcaccagcctaggatgtggctgagcctggcctgggttctaggtcacctgctccgtagcctatgcctgctgccccgctaaagggagcatttaatgtgccaatgaggagagatggcatggtggaaaagataagcacttggaagcagccatgttttgctctgagagtagacagactcaaaataaaaaaaattccttcaattctaaagctaaaaaatgggactggaaatttcaaagacagacaaaagccccaaatggagaaaacaatacttcaagctccacatttgggaaccattagcacagaggtcctggctgatttctcttccctgcccaggaagccaggagagatgcaggccactgaagcacactggctggcctaaaacaagggcaaggcctttccttgttaaagatgtcatggcccaactcaagactcattctcaggcctgcacgcacatatgcacatatacacgcgtgcatacatgtggcaggaaggggcacagaacctggagtccagtcacctctggctattgccagctatttgctgggacaggtcatttgtcctctctgagtctcggtctcctgggctgtagccagggagaaataatacctactgcacaggactgtggggacagccaaaagccttttataaacctaagaaagagaagtcgttaggaactattcatgggcactcacagcaaggcaaccccatcttgtaggagggcatctgtccccagggcagggatcaggagagctgtttccagaggcttccagggtaacttggagcaaatcacttacctttcttggactcagtccctggaagaagaggccattccagaccgcttcctcccacgaactcattcattgtgtcagcaaacgtagactggggttctgctgagggaggccgatacaacccaccactgcccacggctgtgcacggctttgctgtgggaacaggcctgtaactgcggcacaacctgcgatctggacaaagggcagaggaagctgagactctttcccctggggtgggggcttgaggggcttgggaggactctgcagaagaggtgacatttcaacagggccttgaaagccaaataggtattttccagaggcagagtggggaggggcaaaggcattccaggtgagggtgacatcctatggcgaggcaggcctgtaggtgggaaggaggggaggatgggcagagagtttgtgctgtggagcacagtagcccagtcatgagagaggtgcaggatggagcacacagggtgggctgggcaggctgggcagggtgctgattggcggctgcagggctgctccccaggcatgggtaatcatcccacgcatctggaggcaggctctgtatgcatctggttctttccatggctctgaaaacagtcttctttttttcccttgatgaaatcctgcagtccgctcccatgtaccagtacctggataggaaactgttcaaggaagcctaccagattgcttgcttgggtgtcacagacactgattggcgtgaactggccatggaagcgctagaaggtttagattttgaaacagcaaagaaggtaagcatctagccagcaggagctggagtttggtccttgtggggtcccttaagaaggcagatggggacccaggtggcacggagaggccatagactgcagcagtctctggagttaggctgacctgggcttgtatcttagccacttcctcactgtgggcctgggtaggtgacaccctttctaagattgcttctctatagacgtaggatgatgacaggccccatcctcacaaagctgtgaggatcaaatgggaggatgcctgtaaagcctgacccaggagcagcatgtcagattctggctgtcactcttattagctgttctctgtgggaagcacctgactagtagcctggcacatcacaggcactccgtaaatggcggcttttattatcggtgtagtcactggccatgatgctgcacacaatgctgcttttcttagcatctgccaactaaggtgggagagatggtcaaggtctctgattctgacagcaatgtgggcacttcccacgtaccttcatggcgggattcatggacttgattcgttgtgtcctttcctggcctagtctatgaaagctagagagatggctgaaaacatctgacccctctctgcacataaggaaaagcccaggtatgttcctgagctgtgtttccatctagaacctcagatggaggaaggaatggcttccaacctccactcccctaccccttccctctttatctccccacagtcaattaatgagctgctcattttgtccatattcccgggctgacattgaaggagtggcaaagagggacgtgatgcccgccttgggttagatcaagacttgtaggcatgaagagaggagactggaccagaccaggactaagaagcctggctgagaacgagctgtgtcacataaggggctctgggacctcaggccagccactttccttggagccccagtcctcccagttctgaaatgggggtggtgagaatgcccgctgcagtcatgaggcttaactgagatgttgtaaaggggaatttaaatcagggatggttgtgcagatgctagccattactaaacaagggaagtgatcgttgtgtaacaatgatctagattatatttttagatgtcctcagtgtaggaaagtggagatggaggaggctgtaagaattcagaggaggggccaggcgcggtggctcacgcctgtaaatcctagcactttgggaggccgaggtgtgcggatcacaaggtcaggagatcgagaccatcctggctaacacggtgaaaccccgtctctactaaaaatacaaaaaattagccgggcatggtggcaggcgcctgtagtcccagctactccggaggctgaggcaggagaatggcgtgaacctgggaggcggagcgtgcagtgagccgagatggtgccactgcactccagcctgggccatagagcaagactctgacttaaaaaaaaaaaaaaaaaagaattcagaggagggaggaggcatctctatggagggagcttccctctcctgccccacccagaaatgccagcagggagggagacgacaaatccctagaatagaaaggattgtaaaaagccacaaggtttaatatgagtgtttactgatatttttataaatatatatatttttatatatttgtttaaatattgagacggggactcactgtgttgcccaggcaggtcttgaactcctgggctcaagcagtcttcttgcctcagcctcccaaagtgctgggattacaggtataaaccaccacacccagccagatttactatagttgaaaagtaagtgtatgtggtatatatctattgtgtacaacatgctgttttgaaaaagccacatgatattgaagataggctggatgttactatttcatctaaatcccgagtaccccacctctttactctgtgccaggcactcaggctcaccagcttggatatagtggttcctagagatggacagccatccccactagatggcagagaagagctgctgagctcccgccagaccctgagcagagctgcaggttcctccctattcccaggcttccctctgctgagctcattcaggggccttgtgactctgaccaggcaccctgacgctgcaaaatgtgtcaggttgaaggaactcggaaacagatttattaatgggcaaatcctagacactagcacagctgagctacagctagaaagacccttgagagggtgtcagtagcaggcccctttccacaaagaagatggttggagcccagaagcagagaagtaggctcagagcgaggactcagacctcgaatgctcctttccctcttggccactgtgctgggctttgcagggttgccctctcaaggcgctttaaggaaacccagatctagagggtgatgtgtaagacctacagcttgggacacaggtagtcttagccctgtgttccttggcccatgtgatgcccgcattgcccttttctacgaattcctcttcacaaacacttgtttgccaggttctgactctgatgcctcccttaacgctgcctcccacccctgctcatgctcagaccattcatccgtgttctccaggcatgtggttcgtagttggagagctcttagctctgggaggtgtcatgatctgtttaattgaccagctttccctgttagaatgtggacctctgaattgtggagggggacaggggccgagacatgtttctccctgggtcctcagtctcttgacaggaagcctggtcctgtgggatgaaaagataaagttgcattgtggtcacctgcaaggcaggccggggacttgctcatctcccgaggtcttttcaggagggaggatgccatgctgctgagcagaggctgcaagtggtcaggattgctctgcgtgttcagttcaaagggctctggagctgctgcctcctctaggcacaggtcagcccattttgaatggggcaataaatggtgacagcaaagccacctgaaagcagcctgacctggtggcttgtgctcctccaaaccctgggcagaatctgaaagcagcaaaactagcttagctaacaccagtctgcttgttcctcagaaacttctagaggtccatgagttaaagtctctggctttactgtgagttcaaggcaagggctgcaattttagggtttacataaagagtttgccttccacagacttggtgggattcattccctacccctccaccttcttccagaatctgtctttataccctctcagctttcccctcctctgctccctctgtggtaccaggggctctgggtcccctgtgtctgtggcaccactgggtaggcatagctgtcccctgcattctacccatgttgccaagatgtataggcagtctctcatcagtccatgcatctcatcctctcctgctgtgatgctgcgtgaccccccagagggtcagaccggcttgttcttctttgggtctagagtctcccaaggaggcaccgccacagactgtggcatcacggttttgttttacctgatctcaaaatgactgatgcaactgggatgtctttgctgttctttacatggtccaatcccatggataaagccatgcctcgctgggtggtataacctcctgcacgcacgatgattaatctgtgcttgctcccttcctctcctctgtggctcactgtctagatagagcttgacttcccacccctagccaatcacccacttttgaagccaagaagacagcttattttattctttatttcttcgccacaggccttcatcagagtacaagacctccgatatttagagctcatcagcagcattgaggtaaaagatgaagcatttttccttctcaagaaggcatacttggggttcctgttttaggggcagcccttctaacaggcaagagccttgaggacatgggaacagagctcactggcgtctgggcatctgggccacagccttgctccgggggcagagtggccacactgggggagacaacagcaggtagtgtgagctgttgtgtgatagctgggtgaggcacatgggttccggatctctccagggttgggtttctagtctgtgaaaagggattggacctacctcacaggctgctgtgaggattcagtaggttctcaggaactggtttgcatcctcctggtggcggatagctggtcaccatcctctcagactccagtaatctgatagtgttggaggagtttcccaaatgcacatgagctgagctccattccccagaaatggacctggggagcaaggcccacagtctgaactgagcgccccagagttctggagcaacccctagccctactgtttctggctgagaatattgaccttgtcatccaaacccaataggcctgcagtgtgctaaggaagctggttgtaggtatgccatttgctgggtggtggtcaacactatgctttttttttcttttttttttttttttttctgaaacaaggtctcactctgttccccaggctcaagcgcagtggcacgatcacagcttactgcagcatagacctcccaggctcaaatgatcctcccacctagcctcccaagtagctgggaccacatgcatgtgccaccccgcctgattaattttttgtatattttttagagcagggttttcccatgttgcccaggctggtttcaaattcgtgggctcaagctattagcccaccttagcctcccaaagtgctagcattatagacttgagctaccatgcccggcccttagacactattcttaatttctgtgtatctcagtgctgtctggctgtctgttaaaaggcatatacattttttctcctgaacatatttattgtgaaggtatgggaatgtgagatacatttgaattcccagttggaaacagtgaggaaatagcaaatgtcttgtccctctcattcatttccccataataaacacctgtcatgggccagcccttgtgccgagctcagtgggcacagagctgaggaggagagaggctgacaggagctcacagcctgctaagcctcataacgtaatctgctctgtgccacatgcgtgatttatgtgaatgctgttctagatcctcacattaactgaatgaggcaggtactgttgctctccctattccatgcaggaggaaattaaggctcagcaagacgatgccacatccccatgggtccatagccaaaaacttggtggaattcaagcccagtctatttcctaagctcatgctctctcggccacataccctccctacccgcgtgttgtaaggggcatctgtatattctggggtttacctacccgcgtggtaaagggcttgttcggagctattgctcaaaatgcccagtgctgctgactttcacttgtaaatccactggcctggatctgggggtcttcacctgaagccaaggagcataattttcctctctacaaaagtaactgctgtggggtccaactattacttgtcacatcttactggggtcaaaatgtagtcctctcctcgtatgctatgagctgggaagtgcgttaaagtaaactcctaagattgtctcttgaaaaaaagtaaagtgcctttgagtgtgctctatatcgactgcctgcagacttatttgcacacatctgggtgctcagcataattccagagaactgcagatccttagtgggtgccttttggataggggagatgttcttgtcctgctgacggggggaaagaacctgcccatgttgacatgcacctgctgagtgccatagatcgtttttattggtcatggtgatatcctggggcctagaatggatatggcctgaatttcatgtctagtaaaaccttttttgtttgtttgtttgttttttttttgcagagatagagtctggctatattgaccaggctggcctacaactcctgggctcaagtgatcctcctcttttgacctcccaaagtgtagggatcacaggtgtaagccaccatgtccagccaaaatcaatcttttatctcacggcaagatttcaattcatttccaactattaggagttagtttgtttgatgagcctgagctgtgtgcaggtttttagaatgataatttctgtcagtatggaagcatgttgcctccagctgttaaaactttcaccagcttgtctaagagtttgattcaatgtcttatcgtcctccaatatgctgctctttctagaaaacaagcaaaaggaaactgctagggctcagggtttgggtgctactgagtgtttacaaatactcgagctgtagacaagcgaatgttccctgacacagaaggaagaagctttatcctagctgtgctaagtgtgtgtgtgtgtgtgtgtgtgttgttggggacatcacttgcttcaaaagactacattgtgtgatacaaggaatatctggagtcagacagaactgcgtccaaattccagctctgtctgaccctgacctgttcctcttcttgagtctcagcgtccttcactctaacacttgggtagtgagacctaccctgagggtcactgagaggaataaaggggccatgtgtgtataaagtatatacccagaacctagtggatgttcagcatgcgggatttcttaccttctctttagaagtagggatatcgtaagacttgtcatcctattttattggtctccctcttgggcagaaaccctaaacattctcctgctctgtcatccccatgagccacaactctgccaaacggggcctgcggatttgggagatcttgggagcttaggggtcatggatgagtcagagcacacactattcaaactattccgtcatagccttggaatacacaggaaagcaaccctgaggaatttccattaaacaaacaaaggtttgcatctttttttgatctttgcttgtctggtaaaagcctgcttttgttgtcaagccttcccagcgggaacctaggggagagagacaacagccaggagccaagcccaggttccagtaggaaggcccaggggcctcacttgaaatagccacatctaacctttgtaaaggctgcttcctgcccatggctgcagaggccatttcctttgcttctaatttttccaggagaggaagaagcggggagagaccaacaatgacctgtttctg

SEQ ID NO: 12526 - DNA, 567 bp, Homo sapiens
ttttcgctgaaattttgccagatcctgaagatcttcgtggacaatctctttgctatcgtcctgctgaagcaggccacagctgtgcgctgcttggacatgagtgcctcccgtaagaagctggccgtggtagatgaaaatgacacttgcctggtgtatgacatcgacaccaaggagctgctttttcaggaaccaaacgccaacagtgtagcttggaacacccagtgtgaggacatgctctgcttctcgggaggaggctacctcaacatcaaagccagcaccttccctgtgcaccggcagaagctgcagggctttgtggtcggctacaatggctccaagatcttctgcctccatgtcttctccatttctgccgtggaggtgccgcagtccgctcccatgtaccagtacctggataggaaactgttcaaggaagcctaccagattgcttgcttgggtgtcacagacactgattggcgtgaactggccatggaagcgctagaaggtttagattttgaaacagcaaagaaggagaggaagaagcggggagagaccaacaatgacctgtttctg

SEQ ID NO: 12527 - DNA, 7992 bp, Homo sapiens
ccaggttcctgctgcacagcctgcccaaggacaccccctcgggcatctctaaagtgtatcctttctcttatccctcctccgtcccaccaccgttcttgtctaatggccccaagaaattccttccagagcactttcctggcagaaccttcctctctcagcaaccctcagggaagacagagaactcaccctcccgctgctgtttggctatagaggctcagcagggaggcccaggggcccaggccaagagaagatgagttttcagggctctctgagctgaacccagcagtgggtctctggccaacacactgtcccaatccctcctagaacccacagatgagggtgtgactgaaatggaagaagcaccaggccttcaggcttggaaccttgggcacttctccagactggggaggagggagtgtttgttcagcccaggtatacatagcaccttctgtgccccaagccctgggccaggcaccaggtggcaaagctgccatcaaagagggaggtcacaagttagggtctggtttggtggatgtgtgctgtgtctgagggtggaatgaagctgaggtcagggccatggtcagggaagtttacctggaggaggagatgtccatcatgcaagctgaggcagccagggaagatggccaagtggatgttccaggggaggacccagcatatggagaggcaagcaaggcatgtgggagagggtgaggggaccctgggtgggaggggccggagaggcagcaggacccaaggcctgagagcctacctttgggttttcctctcttctgtagccatcgagggccacagtggtaccataagcagagcaggtgcctgaagggcctgtgcagccagatactggatcattaccaggcaatgatccagatttttaaggtcttggatgtcaggagacataattgtccctgttcttttctaaatctcactgtactctcagctccttcccagccgcagccccaccttccctctgtaaggaaaacccactccactggagaagacccagagctccttgttgtaagaattggcctcgctagaggattccaggcccattatgtacatttcaggggaaataccctcaaatcaaggggtgccttcctggagtcagacctctgctgcatgcgtctccgtctttccccgtaggagcagtcagggctatgcctgtgggggctgagcacctgtactcatcctttccagcaagttctgtttgagtcaacagcttgatagaacctctaccctgagccttaccctgtgccatcccctggggacctggaaatggctcctgacagtccctgactttgaggagtcatgctggagacacagaaggaaactctccacagaactgctgaagtggacggggctgcactgcagacggcgggagcaggaacactgggagagatgcgggaggaagggcaggagggcctgggggcagccaacatcggaggtgacctgagaggagagcacaaaggctcgtcagcctctggctgaggagcttcaagggggccccagagcacaggctgccgctcagaaactgcccaccaggccctcggggaagggtgtgcagacagagtggggtacacccaggggcctcagagcagggttgagggtggctccccagggagtctggaccaggccccacctggcagggtgagagcagagtgccctttgtgccaggcatcctaggagggcctggctggcaggtttggtgaggcaggaagagccattttggcctagtcagggtataagatgagccatcagcaggcccagagatgctaagcaaggttaaagtattaatggaaactacgctgtttttatctttggaaaaattcctgggccttgccatccgagaagtacactcacctctcacaagcgcacagagccttcctcacggtctttcctctgccttcccggcaccagcacaagctgtgttccagcctggggctcactccaaggacaggcagtgccagctcctgggcctggtgttgcccctgctgtccttaaccctgttcacggcaggaaaatactcttcaccttggccaagcagagcaaggccctcggtgcctacaggctggcccggcacgcctatgacaagctgcgtggcctgtacatccctgccagattccaaaagtccattgagctgggtaccctgaccatccgcgccaagcccttccacgacagtgaggtgaggatgcagcacccttgggcaggtggcttctcctctcccttgaggccatctcatgccttcttgcctggcctgggttccgtttgaagagagacagctgcagctccctctaggctctgtgccccctgctcaagcctggccatgccagctcccctgtgcttccctgtccacctcctgttctccccgcagtccacctggcgcccgctcacagcccccggccccggcctcagccctcagcctggcctcccttgctccttgccctcccctaggcaagccccacacctctgtgcccaggtggctctgcctttaccccaggcctggccccagagctgactcttactctagaaacctctgccctttctggaaccaggctgtagttctccagcaaatctaccccacactcccaacccacattccttcaacccagccagcttccttctttcacacatcctccctcaagctcagagcaaggacttggttcagacagacctgggttcacatcccggctccaccctctcctagctctgtctccatctttctgcaccttgggttccccctttcccacaggtagttgtgaggctaaatgagccagtatagtccacgtgctccgcacggtgcccggagcatggtaaatggctggctaatggtggcagcggccactgtcattcctgccaggggaaaagtgccgttgagcgctgcctgtgcaggtgtcttgggcacggggacccaagtgacagggcttgggtatttcggcaggcctttatcctgcttccccatggcatggagctcctgggcccggcgccccttccctgcctgcccacccgggtggcctttcctcttggcagccaggccccaggggcctgaagccagagtccagggggaggaggacacgtgcctgccccggcccctcgggagtccgtggctgttttgtaggagttggtgcccttgtgctaccgctgctccaccaacaacccgctgctcaacaacctgggcaacgtctgcatcaactgccgccagcccttcatcttctccgcctcttcctacggtgagtccctgcatcctgagcatgtgggtgggacagcctgtggacagccaggctcactccactgctctctggcctcaggacgttgggcaagggccaaaggcctctgaatgtccctgtttatgaaatgaggacactctgacgcccacctacctgacacaaggagtcactgtcggtgttcccagagataggacccactgctgcccaaagctgaagcacccactctgggaacctggcgcagggctttacataaccaaatgccccagaaagagagtccgatggctttgcattcagaccaggaggctgagataggttatcaaggcccagctcctttgatgttgacagaggatcagaagccccttcccaggagctgagcagaggccacacacacacacagacacacacgcacacacagactgcccctgcacacacacacatacagaaactgcccctgcacacacacacacagactgtccctgaacacacacacagactgctcctgcacacacacacacagactgcccctgcacacacagagactgcccctgcacacacacacagagaccgcccctgcacacacacacacagaaaccgcccctgcacacacacggagactgcctctgcacacacacacagactgcccctgcgtgcacacacagactgcccctacacacacacagattgctcctgcacacacacacacacacacacagagactgcccctgcacacacacagagactgcccctgcacacacacacagagactgcccctgcacacacacacagagactgctcctgcacacacatacagagactgcccctgcacacacacacagactgcccctgcccacacacacagagaccgcccctgcacacacacatggagactgcccctgcacacacacatggagactgcccctgcgtgcacacacagagactgcccctgcacacacacagattgctcctgcacacacacacacacagagagactgcccctgcacacacacagagactgcccctgcacacacacacacacacggagactgcccctacacacacacacagaaactgcccctgcacacacacagattgctcctgcacacacacacacacacacacacacacacacagagagactgcccctgcacacacacacacagactgcccctgcacacagacacacagagaccgctcctgcacacacacagagactgcccctgcacacacacacagagactgcccctgcacacacacacacacagaggctgcccctgcacacacacagaccgctcctgcacacagacacacagagaccgctcctgcacacacacggagactgcccctgcacacacacagagactgcccctacacacacacacacagactgcccctgcacacacacacacacagaaactgcccctgcacacacacagattgctcctgcacacacacacacacacacacagactgcccctgcacacacacacagagactgcccctgcacacagacacacagagaccgctcctgcacacacacatggagactgcccctgcacacacacggagactgcctctgcacacacacagagactgcccctacacacacacacagactgcccctgcacacacacacacacagaaactgcccctgcacacacacacattgctcctgcacacacacacacacacacacacacacacacacagagactgctcctgcacacacatacagagactgcccctgctgcctcttcttgcttttggtgaagctgccagtgggttgagaagcaactctgtggtcaccccacctgcctggcggcaagtcctttgcaaggcctccagccccctcagccctttctctatgccctccagacgtgctacacctggttgagttctacctggaggaagggatcactgatgaagaagccatctccctcatcgacctggaggtgctgagacccaagcgggatgacagacagctagagattgcaaacaacagtatccatgcccttggccagagcctgtgtgtgcggctgtgtgaggggtctggggacaggcgggaagtaggagggcccagtcccaggggatcgcgggccatgctgagcctggccctgtgttcccagagagattggagaggcccacatgggacagggacagggatcagagatgggcagacagctggccagggcctaaggacccagaagtggcaagtggcaccttggtcttcccgtgtgggtctcccaccctcccctgacccctaaaaggcactggctgtgcctctgtctgtgcatagctcctgcatagccaacatgggacatgatgtcatgatgtcggtgttggcccccagctcttccactcaagtcactttcgcatgcaagtgacagagtccaaaactgacaagctgaacaagcaaagggtgtgcaaggaagccccaagcaggagaggaagcttcctggcccagcgctcagtctggtcggtcacaggctggctctgcctctcttggccgcactgtcctctgggcaacttcattctttggcagccccgtggtgcccccataacacagagatgtcaggagcagtgccagccccacatcccctcagccttatagcccccagaaacagccagctttcctctcagctgtggcagtgaaagccccggggcacagctcagcctgccccttggccaggaggatgcaccagggcagttgtccagggcaggccacacttgcaggctggacatgggaggggcttctggcagggaacagcacacacgtggcctgaggcctcgctcccttgcactgactgagtctgcaggcctgggggctgtaagcctgccttccttgcagctcccaggtgctgccacccccaggggccacactgggaggagggaagctcagagagctgcttgctgaaggaaagacggacccatctctgccacccaggctccctcaggtgccacagatgatatgtgctatggtgctggcaggtgggtgctgtgcccactccaacttggtaccagcagtccccatgtcctgggcctccctgcaggacccctgctggcctctgttaccagccccaccactgtgggagaggggcggtttccagggacctccaggtgagtctgacccgccctggggtcagcagggactctcgcccctgtctgctccatcacaagtgcccgcagacccccagcagccactgaatgtttctccaggatccctgggcccatcccctccgtgcctacccgcagtggctcacagggcccgcatgtgcttcccactggccctgggagctatggtgtgtgtggcctgcgaggggaatgggtgagggcagcagggccagcagagtcccttccttctgattccttggcctgagccccctctgttcctccacctggaaaactcttccactggtctggctgcccttgagtcttctcacaggggtgtagggtggaggctagggtctgtctccatctctgcttctgattccatccttgaccagatccctccaggctcccagattctgcggctagtggagaccaaggactccatcggagatgaggacccgttcacagctaagctgagctttgaggtgagggtgcctctctgggtgacctgcaggagggcagcctccatcccttctcctgtgcacatggggaccctcagctagcgcagtggtggaggaggattggccagaacttccagatgtggtggcacgaaggaggggcaggaccccttcctgtggggtgtgggagccatggctgcccccgagggaccatggccaagggcgcaggtctgtggacagggaggcagcttcagctctggtgggaggagcttgccactgttagggtcacctgggtttaggaagcaggtcctctctcaccactgccaaagattccaggatcataatccacacagatgtctcactgtggctgagtgaggacactgtgcctccttcccgcccaccctgcagcaaggtggctcagagttcgtgccagtggtggtgagccggctggtgctgcgctccatgagccgccgggatgtcctcatcaagcgatggcccccacccctgaggtggcaatacttccgctcactgctgcctgacgcctccattaccatgtgcccctcctgcttccaggtaggtggccaccctggtagctcacatgtgcttctcttggccacttttcccttgcccaaatgtccctctgggaggcgtggcccctgggaggaggggcacatccatggctccaagttgggacagaggcttgtctgtcctctcccctgcttgcattccatgtgcatctaaagtggacttcactggcccctgcgctgtccacatcctccccaaatcctgggggcccagcaagcgtgatgtgcccttgaccttcactcagaaaacaagaaaccccacagccccctcccatctccccttccagccctcaaacaaaggtgctgcaggtctgtgtccagccctgaccactgccaagccccctccccttgagaggcagtgcgtcctggccccaggcgtagggctgatgagcactagggcttcagcctggtcttacagctgtcttcccttagatgttccattctgaggactatgagttgctggtgcttcagcatggctgctgcccctactgccgcaggtgcaaggatgaccctggcccatgaccagcatcctggggacggcctgcaccctctgcccgccttggggtctgctgggctgtgaaggagaataaagagttaaactgtcag

SEQ ID NO: 12528 - DNA, 2854 bp, Homo sapiens
ccaggttcctgctgcacagcctgcccaaggacaccccctcgggcatctctaaagtgtatcctttctcttatccctcctccgtcccaccaccgttcttgtctaatggccccaagaaattccttccagagcactttcctggcagaaccttcctctctcagcaaccctcagggaagacagagaactcaccctcccgctgctgtttggctatagaggctcagcagggaggcccaggggcccaggccaagagaagatgagttttcagggctctctgagctgaacccagcagtgggtctctggccaacacactgtcccaatccctcctagaacccacagatgagggtgtgactgaaatggaagaagcaccaggccttcaggcttggaaccttgggcacttctccagactggggaggagggagtgtttgttcagcccaggtatacatagcaccttctgtgccccaagccctgggccaggcaccaggtggcaaagctgccatcaaagagggaggtcacaagttagggtctggtttggtggatgtgtgctgtgtctgagggtggaatgaagctgaggtcagggccatggtcagggaagtttacctggaggaggagatgtccatcatgcaagctgaggcagccagggaagatggccaagtggatgttccaggggaggacccagcatatggagaggcaagcaaggcatgtgggagagggtgaggggaccctgggtgggaggggccggagaggcagcaggacccaaggcctgagagcctacctttgggttttcctctcttctgtagccatcgagggccacagtggtaccataagcagagcaggtgcctgaagggcctgtgcagccagatactggatcattaccaggcaatgatccagatttttaaggtcttggatgtcaggagacataattgtccctgttcttttctaaatctcactgtactctcagctccttcccagccgcagccccaccttccctctgtaaggaaaacccactccactggagaagacccagagctccttgttgtaagaattggcctcgctagaggattccaggcccattatgtacatttcaggggaaataccctcaaatcaaggggtgccttcctggagtcagacctctgctgcatgcgtctccgtctttccccgtaggagcagtcagggctatgcctgtgggggctgagcacctgtactcatcctttccagcaagttctgtttgagtcaacagcttgatagaacctctaccctgagccttaccctgtgccatcccctggggacctggaaatggctcctgacagtccctgactttgaggagtcatgctggagacacagaaggaaactctccacagaactgctgaagtggacggggctgcactgcagacggcgggagcaggaacactgggagagatgcgggaggaagggcaggagggcctgggggcagccaacatcggaggtgacctgagaggagagcacaaaggctcgtcagcctctggctgaggagcttcaagggggccccagagcacaggctgccgctcagaaactgcccaccaggccctcggggaagggtgtgcagacagagtggggtacacccaggggcctcagagcagggttgagggtggctccccagggagtctggaccaggccccacctggcagggtgagagcagagtgccctttgtgccaggcatcctaggagggcctggctggcaggtttggtgaggcaggaagagccattttggcctagtcagggtataagatgagccatcagcaggcccagagatgctaagcaaggttaaagtattaatggaaactacgctgtttttatctttggaaaaattcctgggccttgccatccgagaagtacactcacctctcacaagcgcacagagccttcctcacggtctttcctctgccttcccggcaccagcacaagctgtgttccagcctggggctcactccaaggacaggcagtgccagctcctgggcctggtgttgcccctgctgtccttaaccctgttcacggcaggaaaatactcttcaccttggccaagcagagcaaggccctcggtgcctacaggctggcccggcacgcctatgacaagctgcgtggcctgtacatccctgccagattccaaaagtccattgagctgggtaccctgaccatccgcgccaagcccttccacgacagtgaggagttggtgcccttgtgctaccgctgctccaccaacaacccgctgctcaacaacctgggcaacgtctgcatcaactgccgccagcccttcatcttctccgcctcttcctacgacgtgctacacctggttgagttctacctggaggaagggatcactgatgaagaagccatctccctcatcgacctggaggtgctgagacccaagcgggatgacagacagctagagattgcaaacaacagctcccagattctgcggctagtggagaccaaggactccatcggagatgaggacccgttcacagctaagctgagctttgagcaaggtggctcagagttcgtgccagtggtggtgagccggctggtgctgcgctccatgagccgccgggatgtcctcatcaagcgatggcccccacccctgaggtggcaatacttccgctcactgctgcctgacgcctccattaccatgtgcccctcctgcttccagatgttccattctgaggactatgagttgctggtgcttcagcatggctgctgcccctactgccgcaggtgcaaggatgaccctggcccatgaccagcatcctggggacggcctgcaccctctgcccgccttggggtctgctgggctgtgaaggagaataaagagttaaactgtcag

SEQ ID NO: 12529 - DNA, 2457 bp, Homo sapiens
cttttgatgagtccttttccctgcacagagcttctggtgaaggtggtgggagttgttcttgcagagcacatgggattccaacggcctggcagtgggccaggatcttgttgccatggtgactgacactgttttcgctgaaattttgccagatcctgaagatcttcgtggacaatctctttgctatcgtcctgctgaagcaggccacagctgtgcgctgcttggacatgagtgcctcccgtaagaagctggccgtggtagatgaaaatgacacttgcctggtgtatgacatcgacaccaaggagctgctttttcaggtgaagtccctgagggggcccagggacatcatcctttgattagagactctcctctagcttcccagtccctgcaggaggctctcctgctctggcccaggcaggtctctgggaggggcaggggccaagcacatgcacagagtcccagaggccctgggccacaacctgctcctcccacacaggcacaagccgcagggcctggaccggcctctttaactttggtttccttgccaatggaaaccgaaggctctgagccagcagagcctttcttaagcgtttaccatgaacaagaaatggggcaatgactctgagaggggtgtgacgttggcactcagtgaatggggcgatggatgcacttcctttgcagaagtctgtgtctcacctgctgcaggcctgcctgtgtctatgcgcacctacagcgtgggaaggaaacaggatgttttgtcatctgaaagggggaaggggatgggcaagcctggccttctacttaattcacaagaatgctagaagagccagcagaatgcgaagtgcttggatctttggggttgtaggcgttgttcagtggagtcatccagccctgtggcctgaggaagtgtgtcaccagagaagacagcccggcagctctgtgccccgggcctggttggctttctgctgggctcgcgccattctttctctctttaggtctttgtaggtggtcaggactggttttccagagtgaagttccccccaaagctggagcccctcctgactggtttcctcggccactgcagggtttcctgatgttatgggcagattcagtccccttaccaggctcctccttgttctcagcagcagaatcgatgggggaggggtctggagtggggagcagcctcagtcaattagaaggagttacctggccacctctagcccagaggtaactccatgtcagtctcaactcactcatgtccttgagagagtagaatggtttcggggaaagagagggcatagccttcaagctgacctgggcttgggtcctgcctgcatcccttactgtgtgatcttaagttagtgagcctctctgagccttaattacttttctctaaaatgaaattagtaattgccccttacagaattgctacaggaatacactagatactacagtgcctagctcagtgttgagcacaaaatggggcctgaaatgttacttcccttctccccagcctcacctcccacctatagggggcatagctggccccaaatgtgaatcttgtgtctgagcctagaatcatacaagtgtggaagggcgtctgtgctgccccatccccactgctggctctatggcaggctaggggaggtgattctcagccctgccaggagacatcagcattcccagctgtaacattgcctgctggcttttcctcttctccactgcccctccctctacacataaaacagctatattgattttttctcattataaaaaacaatccatgctgattataaaagatttagtcattataaaagatcctaggcagaaaggtatgagcatatttcaggagaataattttttttcaaaagtaatacttgcttactcaaaaattccaacaacacgcaggtgcatggaggggcttgcctctgttcatttctcttgcctctgttcatttctttgtggtcccctttcatccttttccctccatcccactgtaagcaatttagtgggattcagtctttaagagggtattgggctgaaatgtgtgagcgctgaccaagcccagggtggttctcacaggatccccactgtccctgttccccaggaaccaaacgccaacagtgtagcttggaacacccagtgtgaggacatgctctgcttctcgggaggaggctacctcaacatcaaagccagcaccttccctgtgcaccggcagaagctgcagggctttgtggtcggctacaatggctccaagatcttctgcctccatgtcttctccatttctgccgtggaggtgccgcaggtaactgggggtgcctgtccactcttagcactggcaaggctgacaagaccagggaagctgggccctttgctggtgctttggggagagagtagcaaggagagaagaatggcagctgtgaggtcgtgggaggcagtctgggcctggaacctgccgcc

SEQ ID NO: 12530 - DNA, 667 bp, Homo sapiens
cttttgatgagtccttttccctgcacagagcttctggtgaaggtggtgggagttgttcttgcagagcacatgggattccaacggcctggcagtgggccaggatcttgttgccatggtgactgacactgttttcgctgaaattttgccagatcctgaagatcttcgtggacaatctctttgctatcgtcctgctgaagcaggccacagctgtgcgctgcttggacatgagtgcctcccgtaagaagctggccgtggtagatgaaaatgacacttgcctggtgtatgacatcgacaccaaggagctgctttttcaggaaccaaacgccaacagtgtagcttggaacacccagtgtgaggacatgctctgcttctcgggaggaggctacctcaacatcaaagccagcaccttccctgtgcaccggcagaagctgcagggctttgtggtcggctacaatggctccaagatcttctgcctccatgtcttctccatttctgccgtggaggtgccgcaggtaactgggggtgcctgtccactcttagcactggcaaggctgacaagaccagggaagctgggccctttgctggtgctttggggagagagtagcaaggagagaagaatggcagctgtgaggtcgtgggaggcagtctgggcctggaacctgccgcc

SEQ ID NO: 12531 - DNA, 8584 bp, Homo sapiens
ggaagaagcggggagagaccaacaatgacctgtttctggcagatgtgttttcctaccaggggaagttccatgaggccgccaaactgtacaagaggagtgggcacgagaacctcgcgcttgaaatgtacaccgacctctgcatgtttgagtatgccaaggtaacctaccctgtcccaggcccaagctccagcttggagcccactggtattctcacgtgcggtgtccaagttattttccccaagagtgctgcggacaaaaactagcaatggtctcagaaaggatgtggggaaactggtaaacaaaggacccatctacagccactggttgaaactcacctaaaactgacctttaaggctgacaccaagggggcagactatggcagttcagaccttcatcagtgacagggctggatggctgtgggtctacaccagcacaatcccttcattgagttgagggctcagggcttcagggctgtcccccacaaatcctctcaatccttgtcaggagccgccaagaatcggtgtcttcaggcaggagccggtcctgccgatcatgcaggacgacatggtgcctgccagccaagtttcccatagcacctgctgattgtcctggacttctcactgggcttctgggaagtcaggcagagcctccgccctcccatgttagcgcagcatgcctcacgcctgccggctgcagagtggctaccatgtggttgcagtgggtgatggcagagattcccttttgcattgggacggcccccatgaaccttactccccagcagagctgggccttttaaggcaggtgtaggagaggagcttcctggaccaggctcctgatggcttctgtgggaaggagttgcactaaggagcccagagcagtcaagacatttgcagttcagtctaagcaaggttcaaagaggcttcggtacactgggcaatgagggtcttccttccatcaaggggctttgttaacctgccttttctggaagtgtcaaaagtggctctcagtatgttatgaagtgactcatcagccataacctattggtgggctactaatggtagttctccagctcacaagttcaagatggaaaatcttccccacttttttctgcttttctattcctgaagatggctgtgctcttccaccacctgttcgaccctggggctgaaggtgtgtttggtggcctgtgatgttgcccaggacctattgttcatcaggacttggacgagctcctgggccccagcctgtcttttcaccttagtgatttcttcactccgtacctgagacccagggtgttcaggctccctctactttttcctcgtcacctttcctaccctccctcaggccccaccaaagacacctagaagatttcataacacattcatactgagatcaccagagtcagtgcatctctgcttccggggataacaaaattttaactcaggatgaacccttaagggatcaagaccctagaggtagaatttagggttgggaacccctgaggcctcctcaaggaggcagctgtgctgcagtagaaaatgcctgaccaggctgggcatggtggctcaaacctgtaatactagcactttgggaggctgaagtgggtggattgcttgagctcaggaggtcgagaccagcctgggcaatatggtgaaaccctctctctaccaaaaatgcaaaaaattagctggtgcctgtagtcccagctactgggaggctaaggtggaaagattgcttgagccccagaggtggaagttgcagtgagccaagatcacgccactgcattccagcctgggtgacagagcaagacccatgtcaaaaaaaaataataaaatgcctggccttggtgccccagagctggtgtgagtgcagtttctttctgtgggatgacctggggaaaggctcttcggtttgccaaacctcccttcccttctcagatggtaatagcgacagctcagtttagtcatgagatttgcacagaataatgtataggaaagcgcattagaaatgccaacctgtagaaagattaggaagatgagaggggccacacgtgaccacagagtggattttcatacctctctccctggctggccccactcctgcccctgctctgaggcccctccttacactgtggtggacttcgtgtgcccacagcctcccaccagaactgcagcccatttacacactccatttgctccgtctctctatgaaggtaaatactctgggacttgtttttggttttagtttttgatcactattccaaggaggttggttccttttcaatcccccctgcccccacctggtagtctgaatttgagaaatatgtacctacacattatgtggggggtgggggagatctagtcctgattaacgtggcatatttttgtttacttgaaaattgcttcccaagattcaatctggttttcagaaaattttaaaattacattcccacgtacaaataaattgtatgctttctggataagtgacatgtttatatggtgataaagggaattataatgctcttaactcttatgtagtatgttcttatcaaaatcaccaagcatgagaacactgtttagtctcattcatcactcagcacagcctctttctgtccacttcagggccaagtctttgccatggccccagataatgtgtaacttagcttcaggaaagcaaaaagcctttgaatttccagtttgctgagccttgaaggaagcttttagacccagcttcaatgaagtcacagctccctgagtgaccagctggcctaggcttatggctccctctcagcctctcacccttgccgtggtcacccctggtcccctgagcactcactgaagtccctttgaaggacatttctagtctcctaagatgcctgttttcctccagctgccaccctcatttcaccagccaggtaggcagggtttccagcttcgtgctggcatagagaatccgcgccatagcagctgccagaaggaaaggtgtgtctgtaaaggcccaaactaggcggggacagcggctgctttccaagccccttccctttgtcagctccagggagaaccaaaggccagccagggggcctgtcttctattgggtcccagcatcagggtatacaatgcgctttcctccccttcttaaaatgtatcatatattaggccgacctaatactctgaaagcacatttaccctgaaagcaaatgagggaaaaaagcgagctaattgttcaagtggatttttagcatacattgactgtacttttctgacacatgagtgttaatcatggggaaaggagtgctttttttgttctcagtgaggctgacacaaagtactctccacagggtacattattcctgagacaaaccacttcttaccagtaacatagacctgggctgtaagtgctcccagtttccctttttgaaaagctccacctttaaaagctgcctcaattctggcaaactcccacgtgtgtattttgggtaactactctgaaaagaggtggtgttctgaggctgtttctcacacattgtagggccagcccagagaagctgggcataccacttcagaggtatgctgaggccgaaggaacacaggccctaggcctgatctctgagcctccaggaccacagccatctcttccttctcaggtcctctcctgagcaccttccctgcctcagattcccccatggcctcctgctgtcccactgtcggatcaggttctcacccctgcagacctgacctcagcacaggatccctaaccattcagctgagaagcaactaaccagagagatgtttgcttgttatctgttccaggaaagtaactggggcaaagacaatgtgatgattctctagttcagggcacagaatgtttgctggtgactcagagagggcatggagggcacggagggccggcaaacactgtaagtcattttgtttgtgtaagtttaggggaacccatgctcagcctcactctgaagcatgtggtatcacccatatgatctgaataagatgacaggtctcgatatgtggaattgtgcaccaggttgtctcattgctgtttaggaacagtcctgtattgaccaaactatgtgagagagagacagcctgatcatgaacccccgaccctgcagacttcatgtgcagtgccccaaatagtctagaaagtgttgtttagccgatgaacaaatgcccatttgtgagacgggaaggaagcactgggggccagcgtccctgatgctgtcccaggatcccccaggaacacctgcagggcagcctgagatcactcttcccgagacctgggactcccccaactcagcccctcagggccgggccctgcctacctcctggttgcctgcttcagccatgtggagcccgcccttgctgctagaaaagcctgatgtaacgctggcacaggaagttctgatccagagtgtttttgtttgttgtgcttcctcaggatttccttggatctggagaccccaaagaaacaaagatgctaatcaccaaacaggctgactgggccagaaatatcaaggagcccaaagccgccgtggagatgtacatctcagcaggagagcacgtcaaggccatcgagatctgtggtgaccatggctgggttgacatgtaggttttggtccctgccccgagaagcatttggcagcatgtcatcacatgtcacctcttgactgacaagggaaccaatagtgcttttctaattatctaaagctaatgtgatagtggctaggttcttcaggagacacagagattgcacaaggcagtggctgccttccaggagcttgtggagtcactaggggaagggatggtggggaccagggaagaggagacaccgggacatcacagctgccatttgctgagcgctcactacaacccagacgctgtgataaccttccaggcattaggttttccacctatgccatcagggctggtgtctcctcgcccaccttgcagatgatgaaacagaagctaaagggacaagttattcccaaagtccagatagctggaaagttgtagagctgagctttagcctctgatctgctggatgtcgatgccaactacgcgtgtaatggtaggaacaaaaacaaaacaagttccaaatccatcagggaagaattcttatgggaggaaccatggatatcttctcttaggagacactctttccatgaagggaccttaaagaattccaagaggtaaatagagatggcgggaaaggatatgcaggcaggaagtacagcagaaacacagcgagttggctctggttggaataaaagacgtgtgggaatgggagggtgaaggacatgggctgtgggttgggggaagtgggctggccacactggaagggcctccgatgccaaacggaggtgcttagatttgccaatagtgagtgaccacctacagtcagacaccccctcaggcaggcaggtagaatggagaccagataactggctagtgcagtagagcaggagggaacttggtagctgagggcatgagagagaagtagcagtgttagaaccaagtggcccatcccagggtgttggggcagtggtgagtgtcaggctggctttgctctgtggctgctggtgggttacaccattcgtcaaggtggacaacagggagaggagggggttggggtggggcagcactgagacaggatggattcagccttgggactcagcacaccggaccttgagggggaaggctttgtcctcccagtcagtgagcttcaggctcaagcatgtgcacacacacgtgcacatgctgctgcggtaggcaaaggacacgatgggacaagctcctgagggtggctcaggctgggtcctaaaggctgttgattcttctggaaacaacgttgtggtctacaggtagcagtggcccagccaggatttggggatatggaagaggctggttaatgattaaattgtttccttgggtgctgccatatattaataattggtgtgtgggcccctcacaaagggaccttgatggatgtcctaccaccccatctttttcttgtccgatagtaatttttttaaagacagaggcacagattttgttccccacattattctttaaatgaaggggttcatatagaagagagccaggcagatttagggtgctctgttctctcttctggtttttcttgtcactttcatttgtaagtgctatagtatcaggttaccctgagggtacttgagtaattcaagaaacacattaagcatgttctgcttgctttccagatgtggctataaaaggtgtctttcctccagggacgttgggtgtgatgggtgggaaggtttctaaggctgtaagggctgtctatgccacctttccctaaaaacgtgtcctttttctgctgagcagtgttatttttagatgccattattattctaagtgtagactgacaggcctccgtgccttgcctgtctccagacagggattcgttacagctgcttctccttcctttctcaccaagactagcctgggtagaaccctttctcctgggagagttagtttgactccaaattccagcctgaccagagagaacaagcgcattctatccaggcctcatgtccccatgagtgatgggagggctgctcaccatggggaagcagtggtgagccagtgggtccctgcagctcctccctctttggtcagcacgttggccaggaggacagggaagacttcctgcaggcctttgtccagagctcagagcaggccccacactcacctcttcctttagagggcagtcattgaggtattcttatgccttggcatccacttttccgtgagaattcctgcacccgtggtggaaagagtgctgggcccagtcttgggctgggtgcttcaccttccccacagactttattcttctcatctgagagatggaaataatcatgcccacctcttagggtggtgaagattctgatttcacgcatgggaaagctcatggcgtcatctgggtacctggtaggggattaggagataattgtttctataccctgctggatagctcagtgacttccgagaaagacacacaaggtggctgacaggatcctgtaaaggccacctctcccagatcctggtgatgtttctggagtgtgtattcatgcatttaataactacccactgagcaactcccatgggccatggcatagtatcaacactggggaccacagaatgaatggacatacggcttgccgttgacaagacccagagcccaccctcctacctgccccttccctctccaggttgatcgacatcgcccgcaaactggacaaggctgagcgcgagcccctgctgctgtgcgctacctacctcaagaagctggacagccctggctatgctgctgagacctacctgaagatgggtgacctcaagtccctggtgcagctgcacgtggagacccagcgctgggatgaggtgaggggaaagcaggcctcatgggctggggccccacctgagccctgggacacaggcgggtgggtacaggggccctttggggttcagatggagagaagctgccctcgtgatggaaggaacattgggctggcagtcaggtaacttaacctcgaattctctgagccacagaatcgtggagggcctttccacttgtcccttcattcagtcattgagaaaatcgttactgacagccagctctgccagggtggtgacaggcaccggggatgttagtgtgaacacgacagctccagtgcctgctgttgggctgagctgcctctgaccagcaccacaggctcagacacatggctgatgtggagatgcacctgcgtgacatttaaaacctgctgggtagcattttggcagaaagcaccatctgtgctttccagatccagactgtgagagccatttcaggggccagttttttccctcccttctctgcccccaccccacaaccactacttctctctggtgtcaggggctgtaaagaattagccaggtcagcgagaaaggtggccagcctcaggctggcagaagcagctgatgctgccccttctatggctcaacccccaccctccagctcactggctccctgttccctgcagagaaatccatccccgagaggattaggagctgtgccaagatcctcccccgactcacccacccacccatcatggtccattttagagtgaaagcaaagccttcactgagaggagccgtctgactgttgtctgctctctgaacagctccattggtgaggtgatgaggtcagtcatgagaaaaggtggggctagggacagaggcaatggtggcttctcaagagaaatttattagatttcccaagcagcatagattagagcatcttagaatgactcagacctcgctgtgcatcaggcagactttctcaccatggctcatgtccggttctcctggcctgacaggtggttctggggcttaggtgagaagcagtcagtgggtccatacagcacgaagcccacagtcatctttgacaactgataagaagtggtgatgatgataatgtcaattctgtttccttaggtgtcgcccgcaattaaaagaaatctgtttgcagcactacaggagcccacgcaaac

SEQ ID NO: 12532 - DNA, 553 bp, Homo sapiens
ggaagaagcggggagagaccaacaatgacctgtttctggcagatgtgttttcctaccaggggaagttccatgaggccgccaaactgtacaagaggagtgggcacgagaacctcgcgcttgaaatgtacaccgacctctgcatgtttgagtatgccaaggatttccttggatctggagaccccaaagaaacaaagatgctaatcaccaaacaggctgactgggccagaaatatcaaggagcccaaagccgccgtggagatgtacatctcagcaggagagcacgtcaaggccatcgagatctgtggtgaccatggctgggttgacatgttgatcgacatcgcccgcaaactggacaaggctgagcgcgagcccctgctgctgtgcgctacctacctcaagaagctggacagccctggctatgctgctgagacctacctgaagatgggtgacctcaagtccctggtgcagctgcacgtggagacccagcgctgggatgaggtgtcgcccgcaattaaaagaaatctgtttgcagcactacaggagcccacgcaaac

SEQ ID NO: 12533 - DNA, 1570 bp, Homo sapiens
tttcatccagtttcccccagtggatccatcttatgtaactattatacaatatcaagaccaggaaactgagactggcacaaagtgtgtatattatatagttctgttgttttatcgcatgtgtagattgccatcagcgtgacacagaactaagccatcaccatgcagttaccacttagtgtcatatctactcaccttacctccagttatctccaaaccctggtaaccacaaatctgttctccatttctataattttgtcattcaagaatgttatataaatggaatcgtacagtatatgaccttttgagattatgttttttcattcagcataaaatcctggagatccatctaagttgttgtatgtttcaattatttgttcctttttattgctgggtagtattccaaccaatccatcttcttttatattattgtgcattgaagggttgtggtctcctgaacagaagtctgtctccaaacacaaatcaagcagcaagatcatctgctgcaggtaagtgcagctctgacgataagatttatgttccttcatcttccacacagactctcaaaatccaattatttcatgcagcagagaaggtcttgtgttaggtagttggtttaggcccctgtatttccttttttcttctttcttcgtctcctcgatgggaaagacttgtgcctttgatcatgaagcaaaagagaactacaagttgccttcatgcagttacttagcaacaagcctcaacatccagctatactgagtggaggcttgttgaaaatgtgaggctgtcattgtccaggcagcatgtgtggggaagaaagctttccctcccacactttgatgctagacctgaattagaatccagaatctctcattgacaggccatgtgacctcaggaaagttactaaatctttctgagctggagctttacgttcctcatctgacagatagggataaaaatactgacttgacgagattgttgtgaaatgcacacaaactcatgagtgtaaagcgtgcaggacagtacctggtgtacagtagacactctaaatggtagctattcttgctgttcagcttctaggagtatatcccttccgttcagcatctgttgagcaccttctacaaagcaagcactgttctaggggttggaagacaccaagtctgttcttaaggtgctctttaagtgggaggggattgagatggagagtgggaagtggtggctggcccagagatgtaggcacaagctaagggctgtcatagaggtatgtacagagggctgggggagctcagaaaaaggcaccaaatggtgccttcacttctcactgtttattacagaactaaatagcattttaagtttgatcctctgactttatgtcaggaccggcaataatgaaaccatatcccagctgttgctgcctcatcagacttttatttcaaaccaaggcatcatcctcactagttttaccttctgtggggtgcttcccctatccccatgccttttgttggttgtgtacacagctggacaaatgatggtcagtacctggcgctggggatgttcaatgggatcatcagca

SEQ ID NO: 12534 - DNA, 562 bp, Homo sapiens
tttcatccagtttcccccagtggatccatcttatgtaactattatacaatatcaagaccaggaaactgagactggcacaaagtgtgtatattatatagttctgttgttttatcgcatgtgtagattgccatcagcgtgacacagaactaagccatcaccatgcagttaccacttagtgtcatatctactcaccttacctccagttatctccaaaccctggtaaccacaaatctgttctccatttctataattttgtcattcaagaatgttatataaatggaatcgtacagtatatgaccttttgagattatgttttttcattcagcataaaatcctggagatccatctaagttgttgtatgtttcaattatttgttcctttttattgctgggtagtattccaaccaatccatcttcttttatattattgtgcattgaagggttgtggtctcctgaacagaagtctgtctccaaacacaaatcaagcagcaagatcatctgctgcagctggacaaatgatggtcagtacctggcgctggggatgttcaatgggatcatcagca

SEQ ID NO: 12535 - DNA, 13756 bp, Homo sapiens; identical to SEQ ID NO: 12494

SEQ ID NO: 12536 - DNA, 296 bp, Homo sapiens
tataaatgacatcgcatttaagcctgatggaactcaactgattttggctgccggaagcagattactggtttatgacacctctgatggcaccttacttcagcccctcaagggacacaaagacactgtgtactgtgtggcatatgcgaaggatggcacaatgatgctatacaatgtgtctcctacaatcctattactcatcaactggcatcttgttcctccagtgactttgggttgtggtctcctgaacagaagtctgtctccaaacacaaatcaagcagcaagatcatctgctgcag

SEQ ID NO: 12537 - DNA, 962 bp, Homo sapiens
tataaatgacatcgcatttaagcctgatggaactcaactgattttggctgccggaagcagattactggtttatgacacctctgatggcaccttacttcagcccctcaagggacacaaagacactgtgtactgtgtggcatatgcgaaggatgggttgtggtctcctgaacagaagtctgtctccaaacacaaatcaagcagcaagatcatctgctgcagagaggaacgtaatgacatcctggctgtggctgactggggacagaaagtttccttctaccagctgagtggaaaacagattggaaaggatcgggcactgaactttgacccctgctgcatcagctactttactaaaggcgagtacattttgctggggggttcagacaagcaagtatctcttttcaccaaggatggagtgcggcttgggactgttggggagcagaactcctgggtgtggacgtgtcaagcgaaaccggattccaactatgtggtggtcggctgccaggacggcaccatttccttctaccagcttattttcagcacagtccatgggctttacaaggaccgctatgcctacagggatagcatgactgacgtcattgtgcagcacctgatcactgagcagaaagttcggattaaatgcaaagagcttgtcaagaagattgccatctacagaaatcgattggctatccaactgccagagaaaatcctcatctatgagttgtattcagaggacttatcagacatgcattaccgggtaaaggagaagattatcaagaagtttgagtgcaacctcctggtggtgtgtgccaatcacatcatcctgtgccaggagaaacggctgcagtgcctgtccttcagcggagtgaaggagcgggagtggcagatggagtctctcattcgttacatcaaggtgatcggtggccctcctggaagagaaggcctcttagtggggctgaagaatg

SEQ ID NO: 12538 - DNA, 16523 bp, Homo sapiens
aaaacgaaagcactccgtgctggaagtaggaggagagtcaggactcccaggacagagagtgcacaaactacccagcacagccccctccgccccctctggaggctgaagagggattccagcccctgccacccacagacacgggctgactggggtgtctgccccccttgggggggggcagcacagggcctcaggcctgggtgccacctggcacctagaagatgcctgtgccctggttcttgctgtccttggcactgggccgaagcccagtggtcctttctctggagaggcttgtggggcctcaggacgctacccactgctctccggtgagtctggaaccctggggagacgaggaaaggctcagggttcagtttttggctcagcaaagccttagcctggctcctgtcactgctgccactgccagaactgccctgtctggtctgtctggtgctgatggtagaagagaagaacggggaaggggcaagagctgggtctgtctttctctgggagggtctgggaatacggagccccagaaaaaggtaggtggaggtcttaggcagagaacagtgcctagatggtgggggcacaaattctgactctcctttctttccttcccagggcctctcctgccgcctctggggtaagtatccctacttttaaaaagaatttcccaggttggccgaagggagcagagctgtcccaggcccatgccctccatgcccacctcagcctaggacagccaagttctttggctctctgggtatgtcaggtgccaccaaattctgggcttggaacagcttcagctcccacccgctcctccacacacagacagtgacatactctgcctgcctggggacatcgtgcctgctccgggccccgtgctggcgcctacgcacctgcagacagagctggtgctgaggtgccagaaggagaccgactgtgacctctgtctgcgtgtggctgtccacttggccgtgcatggtgagcaagtcatcctgtgacagtgcatgtgtacacgtgagtgtgtctggggtgggcatgagggccaggggatctctcaagcagtgctaggcatcctcagtgttctcctggaggacaccagcagaaggacccccaggccagtgtggtctccccagcccctgcttcccagcactgggctttccagaaggaagccaacgccaaagccagccagcccagagcagggggcctcacccagggccttgctcttgggtccttctagggcactgggaagagcctgaagatgaggaaaagtttggaggagcagctgactcaggggtggaggagcctaggaatggtgaggagaacctggctggcccaactgccccatgccaaggcctggcctgccgctcctgggcctgactgacccctgccctgttgcccacagcctctctccaggcccaagtcgtgctctccttccaggcctaccctactgcccgctgcgtcctgctggaggtgcaagtgcctgctgcccttgtgcagtttggtcagtctgtggtatgcaaaataataataatcaccttctaaacctaaaatctataaaactttttcacatgcattatctctttgaggattacaaaagaattaaatttattgaaacccttcagtaccaggcattacagccagtgttttacaggtatcaacttatttaattctcacaacagccatgtgaggtgggactattcttttgattctgatcagcgctgtgggcaagtcccttcagcctgttatgcctcagcttttatgtctgtaaaatggggatgagaatagttctacttcatatgcttgactgcgagaaatcaccaagcgtttttcagggtgcttctactattttcccctcctaccagcagtgtatgggagtcctagttgcttcccatctttgccaacacttgatggtgtaattttattttatttttaaattaaatatatttgaattttaaatatatgggaccctccatgaatttgcatgtcatcctcaggcacgggccttgctaatcttttctgtattgttccagttgtagtatatgtggtgccaaaacaagcataagtgttgtaattgtcataatttttctgcatatgtagtggtttgccattgtggttttaatttgtatcttccaatgactgatgaagttgagcacttttttcacatgcttattggctatttgtgtaacttccttgtgaaatatctcttaaagtttttttgtttttgtttttgtttttgtttttgccacataaaaaaacaatagttctggccgggcacagtggttcacacctgtaatcccagcactttgggaggctgaggcgggcagatcacgaagtcaggagattgagaccatcctggctaacactgtgaaaccctgcctccactaaaaaaatacaaaaaattagccaggcatggtggtgggcgcctgtagacccagctactcgggaggcagaggcaggagaatggcgtgaacccgggaggtggagcttgcagtgagccgagatcgcgccactgcactccagcctgggcgacagagcgagattccgtctcaaaaaaaaagaatagtcccacctcacatgactgttgtgagaattaaattaagttggtacctgtaaaacactggatgtaatgcctggcactgaataatttcaataaatttaattcttttgtaatcctcaaaactacctgatgaggcattattagtatcctcattttccagatagataaaatgaggcttggagaggggaggtctgtgggctggatgcacttctctgtactcttggaccaaagaaagagtcctaccatacataccatggtatacttaccatggtgtaagtaccatggtgcagggtgttggggcttctccctgccttaggaggccacatgtacctggaaggtctatttccactggggtcaaatcactcaaaccctttgactttccctccaacctccagcccccagccaatatcctatctggagaattgtagactgggagaacatctgcttggtccatgtcacaagcagttgtaaggaacactgaggcactgggttgagtgtgagaaccacttctgtggggaggggtgtgccatattgtgttggggtgtctcatctccttagctttggccaggtgatctagcacagcagggtgggtgcagggatttaaatgtctagggccttttcccgccctggtgacactcttactgaggacatttgctttagaattgaggccccttgaaagaaaggtgaatagtagatttcaggctatacagtataaatacagtcattagttgggggaggagggcagtgagcagagtggtccctgcagatgatcccacagcccttggcctggattctgagccctgcaccgccagccttcctcacccctctcctcacagggctctgtggtatatgactgcttcgaggctgccctagggagtgaggtacgaatctggtcctatactcagcccaggtacgagaaggaactcaaccacacacagcagctgcctggtaagtggacccccaagtcctggccccctagcctctgtcccctctggccattccccctcctgatttcaccctcttctagctccatccactctccggcaggggtctgagctgctatcctccccagagtcagtccctcggaccttctctctctgggtgatatggctttccagcccctggggaaggttctttgagcattggatagatgtgggtggtatgtaggggatggggagccattcctaatgcccccctgggagccaaattgcccccacttctttccttggcccccagccccactggaggctcttctgtgatctctcctcagactgcagggggctcgaagtctggaacagcatcccgagctgctggggtaggggctagggccagtgggccgggggtagggaggggcagggtctggagtataagaaacccttggagtccacttcagatatgggctaccacatctcagaagctcacagaacatattcattcattcattcattcattcatttgttcataacacattaattgcagtatctgtgctaagcactggaaatagaaagatgaatcttgggtcaggctcagtggctcatgcctgtaatcccagaactttgggaggccgaggtagaaggatcacttgagctcaaaagttcaagacgagcctgggcaacatggcaaatccccgtctctaccaaaaatacaaaaattaacaggacatggtggtgtgcatttgtggtcccagctactcaggaggctgaggcaggagaatcacttgagcctgggaggcaggggctacagtaagctgagactgcaccattgcacaccagcctgggtgacagagcaagactccgtctcaaaaaacaaaacaaaacaaaacaaaaacaaaaaacttgaaataaaagctaagaaagtcaagggtctaacttttttcccacgtactatttggattttgttttcgttttgtattttcttttttattgtgtataacatacatacataaaagtatgtaaagggtactgattttcttttttttttttttttttgagacagagtctcgctctgtcgctcaggctggagtgcagtggtgcaatctcggctcactgcaagctccgcctcccaggttcacgccattctcctgcctcagcctcccgagtagctgggactacaggcacccgccaccacgcctggctaatttttttttttttttagtagagacagggtttcaccgtgttagccaggatggtcttgatctcctgaccttgtgatccgcctgcctcagcctcccaaagtgctgggattacaggcgtgagccaccacgcccagccaaagggtactgatttccatgtccagttcttttttttttttttttttttggcggaatcttgctctgtcgcctaggctggactgcagtggtgtgatctcagctcactgcaacctctgccttctgggttcaagcgattctcctgcctcagcctcccaagcagctgggattacagacgtgcaccaccacgcacagctaatttttgtatttttagtagacatggagtttcaccatgctggccaggctggtcttgaactcctgacctcgtgatcctcccacctcggcctcccaaagtgctgggattacaggcatgagccgccacgtccggccaatttgtttttatatatgtatacacttgcataactagcacccagatcaatacataaatactgtgaatacatcacatactgtgatgttttctgaactactaaatgttttcaacttcattttctttttgccttcttaaaattaaagttggcctgcctctttggcaactcattaaagactattcaacaccagagttttgaaaacacagatgtgtatatcatggatttcatttcttccttcattaagtagacattgattcatttattcaacagatatttattaatttctgtgtaccaggcaaatccctggacactggaaatattaataaatcaataaatgaagatgacaaaaaacccgaccccacggagctggtgtcagggtcagggtgggggtgaggaaggacacaacaaacacatggagatgtgaagaatgcagtaagttagacagtgattagcactaaggagaacatttgtggaagggctggggaaggttgggagttgtagaggtcagggatggtctcattctggtgagcagagacctgaaagaggtgagggaggagccatatatttgagggaagagagaatagccagcaaaaagggcctggggtgggagtatgtcaggggtgtttaagaaatagtaaggagggggccgggcgcggtggctcacgcctgtaatcccagcactttgggaggccgaggctggcggatcacgaggtcaggagatcgagaccatcctggctaacacggtgaaaccccatctctacaaaaaatacaaaaaaatcagctgggcatggtggcaggcgcctgtagtcccagctactcgggagcctgaggcaggagaatggcttgaaccccaggaggcagagcttgcagtgagccgagatcacaccactgcactccagcctgggcgacagagccagactccatctcaaaaaaaaaaaaaggaaaaaaaaaagagagagaaacagtaaggaggtccttaataactctgcagcagagttattaaggacacaaatgccataggctgtgcgcgatggctcacgtctgcaatcccagcactttggggaagctgaggcaggaggattgcttgaggttaggagctcaagaccagcctggccaacatgagcgaaatcccatctctactaaaaatacaaaaactagccgggggtggtgacacacgcctgtaatcccagctactcgggtggctgaggcaagagaatcgcttgaacccaggaggtggaggttgcagtgagctatcgtgccaatgcactccagcctgggcaacagagcaagactccctctcaaaaaaaaaaaaggacacaagtatcaagaggtaaggtcagaaaggtcacagttctgaacagaggaaaatgacttgttttaaagaggttacaagatctttctgcagagggagaagcagggagaatagctcttctccgaccacacactagggtctccacgggcttggctttgggcagctgctaggagcaaagtctggtctgaaatgatgacacacgctctgccctccgagagcctcccagtctagggggtttgaaggaaactccaaagggtcagtcggggatgcagaagaggtgaggaagtctaagctgcgctctctttgcctctcccaccagccctgccctggctcaacgtgtcagcagatggtgacaacgtgcatctggttctgaatgtctctgaggagcagcacttcggcctctccctgtactggaatcaggtccagggccccccaaaaccccggtggcacaaaaacctggtgaggcctcccccttcccaagtccattcccactgtaggccgatgcctgtgcaaaggacgcagtgccatatcagagaggatccttgaagaggactcaccccaagcaagggaaaattggtgggggaacttctgccttcctggtttccttgactttggcctcctcctcttcctccttatcttctccaacctccttcctttatttgttccacagactggaccgcagatcattaccttgaaccacacagacctggttccctgcctctgtattcaggtaggagcagagtctagctgggtgccagaagaggagtgggaagatgatgatgggggtgatccctgccttcctggtctcaccattcttcaaacccttcattgaggtggagactgtggctccctggggtggctggccctcccttgacccttgctgtcctatgccttctgtctattacattccctgaatgctctccctgatcctccacagaactcctgcttattcttcatggccccattcaaatgtcaccttctccttgaaacctttccctactcctccagttctgtctttgtgttcccctggcgggcagagcatgtgctacgaacttggactggtttgaatcttggctcttgccatttgctagctgtgtaaccttgggcaagtcacttcacctctgtgagcctgtttctcatctgtaaaatgggaataataatagtaacagcctcatggggctgttataagaatgtgtgccacacccaggcttaaatatgctggctctttcctcttcctctgtacatttatttatttttttagacaaggtctcactctgttgcccaggctggagtgcagtggcacaatcatggcacactgcagcctcagccccatgggctcaagtgatcctcctgtctcagcctcccaagtagctggaactactggtgagcactaccatactcagctagtttttttttgttttgtgtagagacggggtcttgctatgttacccaggctgttctgaattcctgggcttatgctatcctcccacctcagcctcccaccaagtgctgggattataagcatgagccactgtggcttgccctgattgcactttttttttttttttttttaagacagagtctttctctgtcgcccaggctggagcaccgtggcgtgatctcggctcactgcaagctgcttctcctgggttcacgccattctcctgcctcagcctcgctgagtagctgggactacaggtgcctgcaaccacgcccagctaattttttgtattttcagtaaagacagggtttcaccgtgttagccaggatggtctcgatctcctgaccttatgatccacaagcctcgtcctcccaaagtgctgggattacaggcatgacccactgtgcccagccgctgattgcacatttaattggtcatcaggtctcatccatcttacctctgacattaatgtctctcattttctttccccctcctctccatctcagtccagcttagggctctatcatctgttttctagactgtttcaacacctccaagctcccctcccttcccatcactttcctggcattctgggcccatattctgcccccaacggtgccttttcactctattttccccatgattccccttcatgagaacattgttacatccagtggagctacttaccaagatacagctagctccctgccttttctcaggtggttcccattacctcaaatgccctcacctccttcccaaagcttttccccaaccacccggcctctcctagctccaaatccccttgcacttctatctttccttgtccatttatcacttcatttcttttattttcttaaattttttttttttttttagagacagcattttgctctgtcacccatggtagagtgcagtggcatgaacacgtctcattgcagccccaagctcccaggttcaagggatcctcctgcctcagcctctgcagctgggactgcaggcatgcgccaccatgcctggctaattgtttccttttttttttttttttttttttaatggagtttcactcttttgcccaggatggagtgcagtggcgtgatctcggctcactgcaacttccgcctcccaggttcaagccattctcctgcctcagcctcccaagtagctgagattacaggcacacaccaccatgcccagctaatttttgtatttttagtagagacagggtttcaccatgttggtcaggctggtcccaaattcctgacctcgtgatccacccgcctcggccgcccaaagtgctgggattacaggcgtgagccactgtgcccagcctgttttcattttttaatgttttgtggcgatgggccaccacacccagctcaatcacttactttcttatttgggcatctaatttcttcttgtacacaacagatgctcaataaatattatgaaatgaatgagtgttttactaatttatataaatattttatccttactacaagtgtgagtttgtgatttccttgaaggcaagcaaatcatatctaattcaaatgtaatagctttgcaagagccttgcacatagcgcctacttgttttttgtttttttgtgtttttgttttttttttgtttttttgtcttttttgagacagagtctcgctctattggcaggctggagtacagtggcgtgatctcggctcactgcaatctctgcctcctggattcaagcaattcttctgcctcagcctcccaagtagctgggactacaagtgcatgccaccatgcccggctaatttttgtattttcagtagagacggggtttcagcatgttggccagatggtctcgatctcttgacctcgtgatccgcccaccttggcctcccaaagtgctgggattacaggggtgagccaccgcgcccagccttgttttgtttttaaacaaggtaacagtatgaggtcctcactgttgaatgagtgaataaatgttactgcctaacacagccataggacacagcagatgttcatgagatgtatgctgtgatttaaatggcttcattgccaaacacagtgcctgccacatagtcggtgttcctaactaaaggcttgatggataaattaatgtattacctctagtgcttagcatagagctatgcacataataggcactcttgaaatgtctgttgaaagaataaatgaatgtgtccttagaacttagcacattccccaacacatagcaggtgcttacacaagtgattgtggaatgaattaaaattaattatccaccaggcacagtggctcacacctgtaatcccagcactttgggaggccaaggtgggtggatcacgaggtcaggagtttgagaccagcctggcctaacatagtgaaacccagtctctactaaaagtacaaaaattagccaggcatggtgatgtgcgcctgtagtccctgctacttgggaagctgaggcaggagaatcacttgaacccaggaggcggaggttgtggtgagctgagatcacaccactgcactccagcctgggcaacagagtgagattccatctcaaaaaataaaaaaataataaaaatttaattatccaaggtctcttgtgcttgccatactgctaagacacaatggtaggcactcattaaaagtctgttgaatgggccaggcgcggtggctcacgcttgtaatcccaacactttgggaggctgagacgggtggatcacttgaggtcaggagttcgagaccagcctgatcaatgtggtgaaaccccatctctactaaaaatacaaaaattaaccagttagccggccgttgtggcatgttcctgtaatcgcagctcctcaggagactgagatgggagaatcgcttgaacctgggaggtggaggttgtagtgagccaagattgcaccactgcactccagcctgggcgacagagcgagactctatctcaaaaaaaaaaaaaagtttgttaatgaagatgttgccagtgcccagcattatgtttgctggaagaatagatgtgagcacctccaggttttgtaaaaggcaggaagacccagcaagtgtttgtgaaatacctgctgaatgagtgcatccccactgtccagcagagggccaggcacatgcccatggaggggacctgagcagacccccatttcctttccaggtgtggcctctggaacctgactccgttaggacgaacatctgccccttcagggagggtgagccgaccggcctggggctggggttggggtgttgcgagcgatgggtacctggcctgcggtgactgtgccctttccttgcagacccccgcgcacaccagaacctctggcaagccgcccgactgcaactgctgaccctgcagagctggctgctggacgcaccgtgctcgctgcccgcagaagcggcactgtgctggcgggctccgggtggggacccctgccagccactggtcccaccgctttcctgggagaacgtcactgtggacgtaagtgaagcagagggcacctcccgtggtgaggggagagtggggaaccgggggtccccttttgtgatcccacccattcctctctttccacagaaggttctcgagttcccattgctgaaaggccaccctaacctctgtgttcaggtcagaaaggggtgcatagtgctgggctggaggctggacctgggcagaccccccagccaagggggtcttagttcttgggccgctaaagcatagtggttgccagcttcctctatgggagttccactgcctactttagtagtgcgcgggaccctgggcaactcacttcacctctctgaacgtcagtttcctcatctgtttaatgcagatgataatacagtaactacctcatggagtggttgtgacaatgaaataagagaagtgcttccccttaggaatcggtacagactaaatgctccataaatgtagccacttttattattgctatccttattctatttccatacctgtagaatgggttgctctacagtttcaaagggtgattataagaacattcactcatccggccaggcgcggtggctcacgcctgtaatcccagcactttgggaggccgaggcgggcagatcacgaggtcaggacatcaagaccatcctggctaacatggtgaaaccccatctctactaaaaatacaaaaaattagccggtcgtggtggtgggcacctgtagtcccagctactaggaaggctggggcaggagaatggcgtgaacctgggaggctgagcttgcagtgagctgagagggcgccactgcactccagcctgggtgacagagtgagactgggcgacagagtgaaactccgtctcaaaaaaaaaaaaaattcactcattcaagattttttgagcagcacaagtcactgttttaggcacttgtgatagaccctaacatctctaccctcatagaacttatattgtaatggagaaaggcaggcaacagacattgtaaataaatcatatagtatcttaaaattgcatacaaataccatgggaaagggataaggtgggactggggttgcaatttttagcagggtggtcatgtgagaaaggaatctctttgagaaggttagatgagaggggaaccatgctccgtaagacataaaaacagctttagggtcagaagacgctttatacagatgatctcacaaggctggggcagagaaagatgtagtgattcctaatcacccagccttgaatccacatctgcctcaggtcagattgagtgcagattcccaacccaacaggccttctgttgcctgccccattctggtctttctgcctttggcttttgcttttcttagtggccctaaccatggtctcttcccagcaggtgaacagctcggagaagctgcagctgcaggagtgcttgtgggctggtgagttgggcctgggggcagctggggcagggccacctcctaggggtgaaggtcagggcatgggaggcaggcaagtggccaatcccagcaaggatgggtcttggtcagagtggcctctcaccccttccagactccctggggcctctcaaagacgatgtgctactgttggagacacgaggcccccaggacaacagatccctctgtgccttggaacccagtggctgtacttcactacccagcaaagcctccacggttaggactgggcgaccctcctccacagatctctccaaatgcatctcacatctggcctcaaattttcactccatccaccctgtgccggtctctgggaacatggggggtgactcagaccagggccatattcagcggcatcaccaaagtctcccagtcccctctacctcattctacccagctgtagcctggtaggtgctgccctaagggtgctacctccaggtaacagtgcccccatcctttggcttggcagagggcagctcgccttggagagtacttactacaagacctgcagtcaggccagtgtctgcaggtgagctggtggaagaagggccccacctcaatgcctaggggcaacaggcctaaaactagcactcacctactgtctatttaggcttattttatgttcagccctgggaaagttaagagtagaagaagcacagttcctatccccaaggagcacactgttggctagacacccataaacagataaccacacctacaggtgctaagttttgggttccagggagagcttccgggaagaatttcttcctataagccagatttggtatggaagaagtcataccctagtcagtgggcacagcacaaaggcagagcagctgcaggaaccttagccgggagatatgcatagttgatgctgggaatttggagatcaggccaccagagcttggtgaatattggaacacctggctggtgccctggatttggttctgtttgtatcttacagctatgggacgatgacttgggagcgctatgggcctgccccatggacaaatgtgagtattgtaagaactgcctttcctttctgtaccaggagtggggatcttgacagggaccactcttgggcacagcacatgcaatggccttgtccttccctgagatcagataaacagagggtcattccttcattcactcaaaaaatgatgagagcttgcagggatcgcaggaacaccaaaaatataaatccttgcccccgccccacccctagaagactagcaagacatgagccagtcacttacatttaaagtgggagctactgaagcaccaccaagtgttcagtgctgtaaatgcatacaatgtggacctgacctgggtggggtgaggggtgaggggctcagggggaaggttccagcaaaactctgaagactgagctaggggaagggggtagagatacagggtcttggacaggcaggtttctgtcatgagataaagatgcaggagacatgtaggggatttggatcttatgttgagagcagcaggagctacgatcaaatttttatatatttcacacacacacacacacatatatatatatatatatatatatatatatatacttatttttttatttatttttgaggcagagtctcactctgttgcccaggctggagtgcaatggcgcgatctcggctaactgcaacctctgcctcccgggttcaagcaattctctacctcagcctcccgggtagctgggattaataggcgcctgccaccatgccctgctaatttttgtatttttagtagagatggggtttcaccatcttggccaggctggtcttgaactcctgacctcgtgatccgcccgcgtcggcctcccaaagtgctgggattatagtcgtgagtcaccgcacctggcccaaatttatatttttaaaagatctctgaggctgtcatgaatcaattcaaggcaaatcaattggaggtaaaaaaaaaaaaaaaaagacagggcagggacaccaggtagttgcagacacccaggacagcaagatcaagggcccagcaaccctagcttaggggagaaaaacagctgacattttagcacttaagatgctcggcattgtgttaagtatgtattaacacattgtgttaagctttatatgtattaatatatttagtcctcacaccaaccctatgacacaggtacaactttacagaggagaaaactgaggcagagggtgacattacttattcaaagacccctaaacagatggagctatattcatccactggctctgacactgtgctgtggactctgggcaaatcatttcttcgttttttgttttgttttgttttgttttgagaggagtctcaccctgtcgcccaggctggagtgcaatggcgcgatctcggctcactgcaacctctgcctcccgagttcaagcgattctcttgcctcagcctcccgagtagctgggattacaggcgtgtgccaccacgcccggctaattttttgtatttttagtagagacggggtttcaccgtgttagccaggatggtcttgatgtcctgacctcgtgatctgcccgcctcggcctcccgaagtgctgggattatataaaggcatgagccaccgcacccggcccaattcatttctgttaagtctcagtttttcttctctgtggagggtaagtttctaactcttcttctctgggtctcccagacatccacaagcgctgggccctcgtgtggctggcctgcctactctttgccgctgcgctttccctcatcctccttctcaaaaaggatcacgcgaaaggtgagcgcttcccggctccccattcccctgggggaggaccagagtggctgtgggagttctccgagggaaagcggcggccgagctcactggctgcctccgcccctctcccctaacagggtggctgaggctcttgaaacaggacgtccgctcggggggtgagtgggagcaagcgctgggcggagggccgcccccggggagccaggcctgtgccagctcacctcttccctccccatctgttttctccggcagcggccgccaggggccgcgcggctctgctcctctactcagccgatgactcgggtttcgagcgcctggtgggcgccctggcgtcggccctgtgccagctgccgctgcgcgtggccgtagacctgtggagccgtcgtgaactgagcgcgcaggggcccgtggcttggtttcacgcgcagcggcgccagaccctgcaggagggcggcgtggtggtcttgctcttctctcccggtgcggtggcgctgtgcagcgagtggctacaggatggggtgtccgggcccggggcgcacggcccgcacgacgccttccgcgcctcgctcagctgcgtgctgcccgacttcttgcagggccgggcgcccggcagctacgtgggggcctgcttcgacaggctgctccacccggacgccgtacccgcccttttccgcaccgtgcccgtcttcacactgccctcccaactgccagacttcctgggggccctgcagcagcctcgcgccccgcgttccgggcggctccaagagagagcggagcaagtgtcccgggcccttcagccagccctggatagctacttccatcccccggggactcccgcgccgggacgcggggtgggaccaggcgcgggacctggggcgggggacgggacttaaataaaggcagacgctgtttttctaccc

SEQ ID NO: 12539 - DNA, 2621 bp, Homo sapiens
aaaacgaaagcactccgtgctggaagtaggaggagagtcaggactcccaggacagagagtgcacaaactacccagcacagccccctccgccccctctggaggctgaagagggattccagcccctgccacccacagacacgggctgactggggtgtctgccccccttgggggggggcagcacagggcctcaggcctgggtgccacctggcacctagaagatgcctgtgccctggttcttgctgtccttggcactgggccgaagcccagtggtcctttctctggagaggcttgtggggcctcaggacgctacccactgctctccggtgagtctggaaccctggggagacgaggaaaggctcagggttcagtttttggctcagcaaagccttagcctggctcctgtcactgctgccactgccagaactgccctgtctggtctgtctggtgctgatggtagaagagaagaacggggaaggggcaagagctgggtctgtctttctctgggagggtctgggaatacggagccccagaaaaagggcctctcctgccgcctctgggacagtgacatactctgcctgcctggggacatcgtgcctgctccgggccccgtgctggcgcctacgcacctgcagacagagctggtgctgaggtgccagaaggagaccgactgtgacctctgtctgcgtgtggctgtccacttggccgtgcatgggcactgggaagagcctgaagatgaggaaaagtttggaggagcagctgactcaggggtggaggagcctaggaatgcctctctccaggcccaagtcgtgctctccttccaggcctaccctactgcccgctgcgtcctgctggaggtgcaagtgcctgctgcccttgtgcagtttggtcagtctgtgggctctgtggtatatgactgcttcgaggctgccctagggagtgaggtacgaatctggtcctatactcagcccaggtacgagaaggaactcaaccacacacagcagctgcctgactgcagggggctcgaagtctggaacagcatcccgagctgctgggccctgccctggctcaacgtgtcagcagatggtgacaacgtgcatctggttctgaatgtctctgaggagcagcacttcggcctctccctgtactggaatcaggtccagggccccccaaaaccccggtggcacaaaaacctgactggaccgcagatcattaccttgaaccacacagacctggttccctgcctctgtattcaggtgtggcctctggaacctgactccgttaggacgaacatctgccccttcagggaggacccccgcgcacaccagaacctctggcaagccgcccgactgcaactgctgaccctgcagagctggctgctggacgcaccgtgctcgctgcccgcagaagcggcactgtgctggcgggctccgggtggggacccctgccagccactggtcccaccgctttcctgggagaacgtcactgtggacaaggttctcgagttcccattgctgaaaggccaccctaacctctgtgttcaggtgaacagctcggagaagctgcagctgcaggagtgcttgtgggctgactccctggggcctctcaaagacgatgtgctactgttggagacacgaggcccccaggacaacagatccctctgtgccttggaacccagtggctgtacttcactacccagcaaagcctccacgagggcagctcgccttggagagtacttactacaagacctgcagtcaggccagtgtctgcagctatgggacgatgacttgggagcgctatgggcctgccccatggacaaatacatccacaagcgctgggccctcgtgtggctggcctgcctactctttgccgctgcgctttccctcatcctccttctcaaaaaggatcacgcgaaagggtggctgaggctcttgaaacaggacgtccgctcgggggcggccgccaggggccgcgcggctctgctcctctactcagccgatgactcgggtttcgagcgcctggtgggcgccctggcgtcggccctgtgccagctgccgctgcgcgtggccgtagacctgtggagccgtcgtgaactgagcgcgcaggggcccgtggcttggtttcacgcgcagcggcgccagaccctgcaggagggcggcgtggtggtcttgctcttctctcccggtgcggtggcgctgtgcagcgagtggctacaggatggggtgtccgggcccggggcgcacggcccgcacgacgccttccgcgcctcgctcagctgcgtgctgcccgacttcttgcagggccgggcgcccggcagctacgtgggggcctgcttcgacaggctgctccacccggacgccgtacccgcccttttccgcaccgtgcccgtcttcacactgccctcccaactgccagacttcctgggggccctgcagcagcctcgcgccccgcgttccgggcggctccaagagagagcggagcaagtgtcccgggcccttcagccagccctggatagctacttccatcccccggggactcccgcgccgggacgcggggtgggaccaggcgcgggacctggggcgggggacgggacttaaataaaggcagacgctgtttttctaccc

SEQ ID NO: 12540 - DNA, 16548 bp, Homo sapiens
acagccagcagcctgccgggagccaaaacgaaagcactccgtgctggaagtaggaggagagtcaggactcccaggacagagagtgcacaaactacccagcacagccccctccgccccctctggaggctgaagagggattccagcccctgccacccacagacacgggctgactggggtgtctgccccccttgggggggggcagcacagggcctcaggcctgggtgccacctggcacctagaagatgcctgtgccctggttcttgctgtccttggcactgggccgaagcccagtggtcctttctctggagaggcttgtggggcctcaggacgctacccactgctctccggtgagtctggaaccctggggagacgaggaaaggctcagggttcagtttttggctcagcaaagccttagcctggctcctgtcactgctgccactgccagaactgccctgtctggtctgtctggtgctgatggtagaagagaagaacggggaaggggcaagagctgggtctgtctttctctgggagggtctgggaatacggagccccagaaaaaggtaggtggaggtcttaggcagagaacagtgcctagatggtgggggcacaaattctgactctcctttctttccttcccagggcctctcctgccgcctctggggtaagtatccctacttttaaaaagaatttcccaggttggccgaagggagcagagctgtcccaggcccatgccctccatgcccacctcagcctaggacagccaagttctttggctctctgggtatgtcaggtgccaccaaattctgggcttggaacagcttcagctcccacccgctcctccacacacagacagtgacatactctgcctgcctggggacatcgtgcctgctccgggccccgtgctggcgcctacgcacctgcagacagagctggtgctgaggtgccagaaggagaccgactgtgacctctgtctgcgtgtggctgtccacttggccgtgcatggtgagcaagtcatcctgtgacagtgcatgtgtacacgtgagtgtgtctggggtgggcatgagggccaggggatctctcaagcagtgctaggcatcctcagtgttctcctggaggacaccagcagaaggacccccaggccagtgtggtctccccagcccctgcttcccagcactgggctttccagaaggaagccaacgccaaagccagccagcccagagcagggggcctcacccagggccttgctcttgggtccttctagggcactgggaagagcctgaagatgaggaaaagtttggaggagcagctgactcaggggtggaggagcctaggaatggtgaggagaacctggctggcccaactgccccatgccaaggcctggcctgccgctcctgggcctgactgacccctgccctgttgcccacagcctctctccaggcccaagtcgtgctctccttccaggcctaccctactgcccgctgcgtcctgctggaggtgcaagtgcctgctgcccttgtgcagtttggtcagtctgtggtatgcaaaataataataatcaccttctaaacctaaaatctataaaactttttcacatgcattatctctttgaggattacaaaagaattaaatttattgaaacccttcagtaccaggcattacagccagtgttttacaggtatcaacttatttaattctcacaacagccatgtgaggtgggactattcttttgattctgatcagcgctgtgggcaagtcccttcagcctgttatgcctcagcttttatgtctgtaaaatggggatgagaatagttctacttcatatgcttgactgcgagaaatcaccaagcgtttttcagggtgcttctactattttcccctcctaccagcagtgtatgggagtcctagttgcttcccatctttgccaacacttgatggtgtaattttattttatttttaaattaaatatatttgaattttaaatatatgggaccctccatgaatttgcatgtcatcctcaggcacgggccttgctaatcttttctgtattgttccagttgtagtatatgtggtgccaaaacaagcataagtgttgtaattgtcataatttttctgcatatgtagtggtttgccattgtggttttaatttgtatcttccaatgactgatgaagttgagcacttttttcacatgcttattggctatttgtgtaacttccttgtgaaatatctcttaaagtttttttgtttttgtttttgtttttgtttttgccacataaaaaaacaatagttctggccgggcacagtggttcacacctgtaatcccagcactttgggaggctgaggcgggcagatcacgaagtcaggagattgagaccatcctggctaacactgtgaaaccctgcctccactaaaaaaatacaaaaaattagccaggcatggtggtgggcgcctgtagacccagctactcgggaggcagaggcaggagaatggcgtgaacccgggaggtggagcttgcagtgagccgagatcgcgccactgcactccagcctgggcgacagagcgagattccgtctcaaaaaaaaagaatagtcccacctcacatgactgttgtgagaattaaattaagttggtacctgtaaaacactggatgtaatgcctggcactgaataatttcaataaatttaattcttttgtaatcctcaaaactacctgatgaggcattattagtatcctcattttccagatagataaaatgaggcttggagaggggaggtctgtgggctggatgcacttctctgtactcttggaccaaagaaagagtcctaccatacataccatggtatacttaccatggtgtaagtaccatggtgcagggtgttggggcttctccctgccttaggaggccacatgtacctggaaggtctatttccactggggtcaaatcactcaaaccctttgactttccctccaacctccagcccccagccaatatcctatctggagaattgtagactgggagaacatctgcttggtccatgtcacaagcagttgtaaggaacactgaggcactgggttgagtgtgagaaccacttctgtggggaggggtgtgccatattgtgttggggtgtctcatctccttagctttggccaggtgatctagcacagcagggtgggtgcagggatttaaatgtctagggccttttcccgccctggtgacactcttactgaggacatttgctttagaattgaggccccttgaaagaaaggtgaatagtagatttcaggctatacagtataaatacagtcattagttgggggaggagggcagtgagcagagtggtccctgcagatgatcccacagcccttggcctggattctgagccctgcaccgccagccttcctcacccctctcctcacagggctctgtggtatatgactgcttcgaggctgccctagggagtgaggtacgaatctggtcctatactcagcccaggtacgagaaggaactcaaccacacacagcagctgcctggtaagtggacccccaagtcctggccccctagcctctgtcccctctggccattccccctcctgatttcaccctcttctagctccatccactctccggcaggggtctgagctgctatcctccccagagtcagtccctcggaccttctctctctgggtgatatggctttccagcccctggggaaggttctttgagcattggatagatgtgggtggtatgtaggggatggggagccattcctaatgcccccctgggagccaaattgcccccacttctttccttggcccccagccccactggaggctcttctgtgatctctcctcagactgcagggggctcgaagtctggaacagcatcccgagctgctggggtaggggctagggccagtgggccgggggtagggaggggcagggtctggagtataagaaacccttggagtccacttcagatatgggctaccacatctcagaagctcacagaacatattcattcattcattcattcattcatttgttcataacacattaattgcagtatctgtgctaagcactggaaatagaaagatgaatcttgggtcaggctcagtggctcatgcctgtaatcccagaactttgggaggccgaggtagaaggatcacttgagctcaaaagttcaagacgagcctgggcaacatggcaaatccccgtctctaccaaaaatacaaaaattaacaggacatggtggtgtgcatttgtggtcccagctactcaggaggctgaggcaggagaatcacttgagcctgggaggcaggggctacagtaagctgagactgcaccattgcacaccagcctgggtgacagagcaagactccgtctcaaaaaacaaaacaaaacaaaacaaaaacaaaaaacttgaaataaaagctaagaaagtcaagggtctaacttttttcccacgtactatttggattttgttttcgttttgtattttcttttttattgtgtataacatacatacataaaagtatgtaaagggtactgattttcttttttttttttttttttgagacagagtctcgctctgtcgctcaggctggagtgcagtggtgcaatctcggctcactgcaagctccgcctcccaggttcacgccattctcctgcctcagcctcccgagtagctgggactacaggcacccgccaccacgcctggctaatttttttttttttttagtagagacagggtttcaccgtgttagccaggatggtcttgatctcctgaccttgtgatccgcctgcctcagcctcccaaagtgctgggattacaggcgtgagccaccacgcccagccaaagggtactgatttccatgtccagttcttttttttttttttttttttggcggaatcttgctctgtcgcctaggctggactgcagtggtgtgatctcagctcactgcaacctctgccttctgggttcaagcgattctcctgcctcagcctcccaagcagctgggattacagacgtgcaccaccacgcacagctaatttttgtatttttagtagacatggagtttcaccatgctggccaggctggtcttgaactcctgacctcgtgatcctcccacctcggcctcccaaagtgctgggattacaggcatgagccgccacgtccggccaatttgtttttatatatgtatacacttgcataactagcacccagatcaatacataaatactgtgaatacatcacatactgtgatgttttctgaactactaaatgttttcaacttcattttctttttgccttcttaaaattaaagttggcctgcctctttggcaactcattaaagactattcaacaccagagttttgaaaacacagatgtgtatatcatggatttcatttcttccttcattaagtagacattgattcatttattcaacagatatttattaatttctgtgtaccaggcaaatccctggacactggaaatattaataaatcaataaatgaagatgacaaaaaacccgaccccacggagctggtgtcagggtcagggtgggggtgaggaaggacacaacaaacacatggagatgtgaagaatgcagtaagttagacagtgattagcactaaggagaacatttgtggaagggctggggaaggttgggagttgtagaggtcagggatggtctcattctggtgagcagagacctgaaagaggtgagggaggagccatatatttgagggaagagagaatagccagcaaaaagggcctggggtgggagtatgtcaggggtgtttaagaaatagtaaggagggggccgggcgcggtggctcacgcctgtaatcccagcactttgggaggccgaggctggcggatcacgaggtcaggagatcgagaccatcctggctaacacggtgaaaccccatctctacaaaaaatacaaaaaaatcagctgggcatggtggcaggcgcctgtagtcccagctactcgggagcctgaggcaggagaatggcttgaaccccaggaggcagagcttgcagtgagccgagatcacaccactgcactccagcctgggcgacagagccagactccatctcaaaaaaaaaaaaaggaaaaaaaaaagagagagaaacagtaaggaggtccttaataactctgcagcagagttattaaggacacaaatgccataggctgtgcgcgatggctcacgtctgcaatcccagcactttggggaagctgaggcaggaggattgcttgaggttaggagctcaagaccagcctggccaacatgagcgaaatcccatctctactaaaaatacaaaaactagccgggggtggtgacacacgcctgtaatcccagctactcgggtggctgaggcaagagaatcgcttgaacccaggaggtggaggttgcagtgagctatcgtgccaatgcactccagcctgggcaacagagcaagactccctctcaaaaaaaaaaaaggacacaagtatcaagaggtaaggtcagaaaggtcacagttctgaacagaggaaaatgacttgttttaaagaggttacaagatctttctgcagagggagaagcagggagaatagctcttctccgaccacacactagggtctccacgggcttggctttgggcagctgctaggagcaaagtctggtctgaaatgatgacacacgctctgccctccgagagcctcccagtctagggggtttgaaggaaactccaaagggtcagtcggggatgcagaagaggtgaggaagtctaagctgcgctctctttgcctctcccaccagccctgccctggctcaacgtgtcagcagatggtgacaacgtgcatctggttctgaatgtctctgaggagcagcacttcggcctctccctgtactggaatcaggtccagggccccccaaaaccccggtggcacaaaaacctggtgaggcctcccccttcccaagtccattcccactgtaggccgatgcctgtgcaaaggacgcagtgccatatcagagaggatccttgaagaggactcaccccaagcaagggaaaattggtgggggaacttctgccttcctggtttccttgactttggcctcctcctcttcctccttatcttctccaacctccttcctttatttgttccacagactggaccgcagatcattaccttgaaccacacagacctggttccctgcctctgtattcaggtaggagcagagtctagctgggtgccagaagaggagtgggaagatgatgatgggggtgatccctgccttcctggtctcaccattcttcaaacccttcattgaggtggagactgtggctccctggggtggctggccctcccttgacccttgctgtcctatgccttctgtctattacattccctgaatgctctccctgatcctccacagaactcctgcttattcttcatggccccattcaaatgtcaccttctccttgaaacctttccctactcctccagttctgtctttgtgttcccctggcgggcagagcatgtgctacgaacttggactggtttgaatcttggctcttgccatttgctagctgtgtaaccttgggcaagtcacttcacctctgtgagcctgtttctcatctgtaaaatgggaataataatagtaacagcctcatggggctgttataagaatgtgtgccacacccaggcttaaatatgctggctctttcctcttcctctgtacatttatttatttttttagacaaggtctcactctgttgcccaggctggagtgcagtggcacaatcatggcacactgcagcctcagccccatgggctcaagtgatcctcctgtctcagcctcccaagtagctggaactactggtgagcactaccatactcagctagtttttttttgttttgtgtagagacggggtcttgctatgttacccaggctgttctgaattcctgggcttatgctatcctcccacctcagcctcccaccaagtgctgggattataagcatgagccactgtggcttgccctgattgcactttttttttttttttttttaagacagagtctttctctgtcgcccaggctggagcaccgtggcgtgatctcggctcactgcaagctgcttctcctgggttcacgccattctcctgcctcagcctcgctgagtagctgggactacaggtgcctgcaaccacgcccagctaattttttgtattttcagtaaagacagggtttcaccgtgttagccaggatggtctcgatctcctgaccttatgatccacaagcctcgtcctcccaaagtgctgggattacaggcatgacccactgtgcccagccgctgattgcacatttaattggtcatcaggtctcatccatcttacctctgacattaatgtctctcattttctttccccctcctctccatctcagtccagcttagggctctatcatctgttttctagactgtttcaacacctccaagctcccctcccttcccatcactttcctggcattctgggcccatattctgcccccaacggtgccttttcactctattttccccatgattccccttcatgagaacattgttacatccagtggagctacttaccaagatacagctagctccctgccttttctcaggtggttcccattacctcaaatgccctcacctccttcccaaagcttttccccaaccacccggcctctcctagctccaaatccccttgcacttctatctttccttgtccatttatcacttcatttcttttattttcttaaattttttttttttttttagagacagcattttgctctgtcacccatggtagagtgcagtggcatgaacacgtctcattgcagccccaagctcccaggttcaagggatcctcctgcctcagcctctgcagctgggactgcaggcatgcgccaccatgcctggctaattgtttccttttttttttttttttttttttaatggagtttcactcttttgcccaggatggagtgcagtggcgtgatctcggctcactgcaacttccgcctcccaggttcaagccattctcctgcctcagcctcccaagtagctgagattacaggcacacaccaccatgcccagctaatttttgtatttttagtagagacagggtttcaccatgttggtcaggctggtcccaaattcctgacctcgtgatccacccgcctcggccgcccaaagtgctgggattacaggcgtgagccactgtgcccagcctgttttcattttttaatgttttgtggcgatgggccaccacacccagctcaatcacttactttcttatttgggcatctaatttcttcttgtacacaacagatgctcaataaatattatgaaatgaatgagtgttttactaatttatataaatattttatccttactacaagtgtgagtttgtgatttccttgaaggcaagcaaatcatatctaattcaaatgtaatagctttgcaagagccttgcacatagcgcctacttgttttttgtttttttgtgtttttgttttttttttgtttttttgtcttttttgagacagagtctcgctctattggcaggctggagtacagtggcgtgatctcggctcactgcaatctctgcctcctggattcaagcaattcttctgcctcagcctcccaagtagctgggactacaagtgcatgccaccatgcccggctaatttttgtattttcagtagagacggggtttcagcatgttggccagatggtctcgatctcttgacctcgtgatccgcccaccttggcctcccaaagtgctgggattacaggggtgagccaccgcgcccagccttgttttgtttttaaacaaggtaacagtatgaggtcctcactgttgaatgagtgaataaatgttactgcctaacacagccataggacacagcagatgttcatgagatgtatgctgtgatttaaatggcttcattgccaaacacagtgcctgccacatagtcggtgttcctaactaaaggcttgatggataaattaatgtattacctctagtgcttagcatagagctatgcacataataggcactcttgaaatgtctgttgaaagaataaatgaatgtgtccttagaacttagcacattccccaacacatagcaggtgcttacacaagtgattgtggaatgaattaaaattaattatccaccaggcacagtggctcacacctgtaatcccagcactttgggaggccaaggtgggtggatcacgaggtcaggagtttgagaccagcctggcctaacatagtgaaacccagtctctactaaaagtacaaaaattagccaggcatggtgatgtgcgcctgtagtccctgctacttgggaagctgaggcaggagaatcacttgaacccaggaggcggaggttgtggtgagctgagatcacaccactgcactccagcctgggcaacagagtgagattccatctcaaaaaataaaaaaataataaaaatttaattatccaaggtctcttgtgcttgccatactgctaagacacaatggtaggcactcattaaaagtctgttgaatgggccaggcgcggtggctcacgcttgtaatcccaacactttgggaggctgagacgggtggatcacttgaggtcaggagttcgagaccagcctgatcaatgtggtgaaaccccatctctactaaaaatacaaaaattaaccagttagccggccgttgtggcatgttcctgtaatcgcagctcctcaggagactgagatgggagaatcgcttgaacctgggaggtggaggttgtagtgagccaagattgcaccactgcactccagcctgggcgacagagcgagactctatctcaaaaaaaaaaaaaagtttgttaatgaagatgttgccagtgcccagcattatgtttgctggaagaatagatgtgagcacctccaggttttgtaaaaggcaggaagacccagcaagtgtttgtgaaatacctgctgaatgagtgcatccccactgtccagcagagggccaggcacatgcccatggaggggacctgagcagacccccatttcctttccaggtgtggcctctggaacctgactccgttaggacgaacatctgccccttcagggagggtgagccgaccggcctggggctggggttggggtgttgcgagcgatgggtacctggcctgcggtgactgtgccctttccttgcagacccccgcgcacaccagaacctctggcaagccgcccgactgcaactgctgaccctgcagagctggctgctggacgcaccgtgctcgctgcccgcagaagcggcactgtgctggcgggctccgggtggggacccctgccagccactggtcccaccgctttcctgggagaacgtcactgtggacgtaagtgaagcagagggcacctcccgtggtgaggggagagtggggaaccgggggtccccttttgtgatcccacccattcctctctttccacagaaggttctcgagttcccattgctgaaaggccaccctaacctctgtgttcaggtcagaaaggggtgcatagtgctgggctggaggctggacctgggcagaccccccagccaagggggtcttagttcttgggccgctaaagcatagtggttgccagcttcctctatgggagttccactgcctactttagtagtgcgcgggaccctgggcaactcacttcacctctctgaacgtcagtttcctcatctgtttaatgcagatgataatacagtaactacctcatggagtggttgtgacaatgaaataagagaagtgcttccccttaggaatcggtacagactaaatgctccataaatgtagccacttttattattgctatccttattctatttccatacctgtagaatgggttgctctacagtttcaaagggtgattataagaacattcactcatccggccaggcgcggtggctcacgcctgtaatcccagcactttgggaggccgaggcgggcagatcacgaggtcaggacatcaagaccatcctggctaacatggtgaaaccccatctctactaaaaatacaaaaaattagccggtcgtggtggtgggcacctgtagtcccagctactaggaaggctggggcaggagaatggcgtgaacctgggaggctgagcttgcagtgagctgagagggcgccactgcactccagcctgggtgacagagtgagactgggcgacagagtgaaactccgtctcaaaaaaaaaaaaaattcactcattcaagattttttgagcagcacaagtcactgttttaggcacttgtgatagaccctaacatctctaccctcatagaacttatattgtaatggagaaaggcaggcaacagacattgtaaataaatcatatagtatcttaaaattgcatacaaataccatgggaaagggataaggtgggactggggttgcaatttttagcagggtggtcatgtgagaaaggaatctctttgagaaggttagatgagaggggaaccatgctccgtaagacataaaaacagctttagggtcagaagacgctttatacagatgatctcacaaggctggggcagagaaagatgtagtgattcctaatcacccagccttgaatccacatctgcctcaggtcagattgagtgcagattcccaacccaacaggccttctgttgcctgccccattctggtctttctgcctttggcttttgcttttcttagtggccctaaccatggtctcttcccagcaggtgaacagctcggagaagctgcagctgcaggagtgcttgtgggctggtgagttgggcctgggggcagctggggcagggccacctcctaggggtgaaggtcagggcatgggaggcaggcaagtggccaatcccagcaaggatgggtcttggtcagagtggcctctcaccccttccagactccctggggcctctcaaagacgatgtgctactgttggagacacgaggcccccaggacaacagatccctctgtgccttggaacccagtggctgtacttcactacccagcaaagcctccacggttaggactgggcgaccctcctccacagatctctccaaatgcatctcacatctggcctcaaattttcactccatccaccctgtgccggtctctgggaacatggggggtgactcagaccagggccatattcagcggcatcaccaaagtctcccagtcccctctacctcattctacccagctgtagcctggtaggtgctgccctaagggtgctacctccaggtaacagtgcccccatcctttggcttggcagagggcagctcgccttggagagtacttactacaagacctgcagtcaggccagtgtctgcaggtgagctggtggaagaagggccccacctcaatgcctaggggcaacaggcctaaaactagcactcacctactgtctatttaggcttattttatgttcagccctgggaaagttaagagtagaagaagcacagttcctatccccaaggagcacactgttggctagacacccataaacagataaccacacctacaggtgctaagttttgggttccagggagagcttccgggaagaatttcttcctataagccagatttggtatggaagaagtcataccctagtcagtgggcacagcacaaaggcagagcagctgcaggaaccttagccgggagatatgcatagttgatgctgggaatttggagatcaggccaccagagcttggtgaatattggaacacctggctggtgccctggatttggttctgtttgtatcttacagctatgggacgatgacttgggagcgctatgggcctgccccatggacaaatgtgagtattgtaagaactgcctttcctttctgtaccaggagtggggatcttgacagggaccactcttgggcacagcacatgcaatggccttgtccttccctgagatcagataaacagagggtcattccttcattcactcaaaaaatgatgagagcttgcagggatcgcaggaacaccaaaaatataaatccttgcccccgccccacccctagaagactagcaagacatgagccagtcacttacatttaaagtgggagctactgaagcaccaccaagtgttcagtgctgtaaatgcatacaatgtggacctgacctgggtggggtgaggggtgaggggctcagggggaaggttccagcaaaactctgaagactgagctaggggaagggggtagagatacagggtcttggacaggcaggtttctgtcatgagataaagatgcaggagacatgtaggggatttggatcttatgttgagagcagcaggagctacgatcaaatttttatatatttcacacacacacacacacatatatatatatatatatatatatatatatatacttatttttttatttatttttgaggcagagtctcactctgttgcccaggctggagtgcaatggcgcgatctcggctaactgcaacctctgcctcccgggttcaagcaattctctacctcagcctcccgggtagctgggattaataggcgcctgccaccatgccctgctaatttttgtatttttagtagagatggggtttcaccatcttggccaggctggtcttgaactcctgacctcgtgatccgcccgcgtcggcctcccaaagtgctgggattatagtcgtgagtcaccgcacctggcccaaatttatatttttaaaagatctctgaggctgtcatgaatcaattcaaggcaaatcaattggaggtaaaaaaaaaaaaaaaaagacagggcagggacaccaggtagttgcagacacccaggacagcaagatcaagggcccagcaaccctagcttaggggagaaaaacagctgacattttagcacttaagatgctcggcattgtgttaagtatgtattaacacattgtgttaagctttatatgtattaatatatttagtcctcacaccaaccctatgacacaggtacaactttacagaggagaaaactgaggcagagggtgacattacttattcaaagacccctaaacagatggagctatattcatccactggctctgacactgtgctgtggactctgggcaaatcatttcttcgttttttgttttgttttgttttgttttgagaggagtctcaccctgtcgcccaggctggagtgcaatggcgcgatctcggctcactgcaacctctgcctcccgagttcaagcgattctcttgcctcagcctcccgagtagctgggattacaggcgtgtgccaccacgcccggctaattttttgtatttttagtagagacggggtttcaccgtgttagccaggatggtcttgatgtcctgacctcgtgatctgcccgcctcggcctcccgaagtgctgggattatataaaggcatgagccaccgcacccggcccaattcatttctgttaagtctcagtttttcttctctgtggagggtaagtttctaactcttcttctctgggtctcccagacatccacaagcgctgggccctcgtgtggctggcctgcctactctttgccgctgcgctttccctcatcctccttctcaaaaaggatcacgcgaaaggtgagcgcttcccggctccccattcccctgggggaggaccagagtggctgtgggagttctccgagggaaagcggcggccgagctcactggctgcctccgcccctctcccctaacagggtggctgaggctcttgaaacaggacgtccgctcggggggtgagtgggagcaagcgctgggcggagggccgcccccggggagccaggcctgtgccagctcacctcttccctccccatctgttttctccggcagcggccgccaggggccgcgcggctctgctcctctactcagccgatgactcgggtttcgagcgcctggtgggcgccctggcgtcggccctgtgccagctgccgctgcgcgtggccgtagacctgtggagccgtcgtgaactgagcgcgcaggggcccgtggcttggtttcacgcgcagcggcgccagaccctgcaggagggcggcgtggtggtcttgctcttctctcccggtgcggtggcgctgtgcagcgagtggctacaggatggggtgtccgggcccggggcgcacggcccgcacgacgccttccgcgcctcgctcagctgcgtgctgcccgacttcttgcagggccgggcgcccggcagctacgtgggggcctgcttcgacaggctgctccacccggacgccgtacccgcccttttccgcaccgtgcccgtcttcacactgccctcccaactgccagacttcctgggggccctgcagcagcctcgcgccccgcgttccgggcggctccaagagagagcggagcaagtgtcccgggcccttcagccagccctggatagctacttccatcccccggggactcccgcgccgggacgcggggtgggaccaggcgcgggacctggggcgggggacgggacttaaataaaggcagacgctgtttttctaccca

SEQ ID NO: 12541 - DNA, 2388 bp, Homo sapiens
acagccagcagcctgccgggagccaaaacgaaagcactccgtgctggaagtaggaggagagtcaggactcccaggacagagagtgcacaaactacccagcacagccccctccgccccctctggaggctgaagagggattccagcccctgccacccacagacacgggctgactggggtgtctgccccccttgggggggggcagcacagggcctcaggcctgggtgccacctggcacctagaagatgcctgtgccctggttcttgctgtccttggcactgggccgaagcccagtggtcctttctctggagaggcttgtggggcctcaggacgctacccactgctctccgggcctctcctgccgcctctgggacagtgacatactctgcctgcctggggacatcgtgcctgctccgggccccgtgctggcgcctacgcacctgcagacagagctggtgctgaggtgccagaaggagaccgactgtgacctctgtctgcgtgtggctgtccacttggccgtgcatgggcactgggaagagcctgaagatgaggaaaagtttggaggagcagctgactcaggggtggaggagcctaggaatgcctctctccaggcccaagtcgtgctctccttccaggcctaccctactgcccgctgcgtcctgctggaggtgcaagtgcctgctgcccttgtgcagtttggtcagtctgtgggctctgtggtatatgactgcttcgaggctgccctagggagtgaggtacgaatctggtcctatactcagcccaggtacgagaaggaactcaaccacacacagcagctgcctgccctgccctggctcaacgtgtcagcagatggtgacaacgtgcatctggttctgaatgtctctgaggagcagcacttcggcctctccctgtactggaatcaggtccagggccccccaaaaccccggtggcacaaaaacctgactggaccgcagatcattaccttgaaccacacagacctggttccctgcctctgtattcaggtgtggcctctggaacctgactccgttaggacgaacatctgccccttcagggaggacccccgcgcacaccagaacctctggcaagccgcccgactgcaactgctgaccctgcagagctggctgctggacgcaccgtgctcgctgcccgcagaagcggcactgtgctggcgggctccgggtggggacccctgccagccactggtcccaccgctttcctgggagaacgtcactgtggacaaggttctcgagttcccattgctgaaaggccaccctaacctctgtgttcaggtgaacagctcggagaagctgcagctgcaggagtgcttgtgggctgactccctggggcctctcaaagacgatgtgctactgttggagacacgaggcccccaggacaacagatccctctgtgccttggaacccagtggctgtacttcactacccagcaaagcctccacgagggcagctcgccttggagagtacttactacaagacctgcagtcaggccagtgtctgcagctatgggacgatgacttgggagcgctatgggcctgccccatggacaaatacatccacaagcgctgggccctcgtgtggctggcctgcctactctttgccgctgcgctttccctcatcctccttctcaaaaaggatcacgcgaaagggtggctgaggctcttgaaacaggacgtccgctcgggggcggccgccaggggccgcgcggctctgctcctctactcagccgatgactcgggtttcgagcgcctggtgggcgccctggcgtcggccctgtgccagctgccgctgcgcgtggccgtagacctgtggagccgtcgtgaactgagcgcgcaggggcccgtggcttggtttcacgcgcagcggcgccagaccctgcaggagggcggcgtggtggtcttgctcttctctcccggtgcggtggcgctgtgcagcgagtggctacaggatggggtgtccgggcccggggcgcacggcccgcacgacgccttccgcgcctcgctcagctgcgtgctgcccgacttcttgcagggccgggcgcccggcagctacgtgggggcctgcttcgacaggctgctccacccggacgccgtacccgcccttttccgcaccgtgcccgtcttcacactgccctcccaactgccagacttcctgggggccctgcagcagcctcgcgccccgcgttccgggcggctccaagagagagcggagcaagtgtcccgggcccttcagccagccctggatagctacttccatcccccggggactcccgcgccgggacgcggggtgggaccaggcgcgggacctggggcgggggacgggacttaaataaaggcagacgctgtttttctaccca

SEQ ID NO: 12542 - DNA, 16524 bp, Homo sapiens
aaaacgaaagcactccgtgctggaagtaggaggagagtcaggactcccaggacagagagtgcacaaactacccagcacagccccctccgccccctctggaggctgaagagggattccagcccctgccacccacagacacgggctgactggggtgtctgccccccttgggggggggcagcacagggcctcaggcctgggtgccacctggcacctagaagatgcctgtgccctggttcttgctgtccttggcactgggccgaagcccagtggtcctttctctggagaggcttgtggggcctcaggacgctacccactgctctccggtgagtctggaaccctggggagacgaggaaaggctcagggttcagtttttggctcagcaaagccttagcctggctcctgtcactgctgccactgccagaactgccctgtctggtctgtctggtgctgatggtagaagagaagaacggggaaggggcaagagctgggtctgtctttctctgggagggtctgggaatacggagccccagaaaaaggtaggtggaggtcttaggcagagaacagtgcctagatggtgggggcacaaattctgactctcctttctttccttcccagggcctctcctgccgcctctggggtaagtatccctacttttaaaaagaatttcccaggttggccgaagggagcagagctgtcccaggcccatgccctccatgcccacctcagcctaggacagccaagttctttggctctctgggtatgtcaggtgccaccaaattctgggcttggaacagcttcagctcccacccgctcctccacacacagacagtgacatactctgcctgcctggggacatcgtgcctgctccgggccccgtgctggcgcctacgcacctgcagacagagctggtgctgaggtgccagaaggagaccgactgtgacctctgtctgcgtgtggctgtccacttggccgtgcatggtgagcaagtcatcctgtgacagtgcatgtgtacacgtgagtgtgtctggggtgggcatgagggccaggggatctctcaagcagtgctaggcatcctcagtgttctcctggaggacaccagcagaaggacccccaggccagtgtggtctccccagcccctgcttcccagcactgggctttccagaaggaagccaacgccaaagccagccagcccagagcagggggcctcacccagggccttgctcttgggtccttctagggcactgggaagagcctgaagatgaggaaaagtttggaggagcagctgactcaggggtggaggagcctaggaatggtgaggagaacctggctggcccaactgccccatgccaaggcctggcctgccgctcctgggcctgactgacccctgccctgttgcccacagcctctctccaggcccaagtcgtgctctccttccaggcctaccctactgcccgctgcgtcctgctggaggtgcaagtgcctgctgcccttgtgcagtttggtcagtctgtggtatgcaaaataataataatcaccttctaaacctaaaatctataaaactttttcacatgcattatctctttgaggattacaaaagaattaaatttattgaaacccttcagtaccaggcattacagccagtgttttacaggtatcaacttatttaattctcacaacagccatgtgaggtgggactattcttttgattctgatcagcgctgtgggcaagtcccttcagcctgttatgcctcagcttttatgtctgtaaaatggggatgagaatagttctacttcatatgcttgactgcgagaaatcaccaagcgtttttcagggtgcttctactattttcccctcctaccagcagtgtatgggagtcctagttgcttcccatctttgccaacacttgatggtgtaattttattttatttttaaattaaatatatttgaattttaaatatatgggaccctccatgaatttgcatgtcatcctcaggcacgggccttgctaatcttttctgtattgttccagttgtagtatatgtggtgccaaaacaagcataagtgttgtaattgtcataatttttctgcatatgtagtggtttgccattgtggttttaatttgtatcttccaatgactgatgaagttgagcacttttttcacatgcttattggctatttgtgtaacttccttgtgaaatatctcttaaagtttttttgtttttgtttttgtttttgtttttgccacataaaaaaacaatagttctggccgggcacagtggttcacacctgtaatcccagcactttgggaggctgaggcgggcagatcacgaagtcaggagattgagaccatcctggctaacactgtgaaaccctgcctccactaaaaaaatacaaaaaattagccaggcatggtggtgggcgcctgtagacccagctactcgggaggcagaggcaggagaatggcgtgaacccgggaggtggagcttgcagtgagccgagatcgcgccactgcactccagcctgggcgacagagcgagattccgtctcaaaaaaaaagaatagtcccacctcacatgactgttgtgagaattaaattaagttggtacctgtaaaacactggatgtaatgcctggcactgaataatttcaataaatttaattcttttgtaatcctcaaaactacctgatgaggcattattagtatcctcattttccagatagataaaatgaggcttggagaggggaggtctgtgggctggatgcacttctctgtactcttggaccaaagaaagagtcctaccatacataccatggtatacttaccatggtgtaagtaccatggtgcagggtgttggggcttctccctgccttaggaggccacatgtacctggaaggtctatttccactggggtcaaatcactcaaaccctttgactttccctccaacctccagcccccagccaatatcctatctggagaattgtagactgggagaacatctgcttggtccatgtcacaagcagttgtaaggaacactgaggcactgggttgagtgtgagaaccacttctgtggggaggggtgtgccatattgtgttggggtgtctcatctccttagctttggccaggtgatctagcacagcagggtgggtgcagggatttaaatgtctagggccttttcccgccctggtgacactcttactgaggacatttgctttagaattgaggccccttgaaagaaaggtgaatagtagatttcaggctatacagtataaatacagtcattagttgggggaggagggcagtgagcagagtggtccctgcagatgatcccacagcccttggcctggattctgagccctgcaccgccagccttcctcacccctctcctcacagggctctgtggtatatgactgcttcgaggctgccctagggagtgaggtacgaatctggtcctatactcagcccaggtacgagaaggaactcaaccacacacagcagctgcctggtaagtggacccccaagtcctggccccctagcctctgtcccctctggccattccccctcctgatttcaccctcttctagctccatccactctccggcaggggtctgagctgctatcctccccagagtcagtccctcggaccttctctctctgggtgatatggctttccagcccctggggaaggttctttgagcattggatagatgtgggtggtatgtaggggatggggagccattcctaatgcccccctgggagccaaattgcccccacttctttccttggcccccagccccactggaggctcttctgtgatctctcctcagactgcagggggctcgaagtctggaacagcatcccgagctgctggggtaggggctagggccagtgggccgggggtagggaggggcagggtctggagtataagaaacccttggagtccacttcagatatgggctaccacatctcagaagctcacagaacatattcattcattcattcattcattcatttgttcataacacattaattgcagtatctgtgctaagcactggaaatagaaagatgaatcttgggtcaggctcagtggctcatgcctgtaatcccagaactttgggaggccgaggtagaaggatcacttgagctcaaaagttcaagacgagcctgggcaacatggcaaatccccgtctctaccaaaaatacaaaaattaacaggacatggtggtgtgcatttgtggtcccagctactcaggaggctgaggcaggagaatcacttgagcctgggaggcaggggctacagtaagctgagactgcaccattgcacaccagcctgggtgacagagcaagactccgtctcaaaaaacaaaacaaaacaaaacaaaaacaaaaaacttgaaataaaagctaagaaagtcaagggtctaacttttttcccacgtactatttggattttgttttcgttttgtattttcttttttattgtgtataacatacatacataaaagtatgtaaagggtactgattttcttttttttttttttttttgagacagagtctcgctctgtcgctcaggctggagtgcagtggtgcaatctcggctcactgcaagctccgcctcccaggttcacgccattctcctgcctcagcctcccgagtagctgggactacaggcacccgccaccacgcctggctaatttttttttttttttagtagagacagggtttcaccgtgttagccaggatggtcttgatctcctgaccttgtgatccgcctgcctcagcctcccaaagtgctgggattacaggcgtgagccaccacgcccagccaaagggtactgatttccatgtccagttcttttttttttttttttttttggcggaatcttgctctgtcgcctaggctggactgcagtggtgtgatctcagctcactgcaacctctgccttctgggttcaagcgattctcctgcctcagcctcccaagcagctgggattacagacgtgcaccaccacgcacagctaatttttgtatttttagtagacatggagtttcaccatgctggccaggctggtcttgaactcctgacctcgtgatcctcccacctcggcctcccaaagtgctgggattacaggcatgagccgccacgtccggccaatttgtttttatatatgtatacacttgcataactagcacccagatcaatacataaatactgtgaatacatcacatactgtgatgttttctgaactactaaatgttttcaacttcattttctttttgccttcttaaaattaaagttggcctgcctctttggcaactcattaaagactattcaacaccagagttttgaaaacacagatgtgtatatcatggatttcatttcttccttcattaagtagacattgattcatttattcaacagatatttattaatttctgtgtaccaggcaaatccctggacactggaaatattaataaatcaataaatgaagatgacaaaaaacccgaccccacggagctggtgtcagggtcagggtgggggtgaggaaggacacaacaaacacatggagatgtgaagaatgcagtaagttagacagtgattagcactaaggagaacatttgtggaagggctggggaaggttgggagttgtagaggtcagggatggtctcattctggtgagcagagacctgaaagaggtgagggaggagccatatatttgagggaagagagaatagccagcaaaaagggcctggggtgggagtatgtcaggggtgtttaagaaatagtaaggagggggccgggcgcggtggctcacgcctgtaatcccagcactttgggaggccgaggctggcggatcacgaggtcaggagatcgagaccatcctggctaacacggtgaaaccccatctctacaaaaaatacaaaaaaatcagctgggcatggtggcaggcgcctgtagtcccagctactcgggagcctgaggcaggagaatggcttgaaccccaggaggcagagcttgcagtgagccgagatcacaccactgcactccagcctgggcgacagagccagactccatctcaaaaaaaaaaaaaggaaaaaaaaaagagagagaaacagtaaggaggtccttaataactctgcagcagagttattaaggacacaaatgccataggctgtgcgcgatggctcacgtctgcaatcccagcactttggggaagctgaggcaggaggattgcttgaggttaggagctcaagaccagcctggccaacatgagcgaaatcccatctctactaaaaatacaaaaactagccgggggtggtgacacacgcctgtaatcccagctactcgggtggctgaggcaagagaatcgcttgaacccaggaggtggaggttgcagtgagctatcgtgccaatgcactccagcctgggcaacagagcaagactccctctcaaaaaaaaaaaaggacacaagtatcaagaggtaaggtcagaaaggtcacagttctgaacagaggaaaatgacttgttttaaagaggttacaagatctttctgcagagggagaagcagggagaatagctcttctccgaccacacactagggtctccacgggcttggctttgggcagctgctaggagcaaagtctggtctgaaatgatgacacacgctctgccctccgagagcctcccagtctagggggtttgaaggaaactccaaagggtcagtcggggatgcagaagaggtgaggaagtctaagctgcgctctctttgcctctcccaccagccctgccctggctcaacgtgtcagcagatggtgacaacgtgcatctggttctgaatgtctctgaggagcagcacttcggcctctccctgtactggaatcaggtccagggccccccaaaaccccggtggcacaaaaacctggtgaggcctcccccttcccaagtccattcccactgtaggccgatgcctgtgcaaaggacgcagtgccatatcagagaggatccttgaagaggactcaccccaagcaagggaaaattggtgggggaacttctgccttcctggtttccttgactttggcctcctcctcttcctccttatcttctccaacctccttcctttatttgttccacagactggaccgcagatcattaccttgaaccacacagacctggttccctgcctctgtattcaggtaggagcagagtctagctgggtgccagaagaggagtgggaagatgatgatgggggtgatccctgccttcctggtctcaccattcttcaaacccttcattgaggtggagactgtggctccctggggtggctggccctcccttgacccttgctgtcctatgccttctgtctattacattccctgaatgctctccctgatcctccacagaactcctgcttattcttcatggccccattcaaatgtcaccttctccttgaaacctttccctactcctccagttctgtctttgtgttcccctggcgggcagagcatgtgctacgaacttggactggtttgaatcttggctcttgccatttgctagctgtgtaaccttgggcaagtcacttcacctctgtgagcctgtttctcatctgtaaaatgggaataataatagtaacagcctcatggggctgttataagaatgtgtgccacacccaggcttaaatatgctggctctttcctcttcctctgtacatttatttatttttttagacaaggtctcactctgttgcccaggctggagtgcagtggcacaatcatggcacactgcagcctcagccccatgggctcaagtgatcctcctgtctcagcctcccaagtagctggaactactggtgagcactaccatactcagctagtttttttttgttttgtgtagagacggggtcttgctatgttacccaggctgttctgaattcctgggcttatgctatcctcccacctcagcctcccaccaagtgctgggattataagcatgagccactgtggcttgccctgattgcactttttttttttttttttttaagacagagtctttctctgtcgcccaggctggagcaccgtggcgtgatctcggctcactgcaagctgcttctcctgggttcacgccattctcctgcctcagcctcgctgagtagctgggactacaggtgcctgcaaccacgcccagctaattttttgtattttcagtaaagacagggtttcaccgtgttagccaggatggtctcgatctcctgaccttatgatccacaagcctcgtcctcccaaagtgctgggattacaggcatgacccactgtgcccagccgctgattgcacatttaattggtcatcaggtctcatccatcttacctctgacattaatgtctctcattttctttccccctcctctccatctcagtccagcttagggctctatcatctgttttctagactgtttcaacacctccaagctcccctcccttcccatcactttcctggcattctgggcccatattctgcccccaacggtgccttttcactctattttccccatgattccccttcatgagaacattgttacatccagtggagctacttaccaagatacagctagctccctgccttttctcaggtggttcccattacctcaaatgccctcacctccttcccaaagcttttccccaaccacccggcctctcctagctccaaatccccttgcacttctatctttccttgtccatttatcacttcatttcttttattttcttaaattttttttttttttttagagacagcattttgctctgtcacccatggtagagtgcagtggcatgaacacgtctcattgcagccccaagctcccaggttcaagggatcctcctgcctcagcctctgcagctgggactgcaggcatgcgccaccatgcctggctaattgtttccttttttttttttttttttttttaatggagtttcactcttttgcccaggatggagtgcagtggcgtgatctcggctcactgcaacttccgcctcccaggttcaagccattctcctgcctcagcctcccaagtagctgagattacaggcacacaccaccatgcccagctaatttttgtatttttagtagagacagggtttcaccatgttggtcaggctggtcccaaattcctgacctcgtgatccacccgcctcggccgcccaaagtgctgggattacaggcgtgagccactgtgcccagcctgttttcattttttaatgttttgtggcgatgggccaccacacccagctcaatcacttactttcttatttgggcatctaatttcttcttgtacacaacagatgctcaataaatattatgaaatgaatgagtgttttactaatttatataaatattttatccttactacaagtgtgagtttgtgatttccttgaaggcaagcaaatcatatctaattcaaatgtaatagctttgcaagagccttgcacatagcgcctacttgttttttgtttttttgtgtttttgttttttttttgtttttttgtcttttttgagacagagtctcgctctattggcaggctggagtacagtggcgtgatctcggctcactgcaatctctgcctcctggattcaagcaattcttctgcctcagcctcccaagtagctgggactacaagtgcatgccaccatgcccggctaatttttgtattttcagtagagacggggtttcagcatgttggccagatggtctcgatctcttgacctcgtgatccgcccaccttggcctcccaaagtgctgggattacaggggtgagccaccgcgcccagccttgttttgtttttaaacaaggtaacagtatgaggtcctcactgttgaatgagtgaataaatgttactgcctaacacagccataggacacagcagatgttcatgagatgtatgctgtgatttaaatggcttcattgccaaacacagtgcctgccacatagtcggtgttcctaactaaaggcttgatggataaattaatgtattacctctagtgcttagcatagagctatgcacataataggcactcttgaaatgtctgttgaaagaataaatgaatgtgtccttagaacttagcacattccccaacacatagcaggtgcttacacaagtgattgtggaatgaattaaaattaattatccaccaggcacagtggctcacacctgtaatcccagcactttgggaggccaaggtgggtggatcacgaggtcaggagtttgagaccagcctggcctaacatagtgaaacccagtctctactaaaagtacaaaaattagccaggcatggtgatgtgcgcctgtagtccctgctacttgggaagctgaggcaggagaatcacttgaacccaggaggcggaggttgtggtgagctgagatcacaccactgcactccagcctgggcaacagagtgagattccatctcaaaaaataaaaaaataataaaaatttaattatccaaggtctcttgtgcttgccatactgctaagacacaatggtaggcactcattaaaagtctgttgaatgggccaggcgcggtggctcacgcttgtaatcccaacactttgggaggctgagacgggtggatcacttgaggtcaggagttcgagaccagcctgatcaatgtggtgaaaccccatctctactaaaaatacaaaaattaaccagttagccggccgttgtggcatgttcctgtaatcgcagctcctcaggagactgagatgggagaatcgcttgaacctgggaggtggaggttgtagtgagccaagattgcaccactgcactccagcctgggcgacagagcgagactctatctcaaaaaaaaaaaaaagtttgttaatgaagatgttgccagtgcccagcattatgtttgctggaagaatagatgtgagcacctccaggttttgtaaaaggcaggaagacccagcaagtgtttgtgaaatacctgctgaatgagtgcatccccactgtccagcagagggccaggcacatgcccatggaggggacctgagcagacccccatttcctttccaggtgtggcctctggaacctgactccgttaggacgaacatctgccccttcagggagggtgagccgaccggcctggggctggggttggggtgttgcgagcgatgggtacctggcctgcggtgactgtgccctttccttgcagacccccgcgcacaccagaacctctggcaagccgcccgactgcaactgctgaccctgcagagctggctgctggacgcaccgtgctcgctgcccgcagaagcggcactgtgctggcgggctccgggtggggacccctgccagccactggtcccaccgctttcctgggagaacgtcactgtggacgtaagtgaagcagagggcacctcccgtggtgaggggagagtggggaaccgggggtccccttttgtgatcccacccattcctctctttccacagaaggttctcgagttcccattgctgaaaggccaccctaacctctgtgttcaggtcagaaaggggtgcatagtgctgggctggaggctggacctgggcagaccccccagccaagggggtcttagttcttgggccgctaaagcatagtggttgccagcttcctctatgggagttccactgcctactttagtagtgcgcgggaccctgggcaactcacttcacctctctgaacgtcagtttcctcatctgtttaatgcagatgataatacagtaactacctcatggagtggttgtgacaatgaaataagagaagtgcttccccttaggaatcggtacagactaaatgctccataaatgtagccacttttattattgctatccttattctatttccatacctgtagaatgggttgctctacagtttcaaagggtgattataagaacattcactcatccggccaggcgcggtggctcacgcctgtaatcccagcactttgggaggccgaggcgggcagatcacgaggtcaggacatcaagaccatcctggctaacatggtgaaaccccatctctactaaaaatacaaaaaattagccggtcgtggtggtgggcacctgtagtcccagctactaggaaggctggggcaggagaatggcgtgaacctgggaggctgagcttgcagtgagctgagagggcgccactgcactccagcctgggtgacagagtgagactgggcgacagagtgaaactccgtctcaaaaaaaaaaaaaattcactcattcaagattttttgagcagcacaagtcactgttttaggcacttgtgatagaccctaacatctctaccctcatagaacttatattgtaatggagaaaggcaggcaacagacattgtaaataaatcatatagtatcttaaaattgcatacaaataccatgggaaagggataaggtgggactggggttgcaatttttagcagggtggtcatgtgagaaaggaatctctttgagaaggttagatgagaggggaaccatgctccgtaagacataaaaacagctttagggtcagaagacgctttatacagatgatctcacaaggctggggcagagaaagatgtagtgattcctaatcacccagccttgaatccacatctgcctcaggtcagattgagtgcagattcccaacccaacaggccttctgttgcctgccccattctggtctttctgcctttggcttttgcttttcttagtggccctaaccatggtctcttcccagcaggtgaacagctcggagaagctgcagctgcaggagtgcttgtgggctggtgagttgggcctgggggcagctggggcagggccacctcctaggggtgaaggtcagggcatgggaggcaggcaagtggccaatcccagcaaggatgggtcttggtcagagtggcctctcaccccttccagactccctggggcctctcaaagacgatgtgctactgttggagacacgaggcccccaggacaacagatccctctgtgccttggaacccagtggctgtacttcactacccagcaaagcctccacggttaggactgggcgaccctcctccacagatctctccaaatgcatctcacatctggcctcaaattttcactccatccaccctgtgccggtctctgggaacatggggggtgactcagaccagggccatattcagcggcatcaccaaagtctcccagtcccctctacctcattctacccagctgtagcctggtaggtgctgccctaagggtgctacctccaggtaacagtgcccccatcctttggcttggcagagggcagctcgccttggagagtacttactacaagacctgcagtcaggccagtgtctgcaggtgagctggtggaagaagggccccacctcaatgcctaggggcaacaggcctaaaactagcactcacctactgtctatttaggcttattttatgttcagccctgggaaagttaagagtagaagaagcacagttcctatccccaaggagcacactgttggctagacacccataaacagataaccacacctacaggtgctaagttttgggttccagggagagcttccgggaagaatttcttcctataagccagatttggtatggaagaagtcataccctagtcagtgggcacagcacaaaggcagagcagctgcaggaaccttagccgggagatatgcatagttgatgctgggaatttggagatcaggccaccagagcttggtgaatattggaacacctggctggtgccctggatttggttctgtttgtatcttacagctatgggacgatgacttgggagcgctatgggcctgccccatggacaaatgtgagtattgtaagaactgcctttcctttctgtaccaggagtggggatcttgacagggaccactcttgggcacagcacatgcaatggccttgtccttccctgagatcagataaacagagggtcattccttcattcactcaaaaaatgatgagagcttgcagggatcgcaggaacaccaaaaatataaatccttgcccccgccccacccctagaagactagcaagacatgagccagtcacttacatttaaagtgggagctactgaagcaccaccaagtgttcagtgctgtaaatgcatacaatgtggacctgacctgggtggggtgaggggtgaggggctcagggggaaggttccagcaaaactctgaagactgagctaggggaagggggtagagatacagggtcttggacaggcaggtttctgtcatgagataaagatgcaggagacatgtaggggatttggatcttatgttgagagcagcaggagctacgatcaaatttttatatatttcacacacacacacacacatatatatatatatatatatatatatatatatacttatttttttatttatttttgaggcagagtctcactctgttgcccaggctggagtgcaatggcgcgatctcggctaactgcaacctctgcctcccgggttcaagcaattctctacctcagcctcccgggtagctgggattaataggcgcctgccaccatgccctgctaatttttgtatttttagtagagatggggtttcaccatcttggccaggctggtcttgaactcctgacctcgtgatccgcccgcgtcggcctcccaaagtgctgggattatagtcgtgagtcaccgcacctggcccaaatttatatttttaaaagatctctgaggctgtcatgaatcaattcaaggcaaatcaattggaggtaaaaaaaaaaaaaaaaagacagggcagggacaccaggtagttgcagacacccaggacagcaagatcaagggcccagcaaccctagcttaggggagaaaaacagctgacattttagcacttaagatgctcggcattgtgttaagtatgtattaacacattgtgttaagctttatatgtattaatatatttagtcctcacaccaaccctatgacacaggtacaactttacagaggagaaaactgaggcagagggtgacattacttattcaaagacccctaaacagatggagctatattcatccactggctctgacactgtgctgtggactctgggcaaatcatttcttcgttttttgttttgttttgttttgttttgagaggagtctcaccctgtcgcccaggctggagtgcaatggcgcgatctcggctcactgcaacctctgcctcccgagttcaagcgattctcttgcctcagcctcccgagtagctgggattacaggcgtgtgccaccacgcccggctaattttttgtatttttagtagagacggggtttcaccgtgttagccaggatggtcttgatgtcctgacctcgtgatctgcccgcctcggcctcccgaagtgctgggattatataaaggcatgagccaccgcacccggcccaattcatttctgttaagtctcagtttttcttctctgtggagggtaagtttctaactcttcttctctgggtctcccagacatccacaagcgctgggccctcgtgtggctggcctgcctactctttgccgctgcgctttccctcatcctccttctcaaaaaggatcacgcgaaaggtgagcgcttcccggctccccattcccctgggggaggaccagagtggctgtgggagttctccgagggaaagcggcggccgagctcactggctgcctccgcccctctcccctaacagggtggctgaggctcttgaaacaggacgtccgctcggggggtgagtgggagcaagcgctgggcggagggccgcccccggggagccaggcctgtgccagctcacctcttccctccccatctgttttctccggcagcggccgccaggggccgcgcggctctgctcctctactcagccgatgactcgggtttcgagcgcctggtgggcgccctggcgtcggccctgtgccagctgccgctgcgcgtggccgtagacctgtggagccgtcgtgaactgagcgcgcaggggcccgtggcttggtttcacgcgcagcggcgccagaccctgcaggagggcggcgtggtggtcttgctcttctctcccggtgcggtggcgctgtgcagcgagtggctacaggatggggtgtccgggcccggggcgcacggcccgcacgacgccttccgcgcctcgctcagctgcgtgctgcccgacttcttgcagggccgggcgcccggcagctacgtgggggcctgcttcgacaggctgctccacccggacgccgtacccgcccttttccgcaccgtgcccgtcttcacactgccctcccaactgccagacttcctgggggccctgcagcagcctcgcgccccgcgttccgggcggctccaagagagagcggagcaagtgtcccgggcccttcagccagccctggatagctacttccatcccccggggactcccgcgccgggacgcggggtgggaccaggcgcgggacctggggcgggggacgggacttaaataaaggcagacgctgtttttctaccca

SEQ ID NO: 12543 - DNA, 2409 bp, Homo sapiens
aaaacgaaagcactccgtgctggaagtaggaggagagtcaggactcccaggacagagagtgcacaaactacccagcacagccccctccgccccctctggaggctgaagagggattccagcccctgccacccacagacacgggctgactggggtgtctgccccccttgggggggggcagcacagggcctcaggcctgggtgccacctggcacctagaagatgcctgtgccctggttcttgctgtccttggcactgggccgaagcccagtggtcctttctctggagaggcttgtggggcctcaggacgctacccactgctctccgggcctctcctgccgcctctgggacagtgacatactctgcctgcctggggacatcgtgcctgctccgggccccgtgctggcgcctacgcacctgcagacagagctggtgctgaggtgccagaaggagaccgactgtgacctctgtctgcgtgtggctgtccacttggccgtgcatgggcactgggaagagcctgaagatgaggaaaagtttggaggagcagctgactcaggggtggaggagcctaggaatgcctctctccaggcccaagtcgtgctctccttccaggcctaccctactgcccgctgcgtcctgctggaggtgcaagtgcctgctgcccttgtgcagtttggtcagtctgtgggctctgtggtatatgactgcttcgaggctgccctagggagtgaggtacgaatctggtcctatactcagcccaggtacgagaaggaactcaaccacacacagcagctgcctgactgcagggggctcgaagtctggaacagcatcccgagctgctgggccctgccctggctcaacgtgtcagcagatggtgacaacgtgcatctggttctgaatgtctctgaggagcagcacttcggcctctccctgtactggaatcaggtccagggccccccaaaaccccggtggcacaaaaacctgactggaccgcagatcattaccttgaaccacacagacctggttccctgcctctgtattcaggtgtggcctctggaacctgactccgttaggacgaacatctgccccttcagggaggacccccgcgcacaccagaacctctggcaagccgcccgactgcaactgctgaccctgcagagctggctgctggacgcaccgtgctcgctgcccgcagaagcggcactgtgctggcgggctccgggtggggacccctgccagccactggtcccaccgctttcctgggagaacgtcactgtggacaaggttctcgagttcccattgctgaaaggccaccctaacctctgtgttcaggtgaacagctcggagaagctgcagctgcaggagtgcttgtgggctgactccctggggcctctcaaagacgatgtgctactgttggagacacgaggcccccaggacaacagatccctctgtgccttggaacccagtggctgtacttcactacccagcaaagcctccacgagggcagctcgccttggagagtacttactacaagacctgcagtcaggccagtgtctgcagctatgggacgatgacttgggagcgctatgggcctgccccatggacaaatacatccacaagcgctgggccctcgtgtggctggcctgcctactctttgccgctgcgctttccctcatcctccttctcaaaaaggatcacgcgaaagggtggctgaggctcttgaaacaggacgtccgctcgggggcggccgccaggggccgcgcggctctgctcctctactcagccgatgactcgggtttcgagcgcctggtgggcgccctggcgtcggccctgtgccagctgccgctgcgcgtggccgtagacctgtggagccgtcgtgaactgagcgcgcaggggcccgtggcttggtttcacgcgcagcggcgccagaccctgcaggagggcggcgtggtggtcttgctcttctctcccggtgcggtggcgctgtgcagcgagtggctacaggatggggtgtccgggcccggggcgcacggcccgcacgacgccttccgcgcctcgctcagctgcgtgctgcccgacttcttgcagggccgggcgcccggcagctacgtgggggcctgcttcgacaggctgctccacccggacgccgtacccgcccttttccgcaccgtgcccgtcttcacactgccctcccaactgccagacttcctgggggccctgcagcagcctcgcgccccgcgttccgggcggctccaagagagagcggagcaagtgtcccgggcccttcagccagccctggatagctacttccatcccccggggactcccgcgccgggacgcggggtgggaccaggcgcgggacctggggcgggggacgggacttaaataaaggcagacgctgtttttctaccca

SEQ ID NO: 12544 - DNA, 12783 bp, Homo sapiens
aaaacgaaagcactccgtgctggaagtaggaggagagtcaggactcccaggacagagagtgcacaaactacccagcacagccccctccgccccctctggaggctgaagagggattccagcccctgccacccacagacacgggctgactggggtgtctgccccccttgggggggggcagcacagggcctcaggcctgggtgccacctggcacctagaagatgcctgtgccctggttcttgctgtccttggcactgggccgaagcccagtggtcctttctctggagaggcttgtggggcctcaggacgctacccactgctctccggtgagtctggaaccctggggagacgaggaaaggctcagggttcagtttttggctcagcaaagccttagcctggctcctgtcactgctgccactgccagaactgccctgtctggtctgtctggtgctgatggtagaagagaagaacggggaaggggcaagagctgggtctgtctttctctgggagggtctgggaatacggagccccagaaaaaggtaggtggaggtcttaggcagagaacagtgcctagatggtgggggcacaaattctgactctcctttctttccttcccagggcctctcctgccgcctctggggtaagtatccctacttttaaaaagaatttcccaggttggccgaagggagcagagctgtcccaggcccatgccctccatgcccacctcagcctaggacagccaagttctttggctctctgggtatgtcaggtgccaccaaattctgggcttggaacagcttcagctcccacccgctcctccacacacagacagtgacatactctgcctgcctggggacatcgtgcctgctccgggccccgtgctggcgcctacgcacctgcagacagagctggtgctgaggtgccagaaggagaccgactgtgacctctgtctgcgtgtggctgtccacttggccgtgcatggtgagcaagtcatcctgtgacagtgcatgtgtacacgtgagtgtgtctggggtgggcatgagggccaggggatctctcaagcagtgctaggcatcctcagtgttctcctggaggacaccagcagaaggacccccaggccagtgtggtctccccagcccctgcttcccagcactgggctttccagaaggaagccaacgccaaagccagccagcccagagcagggggcctcacccagggccttgctcttgggtccttctagggcactgggaagagcctgaagatgaggaaaagtttggaggagcagctgactcaggggtggaggagcctaggaatggtgaggagaacctggctggcccaactgccccatgccaaggcctggcctgccgctcctgggcctgactgacccctgccctgttgcccacagcctctctccaggcccaagtcgtgctctccttccaggcctaccctactgcccgctgcgtcctgctggaggtgcaagtgcctgctgcccttgtgcagtttggtcagtctgtggtatgcaaaataataataatcaccttctaaacctaaaatctataaaactttttcacatgcattatctctttgaggattacaaaagaattaaatttattgaaacccttcagtaccaggcattacagccagtgttttacaggtatcaacttatttaattctcacaacagccatgtgaggtgggactattcttttgattctgatcagcgctgtgggcaagtcccttcagcctgttatgcctcagcttttatgtctgtaaaatggggatgagaatagttctacttcatatgcttgactgcgagaaatcaccaagcgtttttcagggtgcttctactattttcccctcctaccagcagtgtatgggagtcctagttgcttcccatctttgccaacacttgatggtgtaattttattttatttttaaattaaatatatttgaattttaaatatatgggaccctccatgaatttgcatgtcatcctcaggcacgggccttgctaatcttttctgtattgttccagttgtagtatatgtggtgccaaaacaagcataagtgttgtaattgtcataatttttctgcatatgtagtggtttgccattgtggttttaatttgtatcttccaatgactgatgaagttgagcacttttttcacatgcttattggctatttgtgtaacttccttgtgaaatatctcttaaagtttttttgtttttgtttttgtttttgtttttgccacataaaaaaacaatagttctggccgggcacagtggttcacacctgtaatcccagcactttgggaggctgaggcgggcagatcacgaagtcaggagattgagaccatcctggctaacactgtgaaaccctgcctccactaaaaaaatacaaaaaattagccaggcatggtggtgggcgcctgtagacccagctactcgggaggcagaggcaggagaatggcgtgaacccgggaggtggagcttgcagtgagccgagatcgcgccactgcactccagcctgggcgacagagcgagattccgtctcaaaaaaaaagaatagtcccacctcacatgactgttgtgagaattaaattaagttggtacctgtaaaacactggatgtaatgcctggcactgaataatttcaataaatttaattcttttgtaatcctcaaaactacctgatgaggcattattagtatcctcattttccagatagataaaatgaggcttggagaggggaggtctgtgggctggatgcacttctctgtactcttggaccaaagaaagagtcctaccatacataccatggtatacttaccatggtgtaagtaccatggtgcagggtgttggggcttctccctgccttaggaggccacatgtacctggaaggtctatttccactggggtcaaatcactcaaaccctttgactttccctccaacctccagcccccagccaatatcctatctggagaattgtagactgggagaacatctgcttggtccatgtcacaagcagttgtaaggaacactgaggcactgggttgagtgtgagaaccacttctgtggggaggggtgtgccatattgtgttggggtgtctcatctccttagctttggccaggtgatctagcacagcagggtgggtgcagggatttaaatgtctagggccttttcccgccctggtgacactcttactgaggacatttgctttagaattgaggccccttgaaagaaaggtgaatagtagatttcaggctatacagtataaatacagtcattagttgggggaggagggcagtgagcagagtggtccctgcagatgatcccacagcccttggcctggattctgagccctgcaccgccagccttcctcacccctctcctcacagggctctgtggtatatgactgcttcgaggctgccctagggagtgaggtacgaatctggtcctatactcagcccaggtacgagaaggaactcaaccacacacagcagctgcctggtaagtggacccccaagtcctggccccctagcctctgtcccctctggccattccccctcctgatttcaccctcttctagctccatccactctccggcaggggtctgagctgctatcctccccagagtcagtccctcggaccttctctctctgggtgatatggctttccagcccctggggaaggttctttgagcattggatagatgtgggtggtatgtaggggatggggagccattcctaatgcccccctgggagccaaattgcccccacttctttccttggcccccagccccactggaggctcttctgtgatctctcctcagactgcagggggctcgaagtctggaacagcatcccgagctgctggggtaggggctagggccagtgggccgggggtagggaggggcagggtctggagtataagaaacccttggagtccacttcagatatgggctaccacatctcagaagctcacagaacatattcattcattcattcattcattcatttgttcataacacattaattgcagtatctgtgctaagcactggaaatagaaagatgaatcttgggtcaggctcagtggctcatgcctgtaatcccagaactttgggaggccgaggtagaaggatcacttgagctcaaaagttcaagacgagcctgggcaacatggcaaatccccgtctctaccaaaaatacaaaaattaacaggacatggtggtgtgcatttgtggtcccagctactcaggaggctgaggcaggagaatcacttgagcctgggaggcaggggctacagtaagctgagactgcaccattgcacaccagcctgggtgacagagcaagactccgtctcaaaaaacaaaacaaaacaaaacaaaaacaaaaaacttgaaataaaagctaagaaagtcaagggtctaacttttttcccacgtactatttggattttgttttcgttttgtattttcttttttattgtgtataacatacatacataaaagtatgtaaagggtactgattttcttttttttttttttttttgagacagagtctcgctctgtcgctcaggctggagtgcagtggtgcaatctcggctcactgcaagctccgcctcccaggttcacgccattctcctgcctcagcctcccgagtagctgggactacaggcacccgccaccacgcctggctaatttttttttttttttagtagagacagggtttcaccgtgttagccaggatggtcttgatctcctgaccttgtgatccgcctgcctcagcctcccaaagtgctgggattacaggcgtgagccaccacgcccagccaaagggtactgatttccatgtccagttcttttttttttttttttttttggcggaatcttgctctgtcgcctaggctggactgcagtggtgtgatctcagctcactgcaacctctgccttctgggttcaagcgattctcctgcctcagcctcccaagcagctgggattacagacgtgcaccaccacgcacagctaatttttgtatttttagtagacatggagtttcaccatgctggccaggctggtcttgaactcctgacctcgtgatcctcccacctcggcctcccaaagtgctgggattacaggcatgagccgccacgtccggccaatttgtttttatatatgtatacacttgcataactagcacccagatcaatacataaatactgtgaatacatcacatactgtgatgttttctgaactactaaatgttttcaacttcattttctttttgccttcttaaaattaaagttggcctgcctctttggcaactcattaaagactattcaacaccagagttttgaaaacacagatgtgtatatcatggatttcatttcttccttcattaagtagacattgattcatttattcaacagatatttattaatttctgtgtaccaggcaaatccctggacactggaaatattaataaatcaataaatgaagatgacaaaaaacccgaccccacggagctggtgtcagggtcagggtgggggtgaggaaggacacaacaaacacatggagatgtgaagaatgcagtaagttagacagtgattagcactaaggagaacatttgtggaagggctggggaaggttgggagttgtagaggtcagggatggtctcattctggtgagcagagacctgaaagaggtgagggaggagccatatatttgagggaagagagaatagccagcaaaaagggcctggggtgggagtatgtcaggggtgtttaagaaatagtaaggagggggccgggcgcggtggctcacgcctgtaatcccagcactttgggaggccgaggctggcggatcacgaggtcaggagatcgagaccatcctggctaacacggtgaaaccccatctctacaaaaaatacaaaaaaatcagctgggcatggtggcaggcgcctgtagtcccagctactcgggagcctgaggcaggagaatggcttgaaccccaggaggcagagcttgcagtgagccgagatcacaccactgcactccagcctgggcgacagagccagactccatctcaaaaaaaaaaaaaggaaaaaaaaaagagagagaaacagtaaggaggtccttaataactctgcagcagagttattaaggacacaaatgccataggctgtgcgcgatggctcacgtctgcaatcccagcactttggggaagctgaggcaggaggattgcttgaggttaggagctcaagaccagcctggccaacatgagcgaaatcccatctctactaaaaatacaaaaactagccgggggtggtgacacacgcctgtaatcccagctactcgggtggctgaggcaagagaatcgcttgaacccaggaggtggaggttgcagtgagctatcgtgccaatgcactccagcctgggcaacagagcaagactccctctcaaaaaaaaaaaaggacacaagtatcaagaggtaaggtcagaaaggtcacagttctgaacagaggaaaatgacttgttttaaagaggttacaagatctttctgcagagggagaagcagggagaatagctcttctccgaccacacactagggtctccacgggcttggctttgggcagctgctaggagcaaagtctggtctgaaatgatgacacacgctctgccctccgagagcctcccagtctagggggtttgaaggaaactccaaagggtcagtcggggatgcagaagaggtgaggaagtctaagctgcgctctctttgcctctcccaccagccctgccctggctcaacgtgtcagcagatggtgacaacgtgcatctggttctgaatgtctctgaggagcagcacttcggcctctccctgtactggaatcaggtccagggccccccaaaaccccggtggcacaaaaacctggtgaggcctcccccttcccaagtccattcccactgtaggccgatgcctgtgcaaaggacgcagtgccatatcagagaggatccttgaagaggactcaccccaagcaagggaaaattggtgggggaacttctgccttcctggtttccttgactttggcctcctcctcttcctccttatcttctccaacctccttcctttatttgttccacagactggaccgcagatcattaccttgaaccacacagacctggttccctgcctctgtattcaggtaggagcagagtctagctgggtgccagaagaggagtgggaagatgatgatgggggtgatccctgccttcctggtctcaccattcttcaaacccttcattgaggtggagactgtggctccctggggtggctggccctcccttgacccttgctgtcctatgccttctgtctattacattccctgaatgctctccctgatcctccacagaactcctgcttattcttcatggccccattcaaatgtcaccttctccttgaaacctttccctactcctccagttctgtctttgtgttcccctggcgggcagagcatgtgctacgaacttggactggtttgaatcttggctcttgccatttgctagctgtgtaaccttgggcaagtcacttcacctctgtgagcctgtttctcatctgtaaaatgggaataataatagtaacagcctcatggggctgttataagaatgtgtgccacacccaggcttaaatatgctggctctttcctcttcctctgtacatttatttatttttttagacaaggtctcactctgttgcccaggctggagtgcagtggcacaatcatggcacactgcagcctcagccccatgggctcaagtgatcctcctgtctcagcctcccaagtagctggaactactggtgagcactaccatactcagctagtttttttttgttttgtgtagagacggggtcttgctatgttacccaggctgttctgaattcctgggcttatgctatcctcccacctcagcctcccaccaagtgctgggattataagcatgagccactgtggcttgccctgattgcactttttttttttttttttttaagacagagtctttctctgtcgcccaggctggagcaccgtggcgtgatctcggctcactgcaagctgcttctcctgggttcacgccattctcctgcctcagcctcgctgagtagctgggactacaggtgcctgcaaccacgcccagctaattttttgtattttcagtaaagacagggtttcaccgtgttagccaggatggtctcgatctcctgaccttatgatccacaagcctcgtcctcccaaagtgctgggattacaggcatgacccactgtgcccagccgctgattgcacatttaattggtcatcaggtctcatccatcttacctctgacattaatgtctctcattttctttccccctcctctccatctcagtccagcttagggctctatcatctgttttctagactgtttcaacacctccaagctcccctcccttcccatcactttcctggcattctgggcccatattctgcccccaacggtgccttttcactctattttccccatgattccccttcatgagaacattgttacatccagtggagctacttaccaagatacagctagctccctgccttttctcaggtggttcccattacctcaaatgccctcacctccttcccaaagcttttccccaaccacccggcctctcctagctccaaatccccttgcacttctatctttccttgtccatttatcacttcatttcttttattttcttaaattttttttttttttttagagacagcattttgctctgtcacccatggtagagtgcagtggcatgaacacgtctcattgcagccccaagctcccaggttcaagggatcctcctgcctcagcctctgcagctgggactgcaggcatgcgccaccatgcctggctaattgtttccttttttttttttttttttttttaatggagtttcactcttttgcccaggatggagtgcagtggcgtgatctcggctcactgcaacttccgcctcccaggttcaagccattctcctgcctcagcctcccaagtagctgagattacaggcacacaccaccatgcccagctaatttttgtatttttagtagagacagggtttcaccatgttggtcaggctggtcccaaattcctgacctcgtgatccacccgcctcggccgcccaaagtgctgggattacaggcgtgagccactgtgcccagcctgttttcattttttaatgttttgtggcgatgggccaccacacccagctcaatcacttactttcttatttgggcatctaatttcttcttgtacacaacagatgctcaataaatattatgaaatgaatgagtgttttactaatttatataaatattttatccttactacaagtgtgagtttgtgatttccttgaaggcaagcaaatcatatctaattcaaatgtaatagctttgcaagagccttgcacatagcgcctacttgttttttgtttttttgtgtttttgttttttttttgtttttttgtcttttttgagacagagtctcgctctattggcaggctggagtacagtggcgtgatctcggctcactgcaatctctgcctcctggattcaagcaattcttctgcctcagcctcccaagtagctgggactacaagtgcatgccaccatgcccggctaatttttgtattttcagtagagacggggtttcagcatgttggccagatggtctcgatctcttgacctcgtgatccgcccaccttggcctcccaaagtgctgggattacaggggtgagccaccgcgcccagccttgttttgtttttaaacaaggtaacagtatgaggtcctcactgttgaatgagtgaataaatgttactgcctaacacagccataggacacagcagatgttcatgagatgtatgctgtgatttaaatggcttcattgccaaacacagtgcctgccacatagtcggtgttcctaactaaaggcttgatggataaattaatgtattacctctagtgcttagcatagagctatgcacataataggcactcttgaaatgtctgttgaaagaataaatgaatgtgtccttagaacttagcacattccccaacacatagcaggtgcttacacaagtgattgtggaatgaattaaaattaattatccaccaggcacagtggctcacacctgtaatcccagcactttgggaggccaaggtgggtggatcacgaggtcaggagtttgagaccagcctggcctaacatagtgaaacccagtctctactaaaagtacaaaaattagccaggcatggtgatgtgcgcctgtagtccctgctacttgggaagctgaggcaggagaatcacttgaacccaggaggcggaggttgtggtgagctgagatcacaccactgcactccagcctgggcaacagagtgagattccatctcaaaaaataaaaaaataataaaaatttaattatccaaggtctcttgtgcttgccatactgctaagacacaatggtaggcactcattaaaagtctgttgaatgggccaggcgcggtggctcacgcttgtaatcccaacactttgggaggctgagacgggtggatcacttgaggtcaggagttcgagaccagcctgatcaatgtggtgaaaccccatctctactaaaaatacaaaaattaaccagttagccggccgttgtggcatgttcctgtaatcgcagctcctcaggagactgagatgggagaatcgcttgaacctgggaggtggaggttgtagtgagccaagattgcaccactgcactccagcctgggcgacagagcgagactctatctcaaaaaaaaaaaaaagtttgttaatgaagatgttgccagtgcccagcattatgtttgctggaagaatagatgtgagcacctccaggttttgtaaaaggcaggaagacccagcaagtgtttgtgaaatacctgctgaatgagtgcatccccactgtccagcagagggccaggcacatgcccatggaggggacctgagcagacccccatttcctttccaggtgtggcctctggaacctgactccgttaggacgaacatctgccccttcagggagggtgagccgaccggcctggggctggggttggggtgttgcgagcgatgggtacctggcctgcggtgactgtgccctttccttgcagacccccgcgcacaccagaacctctggcaagccgcccgactgcaactgctgaccctgcagagctggctgctggacgcaccgtgctcgctgcccgcagaagcggcactgtgctggcgggctccgggtggggacccctgccagccactggtcccaccgctttcctgggagaacgtcactgtggacgtaagtgaagcagagggcacctcccgtggtgaggggagagtggggaaccgggggtccccttttgtgatcccacccattcctctctttccacagaaggttctcgagttcccattgctgaaaggccaccctaacctctgtgttcaggtcagaaaggggtgcatagtgctgggctggaggctggacctgggcagaccccccagccaagggggtcttagttcttgggccgctaaagcatagtggttgccagcttcctctatgggagttccactgcctactttagtagtgcgcgggaccctgggcaactcacttcacctctctgaacgtcagtttcctcatctgtttaatgcagatgataatacagtaactacctcatggagtggttgtgacaatgaaataagagaagtgcttccccttaggaatcggtacagactaaatgctccataaatgtagccacttttattattgctatccttattctatttccatacctgtagaatgggttgctctacagtttcaaagggtgattataagaacattcactcatccggccaggcgcggtggctcacgcctgtaatcccagcactttgggaggccgaggcgggcagatcacgaggtcaggacatcaagaccatcctggctaacatggtgaaaccccatctctactaaaaatacaaaaaattagccggtcgtggtggtgggcacctgtagtcccagctactaggaaggctggggcaggagaatggcgtgaacctgggaggctgagcttgcagtgagctgagagggcgccactgcactccagcctgggtgacagagtgagactgggcgacagagtgaaactccgtctcaaaaaaaaaaaaaattcactcattcaagattttttgagcagcacaagtcactgttttaggcacttgtgatagaccctaacatctctaccctcatagaacttatattgtaatggagaaaggcaggcaacagacattgtaaataaatcatatagtatcttaaaattgcatacaaataccatgggaaagggataaggtgggactggggttgcaatttttagcagggtggtcatgtgagaaaggaatctctttgagaaggttagatgagaggggaaccatgctccgtaagacataaaaacagctttagggtcagaagacgctttatacagatgatctcacaaggctggggcagagaaagatgtagtgattcctaatcacccagccttgaatccacatctgcctcaggtcagattgagtgcagattcccaacccaacaggccttctgttgcctgccccattctggtctttctgcctttggcttttgcttttcttagtggccctaaccatggtctcttcccagcaggtgaacagctcggagaagctgcagctgca

SEQ ID NO: 12545 - DNA, 1354 bp, Homo sapiens
aaaacgaaagcactccgtgctggaagtaggaggagagtcaggactcccaggacagagagtgcacaaactacccagcacagccccctccgccccctctggaggctgaagagggattccagcccctgccacccacagacacgggctgactggggtgtctgccccccttgggggggggcagcacagggcctcaggcctgggtgccacctggcacctagaagatgcctgtgccctggttcttgctgtccttggcactgggccgaagcccagtggtcctttctctggagaggcttgtggggcctcaggacgctacccactgctctccgggcctctcctgccgcctctgggacagtgacatactctgcctgcctggggacatcgtgcctgctccgggccccgtgctggcgcctacgcacctgcagacagagctggtgctgaggtgccagaaggagaccgactgtgacctctgtctgcgtgtggctgtccacttggccgtgcatgcctctctccaggcccaagtcgtgctctccttccaggcctaccctactgcccgctgcgtcctgctggaggtgcaagtgcctgctgcccttgtgcagtttggtcagtctgtgggctctgtggtatatgactgcttcgaggctgccctagggagtgaggtacgaatctggtcctatactcagcccaggtacgagaaggaactcaaccacacacagcagctgcctgccctgccctggctcaacgtgtcagcagatggtgacaacgtgcatctggttctgaatgtctctgaggagcagcacttcggcctctccctgtactggaatcaggtccagggccccccaaaaccccggtggcacaaaaacctggtgaggcctcccccttcccaagtccattcccactgtaggccgatgcctgtgcaaaggacgcagtgccatatcagagaggatccttgaagaggactcaccccaagcaagggaaaattgactggaccgcagatcattaccttgaaccacacagacctggttccctgcctctgtattcaggtgtggcctctggaacctgactccgttaggacgaacatctgccccttcagggaggacccccgcgcacaccagaacctctggcaagccgcccgactgcaactgctgaccctgcagagctggctgctggacgcaccgtgctcgctgcccgcagaagcggcactgtgctggcgggctccgggtggggacccctgccagccactggtcccaccgctttcctgggagaacgtcactgtggacaaggttctcgagttcccattgctgaaaggccaccctaacctctgtgttcaggtgaacagctcggagaagctgcagctgca

SEQ ID NO: 12546 - DNA, 16301 bp, Homo sapiens
atgcctgtgccctggttcttgctgtccttggcactgggccgaagcccagtggtcctttctctggagaggcttgtggggcctcaggacgctacccactgctctccggtgagtctggaaccctggggagacgaggaaaggctcagggttcagtttttggctcagcaaagccttagcctggctcctgtcactgctgccactgccagaactgccctgtctggtctgtctggtgctgatggtagaagagaagaacggggaaggggcaagagctgggtctgtctttctctgggagggtctgggaatacggagccccagaaaaaggtaggtggaggtcttaggcagagaacagtgcctagatggtgggggcacaaattctgactctcctttctttccttcccagggcctctcctgccgcctctggggtaagtatccctacttttaaaaagaatttcccaggttggccgaagggagcagagctgtcccaggcccatgccctccatgcccacctcagcctaggacagccaagttctttggctctctgggtatgtcaggtgccaccaaattctgggcttggaacagcttcagctcccacccgctcctccacacacagacagtgacatactctgcctgcctggggacatcgtgcctgctccgggccccgtgctggcgcctacgcacctgcagacagagctggtgctgaggtgccagaaggagaccgactgtgacctctgtctgcgtgtggctgtccacttggccgtgcatggtgagcaagtcatcctgtgacagtgcatgtgtacacgtgagtgtgtctggggtgggcatgagggccaggggatctctcaagcagtgctaggcatcctcagtgttctcctggaggacaccagcagaaggacccccaggccagtgtggtctccccagcccctgcttcccagcactgggctttccagaaggaagccaacgccaaagccagccagcccagagcagggggcctcacccagggccttgctcttgggtccttctagggcactgggaagagcctgaagatgaggaaaagtttggaggagcagctgactcaggggtggaggagcctaggaatggtgaggagaacctggctggcccaactgccccatgccaaggcctggcctgccgctcctgggcctgactgacccctgccctgttgcccacagcctctctccaggcccaagtcgtgctctccttccaggcctaccctactgcccgctgcgtcctgctggaggtgcaagtgcctgctgcccttgtgcagtttggtcagtctgtggtatgcaaaataataataatcaccttctaaacctaaaatctataaaactttttcacatgcattatctctttgaggattacaaaagaattaaatttattgaaacccttcagtaccaggcattacagccagtgttttacaggtatcaacttatttaattctcacaacagccatgtgaggtgggactattcttttgattctgatcagcgctgtgggcaagtcccttcagcctgttatgcctcagcttttatgtctgtaaaatggggatgagaatagttctacttcatatgcttgactgcgagaaatcaccaagcgtttttcagggtgcttctactattttcccctcctaccagcagtgtatgggagtcctagttgcttcccatctttgccaacacttgatggtgtaattttattttatttttaaattaaatatatttgaattttaaatatatgggaccctccatgaatttgcatgtcatcctcaggcacgggccttgctaatcttttctgtattgttccagttgtagtatatgtggtgccaaaacaagcataagtgttgtaattgtcataatttttctgcatatgtagtggtttgccattgtggttttaatttgtatcttccaatgactgatgaagttgagcacttttttcacatgcttattggctatttgtgtaacttccttgtgaaatatctcttaaagtttttttgtttttgtttttgtttttgtttttgccacataaaaaaacaatagttctggccgggcacagtggttcacacctgtaatcccagcactttgggaggctgaggcgggcagatcacgaagtcaggagattgagaccatcctggctaacactgtgaaaccctgcctccactaaaaaaatacaaaaaattagccaggcatggtggtgggcgcctgtagacccagctactcgggaggcagaggcaggagaatggcgtgaacccgggaggtggagcttgcagtgagccgagatcgcgccactgcactccagcctgggcgacagagcgagattccgtctcaaaaaaaaagaatagtcccacctcacatgactgttgtgagaattaaattaagttggtacctgtaaaacactggatgtaatgcctggcactgaataatttcaataaatttaattcttttgtaatcctcaaaactacctgatgaggcattattagtatcctcattttccagatagataaaatgaggcttggagaggggaggtctgtgggctggatgcacttctctgtactcttggaccaaagaaagagtcctaccatacataccatggtatacttaccatggtgtaagtaccatggtgcagggtgttggggcttctccctgccttaggaggccacatgtacctggaaggtctatttccactggggtcaaatcactcaaaccctttgactttccctccaacctccagcccccagccaatatcctatctggagaattgtagactgggagaacatctgcttggtccatgtcacaagcagttgtaaggaacactgaggcactgggttgagtgtgagaaccacttctgtggggaggggtgtgccatattgtgttggggtgtctcatctccttagctttggccaggtgatctagcacagcagggtgggtgcagggatttaaatgtctagggccttttcccgccctggtgacactcttactgaggacatttgctttagaattgaggccccttgaaagaaaggtgaatagtagatttcaggctatacagtataaatacagtcattagttgggggaggagggcagtgagcagagtggtccctgcagatgatcccacagcccttggcctggattctgagccctgcaccgccagccttcctcacccctctcctcacagggctctgtggtatatgactgcttcgaggctgccctagggagtgaggtacgaatctggtcctatactcagcccaggtacgagaaggaactcaaccacacacagcagctgcctggtaagtggacccccaagtcctggccccctagcctctgtcccctctggccattccccctcctgatttcaccctcttctagctccatccactctccggcaggggtctgagctgctatcctccccagagtcagtccctcggaccttctctctctgggtgatatggctttccagcccctggggaaggttctttgagcattggatagatgtgggtggtatgtaggggatggggagccattcctaatgcccccctgggagccaaattgcccccacttctttccttggcccccagccccactggaggctcttctgtgatctctcctcagactgcagggggctcgaagtctggaacagcatcccgagctgctggggtaggggctagggccagtgggccgggggtagggaggggcagggtctggagtataagaaacccttggagtccacttcagatatgggctaccacatctcagaagctcacagaacatattcattcattcattcattcattcatttgttcataacacattaattgcagtatctgtgctaagcactggaaatagaaagatgaatcttgggtcaggctcagtggctcatgcctgtaatcccagaactttgggaggccgaggtagaaggatcacttgagctcaaaagttcaagacgagcctgggcaacatggcaaatccccgtctctaccaaaaatacaaaaattaacaggacatggtggtgtgcatttgtggtcccagctactcaggaggctgaggcaggagaatcacttgagcctgggaggcaggggctacagtaagctgagactgcaccattgcacaccagcctgggtgacagagcaagactccgtctcaaaaaacaaaacaaaacaaaacaaaaacaaaaaacttgaaataaaagctaagaaagtcaagggtctaacttttttcccacgtactatttggattttgttttcgttttgtattttcttttttattgtgtataacatacatacataaaagtatgtaaagggtactgattttcttttttttttttttttttgagacagagtctcgctctgtcgctcaggctggagtgcagtggtgcaatctcggctcactgcaagctccgcctcccaggttcacgccattctcctgcctcagcctcccgagtagctgggactacaggcacccgccaccacgcctggctaatttttttttttttttagtagagacagggtttcaccgtgttagccaggatggtcttgatctcctgaccttgtgatccgcctgcctcagcctcccaaagtgctgggattacaggcgtgagccaccacgcccagccaaagggtactgatttccatgtccagttcttttttttttttttttttttggcggaatcttgctctgtcgcctaggctggactgcagtggtgtgatctcagctcactgcaacctctgccttctgggttcaagcgattctcctgcctcagcctcccaagcagctgggattacagacgtgcaccaccacgcacagctaatttttgtatttttagtagacatggagtttcaccatgctggccaggctggtcttgaactcctgacctcgtgatcctcccacctcggcctcccaaagtgctgggattacaggcatgagccgccacgtccggccaatttgtttttatatatgtatacacttgcataactagcacccagatcaatacataaatactgtgaatacatcacatactgtgatgttttctgaactactaaatgttttcaacttcattttctttttgccttcttaaaattaaagttggcctgcctctttggcaactcattaaagactattcaacaccagagttttgaaaacacagatgtgtatatcatggatttcatttcttccttcattaagtagacattgattcatttattcaacagatatttattaatttctgtgtaccaggcaaatccctggacactggaaatattaataaatcaataaatgaagatgacaaaaaacccgaccccacggagctggtgtcagggtcagggtgggggtgaggaaggacacaacaaacacatggagatgtgaagaatgcagtaagttagacagtgattagcactaaggagaacatttgtggaagggctggggaaggttgggagttgtagaggtcagggatggtctcattctggtgagcagagacctgaaagaggtgagggaggagccatatatttgagggaagagagaatagccagcaaaaagggcctggggtgggagtatgtcaggggtgtttaagaaatagtaaggagggggccgggcgcggtggctcacgcctgtaatcccagcactttgggaggccgaggctggcggatcacgaggtcaggagatcgagaccatcctggctaacacggtgaaaccccatctctacaaaaaatacaaaaaaatcagctgggcatggtggcaggcgcctgtagtcccagctactcgggagcctgaggcaggagaatggcttgaaccccaggaggcagagcttgcagtgagccgagatcacaccactgcactccagcctgggcgacagagccagactccatctcaaaaaaaaaaaaaggaaaaaaaaaagagagagaaacagtaaggaggtccttaataactctgcagcagagttattaaggacacaaatgccataggctgtgcgcgatggctcacgtctgcaatcccagcactttggggaagctgaggcaggaggattgcttgaggttaggagctcaagaccagcctggccaacatgagcgaaatcccatctctactaaaaatacaaaaactagccgggggtggtgacacacgcctgtaatcccagctactcgggtggctgaggcaagagaatcgcttgaacccaggaggtggaggttgcagtgagctatcgtgccaatgcactccagcctgggcaacagagcaagactccctctcaaaaaaaaaaaaggacacaagtatcaagaggtaaggtcagaaaggtcacagttctgaacagaggaaaatgacttgttttaaagaggttacaagatctttctgcagagggagaagcagggagaatagctcttctccgaccacacactagggtctccacgggcttggctttgggcagctgctaggagcaaagtctggtctgaaatgatgacacacgctctgccctccgagagcctcccagtctagggggtttgaaggaaactccaaagggtcagtcggggatgcagaagaggtgaggaagtctaagctgcgctctctttgcctctcccaccagccctgccctggctcaacgtgtcagcagatggtgacaacgtgcatctggttctgaatgtctctgaggagcagcacttcggcctctccctgtactggaatcaggtccagggccccccaaaaccccggtggcacaaaaacctggtgaggcctcccccttcccaagtccattcccactgtaggccgatgcctgtgcaaaggacgcagtgccatatcagagaggatccttgaagaggactcaccccaagcaagggaaaattggtgggggaacttctgccttcctggtttccttgactttggcctcctcctcttcctccttatcttctccaacctccttcctttatttgttccacagactggaccgcagatcattaccttgaaccacacagacctggttccctgcctctgtattcaggtaggagcagagtctagctgggtgccagaagaggagtgggaagatgatgatgggggtgatccctgccttcctggtctcaccattcttcaaacccttcattgaggtggagactgtggctccctggggtggctggccctcccttgacccttgctgtcctatgccttctgtctattacattccctgaatgctctccctgatcctccacagaactcctgcttattcttcatggccccattcaaatgtcaccttctccttgaaacctttccctactcctccagttctgtctttgtgttcccctggcgggcagagcatgtgctacgaacttggactggtttgaatcttggctcttgccatttgctagctgtgtaaccttgggcaagtcacttcacctctgtgagcctgtttctcatctgtaaaatgggaataataatagtaacagcctcatggggctgttataagaatgtgtgccacacccaggcttaaatatgctggctctttcctcttcctctgtacatttatttatttttttagacaaggtctcactctgttgcccaggctggagtgcagtggcacaatcatggcacactgcagcctcagccccatgggctcaagtgatcctcctgtctcagcctcccaagtagctggaactactggtgagcactaccatactcagctagtttttttttgttttgtgtagagacggggtcttgctatgttacccaggctgttctgaattcctgggcttatgctatcctcccacctcagcctcccaccaagtgctgggattataagcatgagccactgtggcttgccctgattgcactttttttttttttttttttaagacagagtctttctctgtcgcccaggctggagcaccgtggcgtgatctcggctcactgcaagctgcttctcctgggttcacgccattctcctgcctcagcctcgctgagtagctgggactacaggtgcctgcaaccacgcccagctaattttttgtattttcagtaaagacagggtttcaccgtgttagccaggatggtctcgatctcctgaccttatgatccacaagcctcgtcctcccaaagtgctgggattacaggcatgacccactgtgcccagccgctgattgcacatttaattggtcatcaggtctcatccatcttacctctgacattaatgtctctcattttctttccccctcctctccatctcagtccagcttagggctctatcatctgttttctagactgtttcaacacctccaagctcccctcccttcccatcactttcctggcattctgggcccatattctgcccccaacggtgccttttcactctattttccccatgattccccttcatgagaacattgttacatccagtggagctacttaccaagatacagctagctccctgccttttctcaggtggttcccattacctcaaatgccctcacctccttcccaaagcttttccccaaccacccggcctctcctagctccaaatccccttgcacttctatctttccttgtccatttatcacttcatttcttttattttcttaaattttttttttttttttagagacagcattttgctctgtcacccatggtagagtgcagtggcatgaacacgtctcattgcagccccaagctcccaggttcaagggatcctcctgcctcagcctctgcagctgggactgcaggcatgcgccaccatgcctggctaattgtttccttttttttttttttttttttttaatggagtttcactcttttgcccaggatggagtgcagtggcgtgatctcggctcactgcaacttccgcctcccaggttcaagccattctcctgcctcagcctcccaagtagctgagattacaggcacacaccaccatgcccagctaatttttgtatttttagtagagacagggtttcaccatgttggtcaggctggtcccaaattcctgacctcgtgatccacccgcctcggccgcccaaagtgctgggattacaggcgtgagccactgtgcccagcctgttttcattttttaatgttttgtggcgatgggccaccacacccagctcaatcacttactttcttatttgggcatctaatttcttcttgtacacaacagatgctcaataaatattatgaaatgaatgagtgttttactaatttatataaatattttatccttactacaagtgtgagtttgtgatttccttgaaggcaagcaaatcatatctaattcaaatgtaatagctttgcaagagccttgcacatagcgcctacttgttttttgtttttttgtgtttttgttttttttttgtttttttgtcttttttgagacagagtctcgctctattggcaggctggagtacagtggcgtgatctcggctcactgcaatctctgcctcctggattcaagcaattcttctgcctcagcctcccaagtagctgggactacaagtgcatgccaccatgcccggctaatttttgtattttcagtagagacggggtttcagcatgttggccagatggtctcgatctcttgacctcgtgatccgcccaccttggcctcccaaagtgctgggattacaggggtgagccaccgcgcccagccttgttttgtttttaaacaaggtaacagtatgaggtcctcactgttgaatgagtgaataaatgttactgcctaacacagccataggacacagcagatgttcatgagatgtatgctgtgatttaaatggcttcattgccaaacacagtgcctgccacatagtcggtgttcctaactaaaggcttgatggataaattaatgtattacctctagtgcttagcatagagctatgcacataataggcactcttgaaatgtctgttgaaagaataaatgaatgtgtccttagaacttagcacattccccaacacatagcaggtgcttacacaagtgattgtggaatgaattaaaattaattatccaccaggcacagtggctcacacctgtaatcccagcactttgggaggccaaggtgggtggatcacgaggtcaggagtttgagaccagcctggcctaacatagtgaaacccagtctctactaaaagtacaaaaattagccaggcatggtgatgtgcgcctgtagtccctgctacttgggaagctgaggcaggagaatcacttgaacccaggaggcggaggttgtggtgagctgagatcacaccactgcactccagcctgggcaacagagtgagattccatctcaaaaaataaaaaaataataaaaatttaattatccaaggtctcttgtgcttgccatactgctaagacacaatggtaggcactcattaaaagtctgttgaatgggccaggcgcggtggctcacgcttgtaatcccaacactttgggaggctgagacgggtggatcacttgaggtcaggagttcgagaccagcctgatcaatgtggtgaaaccccatctctactaaaaatacaaaaattaaccagttagccggccgttgtggcatgttcctgtaatcgcagctcctcaggagactgagatgggagaatcgcttgaacctgggaggtggaggttgtagtgagccaagattgcaccactgcactccagcctgggcgacagagcgagactctatctcaaaaaaaaaaaaaagtttgttaatgaagatgttgccagtgcccagcattatgtttgctggaagaatagatgtgagcacctccaggttttgtaaaaggcaggaagacccagcaagtgtttgtgaaatacctgctgaatgagtgcatccccactgtccagcagagggccaggcacatgcccatggaggggacctgagcagacccccatttcctttccaggtgtggcctctggaacctgactccgttaggacgaacatctgccccttcagggagggtgagccgaccggcctggggctggggttggggtgttgcgagcgatgggtacctggcctgcggtgactgtgccctttccttgcagacccccgcgcacaccagaacctctggcaagccgcccgactgcaactgctgaccctgcagagctggctgctggacgcaccgtgctcgctgcccgcagaagcggcactgtgctggcgggctccgggtggggacccctgccagccactggtcccaccgctttcctgggagaacgtcactgtggacgtaagtgaagcagagggcacctcccgtggtgaggggagagtggggaaccgggggtccccttttgtgatcccacccattcctctctttccacagaaggttctcgagttcccattgctgaaaggccaccctaacctctgtgttcaggtcagaaaggggtgcatagtgctgggctggaggctggacctgggcagaccccccagccaagggggtcttagttcttgggccgctaaagcatagtggttgccagcttcctctatgggagttccactgcctactttagtagtgcgcgggaccctgggcaactcacttcacctctctgaacgtcagtttcctcatctgtttaatgcagatgataatacagtaactacctcatggagtggttgtgacaatgaaataagagaagtgcttccccttaggaatcggtacagactaaatgctccataaatgtagccacttttattattgctatccttattctatttccatacctgtagaatgggttgctctacagtttcaaagggtgattataagaacattcactcatccggccaggcgcggtggctcacgcctgtaatcccagcactttgggaggccgaggcgggcagatcacgaggtcaggacatcaagaccatcctggctaacatggtgaaaccccatctctactaaaaatacaaaaaattagccggtcgtggtggtgggcacctgtagtcccagctactaggaaggctggggcaggagaatggcgtgaacctgggaggctgagcttgcagtgagctgagagggcgccactgcactccagcctgggtgacagagtgagactgggcgacagagtgaaactccgtctcaaaaaaaaaaaaaattcactcattcaagattttttgagcagcacaagtcactgttttaggcacttgtgatagaccctaacatctctaccctcatagaacttatattgtaatggagaaaggcaggcaacagacattgtaaataaatcatatagtatcttaaaattgcatacaaataccatgggaaagggataaggtgggactggggttgcaatttttagcagggtggtcatgtgagaaaggaatctctttgagaaggttagatgagaggggaaccatgctccgtaagacataaaaacagctttagggtcagaagacgctttatacagatgatctcacaaggctggggcagagaaagatgtagtgattcctaatcacccagccttgaatccacatctgcctcaggtcagattgagtgcagattcccaacccaacaggccttctgttgcctgccccattctggtctttctgcctttggcttttgcttttcttagtggccctaaccatggtctcttcccagcaggtgaacagctcggagaagctgcagctgcaggagtgcttgtgggctggtgagttgggcctgggggcagctggggcagggccacctcctaggggtgaaggtcagggcatgggaggcaggcaagtggccaatcccagcaaggatgggtcttggtcagagtggcctctcaccccttccagactccctggggcctctcaaagacgatgtgctactgttggagacacgaggcccccaggacaacagatccctctgtgccttggaacccagtggctgtacttcactacccagcaaagcctccacggttaggactgggcgaccctcctccacagatctctccaaatgcatctcacatctggcctcaaattttcactccatccaccctgtgccggtctctgggaacatggggggtgactcagaccagggccatattcagcggcatcaccaaagtctcccagtcccctctacctcattctacccagctgtagcctggtaggtgctgccctaagggtgctacctccaggtaacagtgcccccatcctttggcttggcagagggcagctcgccttggagagtacttactacaagacctgcagtcaggccagtgtctgcaggtgagctggtggaagaagggccccacctcaatgcctaggggcaacaggcctaaaactagcactcacctactgtctatttaggcttattttatgttcagccctgggaaagttaagagtagaagaagcacagttcctatccccaaggagcacactgttggctagacacccataaacagataaccacacctacaggtgctaagttttgggttccagggagagcttccgggaagaatttcttcctataagccagatttggtatggaagaagtcataccctagtcagtgggcacagcacaaaggcagagcagctgcaggaaccttagccgggagatatgcatagttgatgctgggaatttggagatcaggccaccagagcttggtgaatattggaacacctggctggtgccctggatttggttctgtttgtatcttacagctatgggacgatgacttgggagcgctatgggcctgccccatggacaaatgtgagtattgtaagaactgcctttcctttctgtaccaggagtggggatcttgacagggaccactcttgggcacagcacatgcaatggccttgtccttccctgagatcagataaacagagggtcattccttcattcactcaaaaaatgatgagagcttgcagggatcgcaggaacaccaaaaatataaatccttgcccccgccccacccctagaagactagcaagacatgagccagtcacttacatttaaagtgggagctactgaagcaccaccaagtgttcagtgctgtaaatgcatacaatgtggacctgacctgggtggggtgaggggtgaggggctcagggggaaggttccagcaaaactctgaagactgagctaggggaagggggtagagatacagggtcttggacaggcaggtttctgtcatgagataaagatgcaggagacatgtaggggatttggatcttatgttgagagcagcaggagctacgatcaaatttttatatatttcacacacacacacacacatatatatatatatatatatatatatatatatacttatttttttatttatttttgaggcagagtctcactctgttgcccaggctggagtgcaatggcgcgatctcggctaactgcaacctctgcctcccgggttcaagcaattctctacctcagcctcccgggtagctgggattaataggcgcctgccaccatgccctgctaatttttgtatttttagtagagatggggtttcaccatcttggccaggctggtcttgaactcctgacctcgtgatccgcccgcgtcggcctcccaaagtgctgggattatagtcgtgagtcaccgcacctggcccaaatttatatttttaaaagatctctgaggctgtcatgaatcaattcaaggcaaatcaattggaggtaaaaaaaaaaaaaaaaagacagggcagggacaccaggtagttgcagacacccaggacagcaagatcaagggcccagcaaccctagcttaggggagaaaaacagctgacattttagcacttaagatgctcggcattgtgttaagtatgtattaacacattgtgttaagctttatatgtattaatatatttagtcctcacaccaaccctatgacacaggtacaactttacagaggagaaaactgaggcagagggtgacattacttattcaaagacccctaaacagatggagctatattcatccactggctctgacactgtgctgtggactctgggcaaatcatttcttcgttttttgttttgttttgttttgttttgagaggagtctcaccctgtcgcccaggctggagtgcaatggcgcgatctcggctcactgcaacctctgcctcccgagttcaagcgattctcttgcctcagcctcccgagtagctgggattacaggcgtgtgccaccacgcccggctaattttttgtatttttagtagagacggggtttcaccgtgttagccaggatggtcttgatgtcctgacctcgtgatctgcccgcctcggcctcccgaagtgctgggattatataaaggcatgagccaccgcacccggcccaattcatttctgttaagtctcagtttttcttctctgtggagggtaagtttctaactcttcttctctgggtctcccagacatccacaagcgctgggccctcgtgtggctggcctgcctactctttgccgctgcgctttccctcatcctccttctcaaaaaggatcacgcgaaaggtgagcgcttcccggctccccattcccctgggggaggaccagagtggctgtgggagttctccgagggaaagcggcggccgagctcactggctgcctccgcccctctcccctaacagggtggctgaggctcttgaaacaggacgtccgctcggggggtgagtgggagcaagcgctgggcggagggccgcccccggggagccaggcctgtgccagctcacctcttccctccccatctgttttctccggcagcggccgccaggggccgcgcggctctgctcctctactcagccgatgactcgggtttcgagcgcctggtgggcgccctggcgtcggccctgtgccagctgccgctgcgcgtggccgtagacctgtggagccgtcgtgaactgagcgcgcaggggcccgtggcttggtttcacgcgcagcggcgccagaccctgcaggagggcggcgtggtggtcttgctcttctctcccggtgcggtggcgctgtgcagcgagtggctacaggatggggtgtccgggcccggggcgcacggcccgcacgacgccttccgcgcctcgctcagctgcgtgctgcccgacttcttgcagggccgggcgcccggcagctacgtgggggcctgcttcgacaggctgctccacccggacgccgtacccgcccttttccgcaccgtgcccgtcttcacactgccctcccaactgccagacttcctgggggccctgcagcagcctcgcgccccgcgttccgggcggctccaagagagagcggagcaagtgtcccgggcccttcagccagccctggatagctacttccatcccccggggactcccgcgccgggacgcggggtgggaccaggcgcgggacctggggcgggggacgggacttaaataaaggcagacgctgtttttct

SEQ ID NO: 12547 - DNA, 2147 bp, Homo sapiens
atgcctgtgccctggttcttgctgtccttggcactgggccgaagcccagtggtcctttctctggagaggcttgtggggcctcaggacgctacccactgctctccgggcctctcctgccgcctctgggacagtgacatactctgcctgcctggggacatcgtgcctgctccgggccccgtgctggcgcctacgcacctgcagacagagctggtgctgaggtgccagaaggagaccgactgtgacctctgtctgcgtgtggctgtccacttggccgtgcatgggcactgggaagagcctgaagatgaggaaaagtttggaggagcagctgactcaggggtggaggagcctaggaatgcctctctccaggcccaagtcgtgctctccttccaggcctaccctactgcccgctgcgtcctgctggaggtgcaagtgcctgctgcccttgtgcagtttggtcagtctgtgggctctgtggtatatgactgcttcgaggctgccctagggagtgaggtacgaatctggtcctatactcagcccaggtacgagaaggaactcaaccacacacagcagctgcctgactgcagggggctcgaagtctggaacagcatcccgagctgctgggccctgccctggctcaacgtgtcagcagatggtgacaacgtgcatctggttctgaatgtctctgaggagcagcacttcggcctctccctgtactggaatcaggtccagggccccccaaaaccccggtggcacaaaaacctgactggaccgcagatcattaccttgaaccacacagacctggttccctgcctctgtattcaggtgtggcctctggaacctgactccgttaggacgaacatctgccccttcagggaggacccccgcgcacaccagaacctctggcaagccgcccgactgcaactgctgaccctgcagagctggctgctggacgcaccgtgctcgctgcccgcagaagcggcactgtgctggcgggctccgggtggggacccctgccagccactggtcccaccgctttcctgggagaacgtcactgtggacaaggttctcgagttcccattgctgaaaggccaccctaacctctgtgttcaggtgaacagctcggagaagctgcagctgcaggagtgcttgtgggctgactccctggggcctctcaaagacgatgtgctactgttggagacacgaggcccccaggacaacagatccctctgtgccttggaacccagtggctgtacttcactacccagcaaagcctccacgagggcagctcgccttggagagtacttactacaagacctgcagtcaggccagtgtctgcagctatgggacgatgacttgggagcgctatgggcctgccccatggacaaatacatccacaagcgctgggccctcgtgtggctggcctgcctactctttgccgctgcgctttccctcatcctccttctcaaaaaggatcacgcgaaagcggccgccaggggccgcgcggctctgctcctctactcagccgatgactcgggtttcgagcgcctggtgggcgccctggcgtcggccctgtgccagctgccgctgcgcgtggccgtagacctgtggagccgtcgtgaactgagcgcgcaggggcccgtggcttggtttcacgcgcagcggcgccagaccctgcaggagggcggcgtggtggtcttgctcttctctcccggtgcggtggcgctgtgcagcgagtggctacaggatggggtgtccgggcccggggcgcacggcccgcacgacgccttccgcgcctcgctcagctgcgtgctgcccgacttcttgcagggccgggcgcccggcagctacgtgggggcctgcttcgacaggctgctccacccggacgccgtacccgcccttttccgcaccgtgcccgtcttcacactgccctcccaactgccagacttcctgggggccctgcagcagcctcgcgccccgcgttccgggcggctccaagagagagcggagcaagtgtcccgggcccttcagccagccctggatagctacttccatcccccggggactcccgcgccgggacgcggggtgggaccaggcgcgggacctggggcgggggacgggacttaaataaaggcagacgctgtttttct

SEQ ID NO: 12548 - DNA, 16547 bp, Homo sapiens
acagccagcagcctgccgggagccaaaacgaaagcactccgtgctggaagtaggaggagagtcaggactcccaggacagagagtgcacaaactacccagcacagccccctccgccccctctggaggctgaagagggattccagcccctgccacccacagacacgggctgactggggtgtctgccccccttgggggggggcagcacagggcctcaggcctgggtgccacctggcacctagaagatgcctgtgccctggttcttgctgtccttggcactgggccgaagcccagtggtcctttctctggagaggcttgtggggcctcaggacgctacccactgctctccggtgagtctggaaccctggggagacgaggaaaggctcagggttcagtttttggctcagcaaagccttagcctggctcctgtcactgctgccactgccagaactgccctgtctggtctgtctggtgctgatggtagaagagaagaacggggaaggggcaagagctgggtctgtctttctctgggagggtctgggaatacggagccccagaaaaaggtaggtggaggtcttaggcagagaacagtgcctagatggtgggggcacaaattctgactctcctttctttccttcccagggcctctcctgccgcctctggggtaagtatccctacttttaaaaagaatttcccaggttggccgaagggagcagagctgtcccaggcccatgccctccatgcccacctcagcctaggacagccaagttctttggctctctgggtatgtcaggtgccaccaaattctgggcttggaacagcttcagctcccacccgctcctccacacacagacagtgacatactctgcctgcctggggacatcgtgcctgctccgggccccgtgctggcgcctacgcacctgcagacagagctggtgctgaggtgccagaaggagaccgactgtgacctctgtctgcgtgtggctgtccacttggccgtgcatggtgagcaagtcatcctgtgacagtgcatgtgtacacgtgagtgtgtctggggtgggcatgagggccaggggatctctcaagcagtgctaggcatcctcagtgttctcctggaggacaccagcagaaggacccccaggccagtgtggtctccccagcccctgcttcccagcactgggctttccagaaggaagccaacgccaaagccagccagcccagagcagggggcctcacccagggccttgctcttgggtccttctagggcactgggaagagcctgaagatgaggaaaagtttggaggagcagctgactcaggggtggaggagcctaggaatggtgaggagaacctggctggcccaactgccccatgccaaggcctggcctgccgctcctgggcctgactgacccctgccctgttgcccacagcctctctccaggcccaagtcgtgctctccttccaggcctaccctactgcccgctgcgtcctgctggaggtgcaagtgcctgctgcccttgtgcagtttggtcagtctgtggtatgcaaaataataataatcaccttctaaacctaaaatctataaaactttttcacatgcattatctctttgaggattacaaaagaattaaatttattgaaacccttcagtaccaggcattacagccagtgttttacaggtatcaacttatttaattctcacaacagccatgtgaggtgggactattcttttgattctgatcagcgctgtgggcaagtcccttcagcctgttatgcctcagcttttatgtctgtaaaatggggatgagaatagttctacttcatatgcttgactgcgagaaatcaccaagcgtttttcagggtgcttctactattttcccctcctaccagcagtgtatgggagtcctagttgcttcccatctttgccaacacttgatggtgtaattttattttatttttaaattaaatatatttgaattttaaatatatgggaccctccatgaatttgcatgtcatcctcaggcacgggccttgctaatcttttctgtattgttccagttgtagtatatgtggtgccaaaacaagcataagtgttgtaattgtcataatttttctgcatatgtagtggtttgccattgtggttttaatttgtatcttccaatgactgatgaagttgagcacttttttcacatgcttattggctatttgtgtaacttccttgtgaaatatctcttaaagtttttttgtttttgtttttgtttttgtttttgccacataaaaaaacaatagttctggccgggcacagtggttcacacctgtaatcccagcactttgggaggctgaggcgggcagatcacgaagtcaggagattgagaccatcctggctaacactgtgaaaccctgcctccactaaaaaaatacaaaaaattagccaggcatggtggtgggcgcctgtagacccagctactcgggaggcagaggcaggagaatggcgtgaacccgggaggtggagcttgcagtgagccgagatcgcgccactgcactccagcctgggcgacagagcgagattccgtctcaaaaaaaaagaatagtcccacctcacatgactgttgtgagaattaaattaagttggtacctgtaaaacactggatgtaatgcctggcactgaataatttcaataaatttaattcttttgtaatcctcaaaactacctgatgaggcattattagtatcctcattttccagatagataaaatgaggcttggagaggggaggtctgtgggctggatgcacttctctgtactcttggaccaaagaaagagtcctaccatacataccatggtatacttaccatggtgtaagtaccatggtgcagggtgttggggcttctccctgccttaggaggccacatgtacctggaaggtctatttccactggggtcaaatcactcaaaccctttgactttccctccaacctccagcccccagccaatatcctatctggagaattgtagactgggagaacatctgcttggtccatgtcacaagcagttgtaaggaacactgaggcactgggttgagtgtgagaaccacttctgtggggaggggtgtgccatattgtgttggggtgtctcatctccttagctttggccaggtgatctagcacagcagggtgggtgcagggatttaaatgtctagggccttttcccgccctggtgacactcttactgaggacatttgctttagaattgaggccccttgaaagaaaggtgaatagtagatttcaggctatacagtataaatacagtcattagttgggggaggagggcagtgagcagagtggtccctgcagatgatcccacagcccttggcctggattctgagccctgcaccgccagccttcctcacccctctcctcacagggctctgtggtatatgactgcttcgaggctgccctagggagtgaggtacgaatctggtcctatactcagcccaggtacgagaaggaactcaaccacacacagcagctgcctggtaagtggacccccaagtcctggccccctagcctctgtcccctctggccattccccctcctgatttcaccctcttctagctccatccactctccggcaggggtctgagctgctatcctccccagagtcagtccctcggaccttctctctctgggtgatatggctttccagcccctggggaaggttctttgagcattggatagatgtgggtggtatgtaggggatggggagccattcctaatgcccccctgggagccaaattgcccccacttctttccttggcccccagccccactggaggctcttctgtgatctctcctcagactgcagggggctcgaagtctggaacagcatcccgagctgctggggtaggggctagggccagtgggccgggggtagggaggggcagggtctggagtataagaaacccttggagtccacttcagatatgggctaccacatctcagaagctcacagaacatattcattcattcattcattcattcatttgttcataacacattaattgcagtatctgtgctaagcactggaaatagaaagatgaatcttgggtcaggctcagtggctcatgcctgtaatcccagaactttgggaggccgaggtagaaggatcacttgagctcaaaagttcaagacgagcctgggcaacatggcaaatccccgtctctaccaaaaatacaaaaattaacaggacatggtggtgtgcatttgtggtcccagctactcaggaggctgaggcaggagaatcacttgagcctgggaggcaggggctacagtaagctgagactgcaccattgcacaccagcctgggtgacagagcaagactccgtctcaaaaaacaaaacaaaacaaaacaaaaacaaaaaacttgaaataaaagctaagaaagtcaagggtctaacttttttcccacgtactatttggattttgttttcgttttgtattttcttttttattgtgtataacatacatacataaaagtatgtaaagggtactgattttcttttttttttttttttttgagacagagtctcgctctgtcgctcaggctggagtgcagtggtgcaatctcggctcactgcaagctccgcctcccaggttcacgccattctcctgcctcagcctcccgagtagctgggactacaggcacccgccaccacgcctggctaatttttttttttttttagtagagacagggtttcaccgtgttagccaggatggtcttgatctcctgaccttgtgatccgcctgcctcagcctcccaaagtgctgggattacaggcgtgagccaccacgcccagccaaagggtactgatttccatgtccagttcttttttttttttttttttttggcggaatcttgctctgtcgcctaggctggactgcagtggtgtgatctcagctcactgcaacctctgccttctgggttcaagcgattctcctgcctcagcctcccaagcagctgggattacagacgtgcaccaccacgcacagctaatttttgtatttttagtagacatggagtttcaccatgctggccaggctggtcttgaactcctgacctcgtgatcctcccacctcggcctcccaaagtgctgggattacaggcatgagccgccacgtccggccaatttgtttttatatatgtatacacttgcataactagcacccagatcaatacataaatactgtgaatacatcacatactgtgatgttttctgaactactaaatgttttcaacttcattttctttttgccttcttaaaattaaagttggcctgcctctttggcaactcattaaagactattcaacaccagagttttgaaaacacagatgtgtatatcatggatttcatttcttccttcattaagtagacattgattcatttattcaacagatatttattaatttctgtgtaccaggcaaatccctggacactggaaatattaataaatcaataaatgaagatgacaaaaaacccgaccccacggagctggtgtcagggtcagggtgggggtgaggaaggacacaacaaacacatggagatgtgaagaatgcagtaagttagacagtgattagcactaaggagaacatttgtggaagggctggggaaggttgggagttgtagaggtcagggatggtctcattctggtgagcagagacctgaaagaggtgagggaggagccatatatttgagggaagagagaatagccagcaaaaagggcctggggtgggagtatgtcaggggtgtttaagaaatagtaaggagggggccgggcgcggtggctcacgcctgtaatcccagcactttgggaggccgaggctggcggatcacgaggtcaggagatcgagaccatcctggctaacacggtgaaaccccatctctacaaaaaatacaaaaaaatcagctgggcatggtggcaggcgcctgtagtcccagctactcgggagcctgaggcaggagaatggcttgaaccccaggaggcagagcttgcagtgagccgagatcacaccactgcactccagcctgggcgacagagccagactccatctcaaaaaaaaaaaaaggaaaaaaaaaagagagagaaacagtaaggaggtccttaataactctgcagcagagttattaaggacacaaatgccataggctgtgcgcgatggctcacgtctgcaatcccagcactttggggaagctgaggcaggaggattgcttgaggttaggagctcaagaccagcctggccaacatgagcgaaatcccatctctactaaaaatacaaaaactagccgggggtggtgacacacgcctgtaatcccagctactcgggtggctgaggcaagagaatcgcttgaacccaggaggtggaggttgcagtgagctatcgtgccaatgcactccagcctgggcaacagagcaagactccctctcaaaaaaaaaaaaggacacaagtatcaagaggtaaggtcagaaaggtcacagttctgaacagaggaaaatgacttgttttaaagaggttacaagatctttctgcagagggagaagcagggagaatagctcttctccgaccacacactagggtctccacgggcttggctttgggcagctgctaggagcaaagtctggtctgaaatgatgacacacgctctgccctccgagagcctcccagtctagggggtttgaaggaaactccaaagggtcagtcggggatgcagaagaggtgaggaagtctaagctgcgctctctttgcctctcccaccagccctgccctggctcaacgtgtcagcagatggtgacaacgtgcatctggttctgaatgtctctgaggagcagcacttcggcctctccctgtactggaatcaggtccagggccccccaaaaccccggtggcacaaaaacctggtgaggcctcccccttcccaagtccattcccactgtaggccgatgcctgtgcaaaggacgcagtgccatatcagagaggatccttgaagaggactcaccccaagcaagggaaaattggtgggggaacttctgccttcctggtttccttgactttggcctcctcctcttcctccttatcttctccaacctccttcctttatttgttccacagactggaccgcagatcattaccttgaaccacacagacctggttccctgcctctgtattcaggtaggagcagagtctagctgggtgccagaagaggagtgggaagatgatgatgggggtgatccctgccttcctggtctcaccattcttcaaacccttcattgaggtggagactgtggctccctggggtggctggccctcccttgacccttgctgtcctatgccttctgtctattacattccctgaatgctctccctgatcctccacagaactcctgcttattcttcatggccccattcaaatgtcaccttctccttgaaacctttccctactcctccagttctgtctttgtgttcccctggcgggcagagcatgtgctacgaacttggactggtttgaatcttggctcttgccatttgctagctgtgtaaccttgggcaagtcacttcacctctgtgagcctgtttctcatctgtaaaatgggaataataatagtaacagcctcatggggctgttataagaatgtgtgccacacccaggcttaaatatgctggctctttcctcttcctctgtacatttatttatttttttagacaaggtctcactctgttgcccaggctggagtgcagtggcacaatcatggcacactgcagcctcagccccatgggctcaagtgatcctcctgtctcagcctcccaagtagctggaactactggtgagcactaccatactcagctagtttttttttgttttgtgtagagacggggtcttgctatgttacccaggctgttctgaattcctgggcttatgctatcctcccacctcagcctcccaccaagtgctgggattataagcatgagccactgtggcttgccctgattgcactttttttttttttttttttaagacagagtctttctctgtcgcccaggctggagcaccgtggcgtgatctcggctcactgcaagctgcttctcctgggttcacgccattctcctgcctcagcctcgctgagtagctgggactacaggtgcctgcaaccacgcccagctaattttttgtattttcagtaaagacagggtttcaccgtgttagccaggatggtctcgatctcctgaccttatgatccacaagcctcgtcctcccaaagtgctgggattacaggcatgacccactgtgcccagccgctgattgcacatttaattggtcatcaggtctcatccatcttacctctgacattaatgtctctcattttctttccccctcctctccatctcagtccagcttagggctctatcatctgttttctagactgtttcaacacctccaagctcccctcccttcccatcactttcctggcattctgggcccatattctgcccccaacggtgccttttcactctattttccccatgattccccttcatgagaacattgttacatccagtggagctacttaccaagatacagctagctccctgccttttctcaggtggttcccattacctcaaatgccctcacctccttcccaaagcttttccccaaccacccggcctctcctagctccaaatccccttgcacttctatctttccttgtccatttatcacttcatttcttttattttcttaaattttttttttttttttagagacagcattttgctctgtcacccatggtagagtgcagtggcatgaacacgtctcattgcagccccaagctcccaggttcaagggatcctcctgcctcagcctctgcagctgggactgcaggcatgcgccaccatgcctggctaattgtttccttttttttttttttttttttttaatggagtttcactcttttgcccaggatggagtgcagtggcgtgatctcggctcactgcaacttccgcctcccaggttcaagccattctcctgcctcagcctcccaagtagctgagattacaggcacacaccaccatgcccagctaatttttgtatttttagtagagacagggtttcaccatgttggtcaggctggtcccaaattcctgacctcgtgatccacccgcctcggccgcccaaagtgctgggattacaggcgtgagccactgtgcccagcctgttttcattttttaatgttttgtggcgatgggccaccacacccagctcaatcacttactttcttatttgggcatctaatttcttcttgtacacaacagatgctcaataaatattatgaaatgaatgagtgttttactaatttatataaatattttatccttactacaagtgtgagtttgtgatttccttgaaggcaagcaaatcatatctaattcaaatgtaatagctttgcaagagccttgcacatagcgcctacttgttttttgtttttttgtgtttttgttttttttttgtttttttgtcttttttgagacagagtctcgctctattggcaggctggagtacagtggcgtgatctcggctcactgcaatctctgcctcctggattcaagcaattcttctgcctcagcctcccaagtagctgggactacaagtgcatgccaccatgcccggctaatttttgtattttcagtagagacggggtttcagcatgttggccagatggtctcgatctcttgacctcgtgatccgcccaccttggcctcccaaagtgctgggattacaggggtgagccaccgcgcccagccttgttttgtttttaaacaaggtaacagtatgaggtcctcactgttgaatgagtgaataaatgttactgcctaacacagccataggacacagcagatgttcatgagatgtatgctgtgatttaaatggcttcattgccaaacacagtgcctgccacatagtcggtgttcctaactaaaggcttgatggataaattaatgtattacctctagtgcttagcatagagctatgcacataataggcactcttgaaatgtctgttgaaagaataaatgaatgtgtccttagaacttagcacattccccaacacatagcaggtgcttacacaagtgattgtggaatgaattaaaattaattatccaccaggcacagtggctcacacctgtaatcccagcactttgggaggccaaggtgggtggatcacgaggtcaggagtttgagaccagcctggcctaacatagtgaaacccagtctctactaaaagtacaaaaattagccaggcatggtgatgtgcgcctgtagtccctgctacttgggaagctgaggcaggagaatcacttgaacccaggaggcggaggttgtggtgagctgagatcacaccactgcactccagcctgggcaacagagtgagattccatctcaaaaaataaaaaaataataaaaatttaattatccaaggtctcttgtgcttgccatactgctaagacacaatggtaggcactcattaaaagtctgttgaatgggccaggcgcggtggctcacgcttgtaatcccaacactttgggaggctgagacgggtggatcacttgaggtcaggagttcgagaccagcctgatcaatgtggtgaaaccccatctctactaaaaatacaaaaattaaccagttagccggccgttgtggcatgttcctgtaatcgcagctcctcaggagactgagatgggagaatcgcttgaacctgggaggtggaggttgtagtgagccaagattgcaccactgcactccagcctgggcgacagagcgagactctatctcaaaaaaaaaaaaaagtttgttaatgaagatgttgccagtgcccagcattatgtttgctggaagaatagatgtgagcacctccaggttttgtaaaaggcaggaagacccagcaagtgtttgtgaaatacctgctgaatgagtgcatccccactgtccagcagagggccaggcacatgcccatggaggggacctgagcagacccccatttcctttccaggtgtggcctctggaacctgactccgttaggacgaacatctgccccttcagggagggtgagccgaccggcctggggctggggttggggtgttgcgagcgatgggtacctggcctgcggtgactgtgccctttccttgcagacccccgcgcacaccagaacctctggcaagccgcccgactgcaactgctgaccctgcagagctggctgctggacgcaccgtgctcgctgcccgcagaagcggcactgtgctggcgggctccgggtggggacccctgccagccactggtcccaccgctttcctgggagaacgtcactgtggacgtaagtgaagcagagggcacctcccgtggtgaggggagagtggggaaccgggggtccccttttgtgatcccacccattcctctctttccacagaaggttctcgagttcccattgctgaaaggccaccctaacctctgtgttcaggtcagaaaggggtgcatagtgctgggctggaggctggacctgggcagaccccccagccaagggggtcttagttcttgggccgctaaagcatagtggttgccagcttcctctatgggagttccactgcctactttagtagtgcgcgggaccctgggcaactcacttcacctctctgaacgtcagtttcctcatctgtttaatgcagatgataatacagtaactacctcatggagtggttgtgacaatgaaataagagaagtgcttccccttaggaatcggtacagactaaatgctccataaatgtagccacttttattattgctatccttattctatttccatacctgtagaatgggttgctctacagtttcaaagggtgattataagaacattcactcatccggccaggcgcggtggctcacgcctgtaatcccagcactttgggaggccgaggcgggcagatcacgaggtcaggacatcaagaccatcctggctaacatggtgaaaccccatctctactaaaaatacaaaaaattagccggtcgtggtggtgggcacctgtagtcccagctactaggaaggctggggcaggagaatggcgtgaacctgggaggctgagcttgcagtgagctgagagggcgccactgcactccagcctgggtgacagagtgagactgggcgacagagtgaaactccgtctcaaaaaaaaaaaaaattcactcattcaagattttttgagcagcacaagtcactgttttaggcacttgtgatagaccctaacatctctaccctcatagaacttatattgtaatggagaaaggcaggcaacagacattgtaaataaatcatatagtatcttaaaattgcatacaaataccatgggaaagggataaggtgggactggggttgcaatttttagcagggtggtcatgtgagaaaggaatctctttgagaaggttagatgagaggggaaccatgctccgtaagacataaaaacagctttagggtcagaagacgctttatacagatgatctcacaaggctggggcagagaaagatgtagtgattcctaatcacccagccttgaatccacatctgcctcaggtcagattgagtgcagattcccaacccaacaggccttctgttgcctgccccattctggtctttctgcctttggcttttgcttttcttagtggccctaaccatggtctcttcccagcaggtgaacagctcggagaagctgcagctgcaggagtgcttgtgggctggtgagttgggcctgggggcagctggggcagggccacctcctaggggtgaaggtcagggcatgggaggcaggcaagtggccaatcccagcaaggatgggtcttggtcagagtggcctctcaccccttccagactccctggggcctctcaaagacgatgtgctactgttggagacacgaggcccccaggacaacagatccctctgtgccttggaacccagtggctgtacttcactacccagcaaagcctccacggttaggactgggcgaccctcctccacagatctctccaaatgcatctcacatctggcctcaaattttcactccatccaccctgtgccggtctctgggaacatggggggtgactcagaccagggccatattcagcggcatcaccaaagtctcccagtcccctctacctcattctacccagctgtagcctggtaggtgctgccctaagggtgctacctccaggtaacagtgcccccatcctttggcttggcagagggcagctcgccttggagagtacttactacaagacctgcagtcaggccagtgtctgcaggtgagctggtggaagaagggccccacctcaatgcctaggggcaacaggcctaaaactagcactcacctactgtctatttaggcttattttatgttcagccctgggaaagttaagagtagaagaagcacagttcctatccccaaggagcacactgttggctagacacccataaacagataaccacacctacaggtgctaagttttgggttccagggagagcttccgggaagaatttcttcctataagccagatttggtatggaagaagtcataccctagtcagtgggcacagcacaaaggcagagcagctgcaggaaccttagccgggagatatgcatagttgatgctgggaatttggagatcaggccaccagagcttggtgaatattggaacacctggctggtgccctggatttggttctgtttgtatcttacagctatgggacgatgacttgggagcgctatgggcctgccccatggacaaatgtgagtattgtaagaactgcctttcctttctgtaccaggagtggggatcttgacagggaccactcttgggcacagcacatgcaatggccttgtccttccctgagatcagataaacagagggtcattccttcattcactcaaaaaatgatgagagcttgcagggatcgcaggaacaccaaaaatataaatccttgcccccgccccacccctagaagactagcaagacatgagccagtcacttacatttaaagtgggagctactgaagcaccaccaagtgttcagtgctgtaaatgcatacaatgtggacctgacctgggtggggtgaggggtgaggggctcagggggaaggttccagcaaaactctgaagactgagctaggggaagggggtagagatacagggtcttggacaggcaggtttctgtcatgagataaagatgcaggagacatgtaggggatttggatcttatgttgagagcagcaggagctacgatcaaatttttatatatttcacacacacacacacacatatatatatatatatatatatatatatatatacttatttttttatttatttttgaggcagagtctcactctgttgcccaggctggagtgcaatggcgcgatctcggctaactgcaacctctgcctcccgggttcaagcaattctctacctcagcctcccgggtagctgggattaataggcgcctgccaccatgccctgctaatttttgtatttttagtagagatggggtttcaccatcttggccaggctggtcttgaactcctgacctcgtgatccgcccgcgtcggcctcccaaagtgctgggattatagtcgtgagtcaccgcacctggcccaaatttatatttttaaaagatctctgaggctgtcatgaatcaattcaaggcaaatcaattggaggtaaaaaaaaaaaaaaaaagacagggcagggacaccaggtagttgcagacacccaggacagcaagatcaagggcccagcaaccctagcttaggggagaaaaacagctgacattttagcacttaagatgctcggcattgtgttaagtatgtattaacacattgtgttaagctttatatgtattaatatatttagtcctcacaccaaccctatgacacaggtacaactttacagaggagaaaactgaggcagagggtgacattacttattcaaagacccctaaacagatggagctatattcatccactggctctgacactgtgctgtggactctgggcaaatcatttcttcgttttttgttttgttttgttttgttttgagaggagtctcaccctgtcgcccaggctggagtgcaatggcgcgatctcggctcactgcaacctctgcctcccgagttcaagcgattctcttgcctcagcctcccgagtagctgggattacaggcgtgtgccaccacgcccggctaattttttgtatttttagtagagacggggtttcaccgtgttagccaggatggtcttgatgtcctgacctcgtgatctgcccgcctcggcctcccgaagtgctgggattatataaaggcatgagccaccgcacccggcccaattcatttctgttaagtctcagtttttcttctctgtggagggtaagtttctaactcttcttctctgggtctcccagacatccacaagcgctgggccctcgtgtggctggcctgcctactctttgccgctgcgctttccctcatcctccttctcaaaaaggatcacgcgaaaggtgagcgcttcccggctccccattcccctgggggaggaccagagtggctgtgggagttctccgagggaaagcggcggccgagctcactggctgcctccgcccctctcccctaacagggtggctgaggctcttgaaacaggacgtccgctcggggggtgagtgggagcaagcgctgggcggagggccgcccccggggagccaggcctgtgccagctcacctcttccctccccatctgttttctccggcagcggccgccaggggccgcgcggctctgctcctctactcagccgatgactcgggtttcgagcgcctggtgggcgccctggcgtcggccctgtgccagctgccgctgcgcgtggccgtagacctgtggagccgtcgtgaactgagcgcgcaggggcccgtggcttggtttcacgcgcagcggcgccagaccctgcaggagggcggcgtggtggtcttgctcttctctcccggtgcggtggcgctgtgcagcgagtggctacaggatggggtgtccgggcccggggcgcacggcccgcacgacgccttccgcgcctcgctcagctgcgtgctgcccgacttcttgcagggccgggcgcccggcagctacgtgggggcctgcttcgacaggctgctccacccggacgccgtacccgcccttttccgcaccgtgcccgtcttcacactgccctcccaactgccagacttcctgggggccctgcagcagcctcgcgccccgcgttccgggcggctccaagagagagcggagcaagtgtcccgggcccttcagccagccctggatagctacttccatcccccggggactcccgcgccgggacgcggggtgggaccaggcgcgggacctggggcgggggacgggacttaaataaaggcagacgctgtttttctaccc

SEQ ID NO: 12549 - DNA, 2342 bp, Homo sapiens
acagccagcagcctgccgggagccaaaacgaaagcactccgtgctggaagtaggaggagagtcaggactcccaggacagagagtgcacaaactacccagcacagccccctccgccccctctggaggctgaagagggattccagcccctgccacccacagacacgggctgactggggtgtctgccccccttgggggggggcagcacagggcctcaggcctgggtgccacctggcacctagaagatgcctgtgccctggttcttgctgtccttggcactgggccgaagcccagtggtcctttctctggagaggcttgtggggcctcaggacgctacccactgctctccgggcctctcctgccgcctctgggacagtgacatactctgcctgcctggggacatcgtgcctgctccgggccccgtgctggcgcctacgcacctgcagacagagctggtgctgaggtgccagaaggagaccgactgtgacctctgtctgcgtgtggctgtccacttggccgtgcatgggcactgggaagagcctgaagatgaggaaaagtttggaggagcagctgactcaggggtggaggagcctaggaatgcctctctccaggcccaagtcgtgctctccttccaggcctaccctactgcccgctgcgtcctgctggaggtgcaagtgcctgctgcccttgtgcagtttggtcagtctgtgggctctgtggtatatgactgcttcgaggctgccctagggagtgaggtacgaatctggtcctatactcagcccaggtacgagaaggaactcaaccacacacagcagctgcctgactgcagggggctcgaagtctggaacagcatcccgagctgctgggccctgccctggctcaacgtgtcagcagatggtgacaacgtgcatctggttctgaatgtctctgaggagcagcacttcggcctctccctgtactggaatcaggtccagggccccccaaaaccccggtggcacaaaaacctgactggaccgcagatcattaccttgaaccacacagacctggttccctgcctctgtattcaggtgtggcctctggaacctgactccgttaggacgaacatctgccccttcagggaggacccccgcgcacaccagaacctctggcaagccgcccgactgcaactgctgaccctgcagagctggctgctggacgcaccgtgctcgctgcccgcagaagcggcactgtgctggcgggctccgggtggggacccctgccagccactggtcccaccgctttcctgggagaacgtcactgtggacgtgaacagctcggagaagctgcagctgcaggagtgcttgtgggctgactccctggggcctctcaaagacgatgtgctactgttggagacacgaggcccccaggacaacagatccctctgtgccttggaacccagtggctgtacttcactacccagcaaagcctccacgagggcagctcgccttggagagtacttactacaagacctgcagtcaggccagtgtctgcagctatgggacgatgacttgggagcgctatgggcctgccccatggacaaatacatccacaagcgctgggccctcgtgtggctggcctgcctactctttgccgctgcgctttccctcatcctccttctcaaaaaggatcacgcgaaagcggccgccaggggccgcgcggctctgctcctctactcagccgatgactcgggtttcgagcgcctggtgggcgccctggcgtcggccctgtgccagctgccgctgcgcgtggccgtagacctgtggagccgtcgtgaactgagcgcgcaggggcccgtggcttggtttcacgcgcagcggcgccagaccctgcaggagggcggcgtggtggtcttgctcttctctcccggtgcggtggcgctgtgcagcgagtggctacaggatggggtgtccgggcccggggcgcacggcccgcacgacgccttccgcgcctcgctcagctgcgtgctgcccgacttcttgcagggccgggcgcccggcagctacgtgggggcctgcttcgacaggctgctccacccggacgccgtacccgcccttttccgcaccgtgcccgtcttcacactgccctcccaactgccagacttcctgggggccctgcagcagcctcgcgccccgcgttccgggcggctccaagagagagcggagcaagtgtcccgggcccttcagccagccctggatagctacttccatcccccggggactcccgcgccgggacgcggggtgggaccaggcgcgggacctggggcgggggacgggacttaaataaaggcagacgctgtttttctaccc

SEQ ID NO: 12550 - DNA, 7159 bp, Homo sapiens
gtcaggactcccaggacagagagtgcacaaactacccagcacagccccctccgccccctctggaggctgaagagggattccagcccctgccacccacagacacgggctgactggggtgtctgccccccttgggggggggcagcacagggcctcaggcctgggtgccacctggcacctagaagatgcctgtgccctggttcttgctgtccttggcactgggccgaagcccagtggtcctttctctggagaggcttgtggggcctcaggacgctacccactgctctccggtgagtctggaaccctggggagacgaggaaaggctcagggttcagtttttggctcagcaaagccttagcctggctcctgtcactgctgccactgccagaactgccctgtctggtctgtctggtgctgatggtagaagagaagaacggggaaggggcaagagctgggtctgtctttctctgggagggtctgggaatacggagccccagaaaaaggtaggtggaggtcttaggcagagaacagtgcctagatggtgggggcacaaattctgactctcctttctttccttcccagggcctctcctgccgcctctggggtaagtatccctacttttaaaaagaatttcccaggttggccgaagggagcagagctgtcccaggcccatgccctccatgcccacctcagcctaggacagccaagttctttggctctctgggtatgtcaggtgccaccaaattctgggcttggaacagcttcagctcccacccgctcctccacacacagacagtgacatactctgcctgcctggggacatcgtgcctgctccgggccccgtgctggcgcctacgcacctgcagacagagctggtgctgaggtgccagaaggagaccgactgtgacctctgtctgcgtgtggctgtccacttggccgtgcatggtgagcaagtcatcctgtgacagtgcatgtgtacacgtgagtgtgtctggggtgggcatgagggccaggggatctctcaagcagtgctaggcatcctcagtgttctcctggaggacaccagcagaaggacccccaggccagtgtggtctccccagcccctgcttcccagcactgggctttccagaaggaagccaacgccaaagccagccagcccagagcagggggcctcacccagggccttgctcttgggtccttctagggcactgggaagagcctgaagatgaggaaaagtttggaggagcagctgactcaggggtggaggagcctaggaatggtgaggagaacctggctggcccaactgccccatgccaaggcctggcctgccgctcctgggcctgactgacccctgccctgttgcccacagcctctctccaggcccaagtcgtgctctccttccaggcctaccctactgcccgctgcgtcctgctggaggtgcaagtgcctgctgcccttgtgcagtttggtcagtctgtggtatgcaaaataataataatcaccttctaaacctaaaatctataaaactttttcacatgcattatctctttgaggattacaaaagaattaaatttattgaaacccttcagtaccaggcattacagccagtgttttacaggtatcaacttatttaattctcacaacagccatgtgaggtgggactattcttttgattctgatcagcgctgtgggcaagtcccttcagcctgttatgcctcagcttttatgtctgtaaaatggggatgagaatagttctacttcatatgcttgactgcgagaaatcaccaagcgtttttcagggtgcttctactattttcccctcctaccagcagtgtatgggagtcctagttgcttcccatctttgccaacacttgatggtgtaattttattttatttttaaattaaatatatttgaattttaaatatatgggaccctccatgaatttgcatgtcatcctcaggcacgggccttgctaatcttttctgtattgttccagttgtagtatatgtggtgccaaaacaagcataagtgttgtaattgtcataatttttctgcatatgtagtggtttgccattgtggttttaatttgtatcttccaatgactgatgaagttgagcacttttttcacatgcttattggctatttgtgtaacttccttgtgaaatatctcttaaagtttttttgtttttgtttttgtttttgtttttgccacataaaaaaacaatagttctggccgggcacagtggttcacacctgtaatcccagcactttgggaggctgaggcgggcagatcacgaagtcaggagattgagaccatcctggctaacactgtgaaaccctgcctccactaaaaaaatacaaaaaattagccaggcatggtggtgggcgcctgtagacccagctactcgggaggcagaggcaggagaatggcgtgaacccgggaggtggagcttgcagtgagccgagatcgcgccactgcactccagcctgggcgacagagcgagattccgtctcaaaaaaaaagaatagtcccacctcacatgactgttgtgagaattaaattaagttggtacctgtaaaacactggatgtaatgcctggcactgaataatttcaataaatttaattcttttgtaatcctcaaaactacctgatgaggcattattagtatcctcattttccagatagataaaatgaggcttggagaggggaggtctgtgggctggatgcacttctctgtactcttggaccaaagaaagagtcctaccatacataccatggtatacttaccatggtgtaagtaccatggtgcagggtgttggggcttctccctgccttaggaggccacatgtacctggaaggtctatttccactggggtcaaatcactcaaaccctttgactttccctccaacctccagcccccagccaatatcctatctggagaattgtagactgggagaacatctgcttggtccatgtcacaagcagttgtaaggaacactgaggcactgggttgagtgtgagaaccacttctgtggggaggggtgtgccatattgtgttggggtgtctcatctccttagctttggccaggtgatctagcacagcagggtgggtgcagggatttaaatgtctagggccttttcccgccctggtgacactcttactgaggacatttgctttagaattgaggccccttgaaagaaaggtgaatagtagatttcaggctatacagtataaatacagtcattagttgggggaggagggcagtgagcagagtggtccctgcagatgatcccacagcccttggcctggattctgagccctgcaccgccagccttcctcacccctctcctcacagggctctgtggtatatgactgcttcgaggctgccctagggagtgaggtacgaatctggtcctatactcagcccaggtacgagaaggaactcaaccacacacagcagctgcctggtaagtggacccccaagtcctggccccctagcctctgtcccctctggccattccccctcctgatttcaccctcttctagctccatccactctccggcaggggtctgagctgctatcctccccagagtcagtccctcggaccttctctctctgggtgatatggctttccagcccctggggaaggttctttgagcattggatagatgtgggtggtatgtaggggatggggagccattcctaatgcccccctgggagccaaattgcccccacttctttccttggcccccagccccactggaggctcttctgtgatctctcctcagactgcagggggctcgaagtctggaacagcatcccgagctgctggggtaggggctagggccagtgggccgggggtagggaggggcagggtctggagtataagaaacccttggagtccacttcagatatgggctaccacatctcagaagctcacagaacatattcattcattcattcattcattcatttgttcataacacattaattgcagtatctgtgctaagcactggaaatagaaagatgaatcttgggtcaggctcagtggctcatgcctgtaatcccagaactttgggaggccgaggtagaaggatcacttgagctcaaaagttcaagacgagcctgggcaacatggcaaatccccgtctctaccaaaaatacaaaaattaacaggacatggtggtgtgcatttgtggtcccagctactcaggaggctgaggcaggagaatcacttgagcctgggaggcaggggctacagtaagctgagactgcaccattgcacaccagcctgggtgacagagcaagactccgtctcaaaaaacaaaacaaaacaaaacaaaaacaaaaaacttgaaataaaagctaagaaagtcaagggtctaacttttttcccacgtactatttggattttgttttcgttttgtattttcttttttattgtgtataacatacatacataaaagtatgtaaagggtactgattttcttttttttttttttttttgagacagagtctcgctctgtcgctcaggctggagtgcagtggtgcaatctcggctcactgcaagctccgcctcccaggttcacgccattctcctgcctcagcctcccgagtagctgggactacaggcacccgccaccacgcctggctaatttttttttttttttagtagagacagggtttcaccgtgttagccaggatggtcttgatctcctgaccttgtgatccgcctgcctcagcctcccaaagtgctgggattacaggcgtgagccaccacgcccagccaaagggtactgatttccatgtccagttcttttttttttttttttttttggcggaatcttgctctgtcgcctaggctggactgcagtggtgtgatctcagctcactgcaacctctgccttctgggttcaagcgattctcctgcctcagcctcccaagcagctgggattacagacgtgcaccaccacgcacagctaatttttgtatttttagtagacatggagtttcaccatgctggccaggctggtcttgaactcctgacctcgtgatcctcccacctcggcctcccaaagtgctgggattacaggcatgagccgccacgtccggccaatttgtttttatatatgtatacacttgcataactagcacccagatcaatacataaatactgtgaatacatcacatactgtgatgttttctgaactactaaatgttttcaacttcattttctttttgccttcttaaaattaaagttggcctgcctctttggcaactcattaaagactattcaacaccagagttttgaaaacacagatgtgtatatcatggatttcatttcttccttcattaagtagacattgattcatttattcaacagatatttattaatttctgtgtaccaggcaaatccctggacactggaaatattaataaatcaataaatgaagatgacaaaaaacccgaccccacggagctggtgtcagggtcagggtgggggtgaggaaggacacaacaaacacatggagatgtgaagaatgcagtaagttagacagtgattagcactaaggagaacatttgtggaagggctggggaaggttgggagttgtagaggtcagggatggtctcattctggtgagcagagacctgaaagaggtgagggaggagccatatatttgagggaagagagaatagccagcaaaaagggcctggggtgggagtatgtcaggggtgtttaagaaatagtaaggagggggccgggcgcggtggctcacgcctgtaatcccagcactttgggaggccgaggctggcggatcacgaggtcaggagatcgagaccatcctggctaacacggtgaaaccccatctctacaaaaaatacaaaaaaatcagctgggcatggtggcaggcgcctgtagtcccagctactcgggagcctgaggcaggagaatggcttgaaccccaggaggcagagcttgcagtgagccgagatcacaccactgcactccagcctgggcgacagagccagactccatctcaaaaaaaaaaaaaggaaaaaaaaaagagagagaaacagtaaggaggtccttaataactctgcagcagagttattaaggacacaaatgccataggctgtgcgcgatggctcacgtctgcaatcccagcactttggggaagctgaggcaggaggattgcttgaggttaggagctcaagaccagcctggccaacatgagcgaaatcccatctctactaaaaatacaaaaactagccgggggtggtgacacacgcctgtaatcccagctactcgggtggctgaggcaagagaatcgcttgaacccaggaggtggaggttgcagtgagctatcgtgccaatgcactccagcctgggcaacagagcaagactccctctcaaaaaaaaaaaaggacacaagtatcaagaggtaaggtcagaaaggtcacagttctgaacagaggaaaatgacttgttttaaagaggttacaagatctttctgcagagggagaagcagggagaatagctcttctccgaccacacactagggtctccacgggcttggctttgggcagctgctaggagcaaagtctggtctgaaatgatgacacacgctctgccctccgagagcctcccagtctagggggtttgaaggaaactccaaagggtcagtcggggatgcagaagaggtgaggaagtctaagctgcgctctctttgcctctcccaccagccctgccctggctcaacgtgtcagcagatggtgacaacgtgcatctggttctgaatgtctctgaggagcagcacttcggcctctccctgtactggaatcaggtccagggccccccaaaaccccggtggcacaaaaacctggtgaggcctcccccttcccaagtccattcccactgtaggccgatgcctgtgcaaaggacgcagtgccatatcagagaggatccttgaagaggactcaccccaagcaagggaaaattggtgggggaacttctgccttcctggtttccttgactttggcctcctcctcttcctccttatcttctccaacctccttcctttatttgttccacagactggaccgcagatcattaccttgaaccacacagacctggttccctgcctctgtattcagg

SEQ ID NO: 12551 - DNA, 949 bp, Homo sapiens
gtcaggactcccaggacagagagtgcacaaactacccagcacagccccctccgccccctctggaggctgaagagggattccagcccctgccacccacagacacgggctgactggggtgtctgccccccttgggggggggcagcacagggcctcaggcctgggtgccacctggcacctagaagatgcctgtgccctggttcttgctgtccttggcactgggccgaagcccagtggtcctttctctggagaggcttgtggggcctcaggacgctacccactgctctccgggcctctcctgccgcctctgggacagtgacatactctgcctgcctggggacatcgtgcctgctccgggccccgtgctggcgcctacgcacctgcagacagagctggtgctgaggtgccagaaggagaccgactgtgacctctgtctgcgtgtggctgtccacttggccgtgcatgggcactgggaagagcctgaagatgaggaaaagtttggaggagcagctgactcaggggtggaggagcctaggaatgcctctctccaggcccaagtcgtgctctccttccaggcctaccctactgcccgctgcgtcctgctggaggtgcaagtgcctgctgcccttgtgcagtttgggctctgtggtatatgactgcttcgaggctgccctagggagtgaggtacgaatctggtcctatactcagcccaggtacgagaaggaactcaaccacacacagcagctgcctgccctgccctggctcaacgtgtcagcagatggtgacaacgtgcatctggttctgaatgtctctgaggagcagcacttcggcctctccctgtactggaatcaggtccagggccccccaaaaccccggtggcacaaaaacctgactggaccgcagatcattaccttgaaccacacagacctggttccctgcctctgtattcagg

SEQ ID NO: 12552 - DNA, 11288 bp, Homo sapiens
aaaacgaaagcactccgtgctggaagtaggaggagagtcaggactcccaggacagagagtgcacaaactacccagcacagccccctccgccccctctggaggctgaagagggattccagcccctgccacccacagacacgggctgactggggtgtctgccccccttgggggggggcagcacagggcctcaggcctgggtgccacctggcacctagaagatgcctgtgccctggttcttgctgtccttggcactgggccgaagcccagtggtcctttctctggagaggcttgtggggcctcaggacgctacccactgctctccggtgagtctggaaccctggggagacgaggaaaggctcagggttcagtttttggctcagcaaagccttagcctggctcctgtcactgctgccactgccagaactgccctgtctggtctgtctggtgctgatggtagaagagaagaacggggaaggggcaagagctgggtctgtctttctctgggagggtctgggaatacggagccccagaaaaaggtaggtggaggtcttaggcagagaacagtgcctagatggtgggggcacaaattctgactctcctttctttccttcccagggcctctcctgccgcctctggggtaagtatccctacttttaaaaagaatttcccaggttggccgaagggagcagagctgtcccaggcccatgccctccatgcccacctcagcctaggacagccaagttctttggctctctgggtatgtcaggtgccaccaaattctgggcttggaacagcttcagctcccacccgctcctccacacacagacagtgacatactctgcctgcctggggacatcgtgcctgctccgggccccgtgctggcgcctacgcacctgcagacagagctggtgctgaggtgccagaaggagaccgactgtgacctctgtctgcgtgtggctgtccacttggccgtgcatggtgagcaagtcatcctgtgacagtgcatgtgtacacgtgagtgtgtctggggtgggcatgagggccaggggatctctcaagcagtgctaggcatcctcagtgttctcctggaggacaccagcagaaggacccccaggccagtgtggtctccccagcccctgcttcccagcactgggctttccagaaggaagccaacgccaaagccagccagcccagagcagggggcctcacccagggccttgctcttgggtccttctagggcactgggaagagcctgaagatgaggaaaagtttggaggagcagctgactcaggggtggaggagcctaggaatggtgaggagaacctggctggcccaactgccccatgccaaggcctggcctgccgctcctgggcctgactgacccctgccctgttgcccacagcctctctccaggcccaagtcgtgctctccttccaggcctaccctactgcccgctgcgtcctgctggaggtgcaagtgcctgctgcccttgtgcagtttggtcagtctgtggtatgcaaaataataataatcaccttctaaacctaaaatctataaaactttttcacatgcattatctctttgaggattacaaaagaattaaatttattgaaacccttcagtaccaggcattacagccagtgttttacaggtatcaacttatttaattctcacaacagccatgtgaggtgggactattcttttgattctgatcagcgctgtgggcaagtcccttcagcctgttatgcctcagcttttatgtctgtaaaatggggatgagaatagttctacttcatatgcttgactgcgagaaatcaccaagcgtttttcagggtgcttctactattttcccctcctaccagcagtgtatgggagtcctagttgcttcccatctttgccaacacttgatggtgtaattttattttatttttaaattaaatatatttgaattttaaatatatgggaccctccatgaatttgcatgtcatcctcaggcacgggccttgctaatcttttctgtattgttccagttgtagtatatgtggtgccaaaacaagcataagtgttgtaattgtcataatttttctgcatatgtagtggtttgccattgtggttttaatttgtatcttccaatgactgatgaagttgagcacttttttcacatgcttattggctatttgtgtaacttccttgtgaaatatctcttaaagtttttttgtttttgtttttgtttttgtttttgccacataaaaaaacaatagttctggccgggcacagtggttcacacctgtaatcccagcactttgggaggctgaggcgggcagatcacgaagtcaggagattgagaccatcctggctaacactgtgaaaccctgcctccactaaaaaaatacaaaaaattagccaggcatggtggtgggcgcctgtagacccagctactcgggaggcagaggcaggagaatggcgtgaacccgggaggtggagcttgcagtgagccgagatcgcgccactgcactccagcctgggcgacagagcgagattccgtctcaaaaaaaaagaatagtcccacctcacatgactgttgtgagaattaaattaagttggtacctgtaaaacactggatgtaatgcctggcactgaataatttcaataaatttaattcttttgtaatcctcaaaactacctgatgaggcattattagtatcctcattttccagatagataaaatgaggcttggagaggggaggtctgtgggctggatgcacttctctgtactcttggaccaaagaaagagtcctaccatacataccatggtatacttaccatggtgtaagtaccatggtgcagggtgttggggcttctccctgccttaggaggccacatgtacctggaaggtctatttccactggggtcaaatcactcaaaccctttgactttccctccaacctccagcccccagccaatatcctatctggagaattgtagactgggagaacatctgcttggtccatgtcacaagcagttgtaaggaacactgaggcactgggttgagtgtgagaaccacttctgtggggaggggtgtgccatattgtgttggggtgtctcatctccttagctttggccaggtgatctagcacagcagggtgggtgcagggatttaaatgtctagggccttttcccgccctggtgacactcttactgaggacatttgctttagaattgaggccccttgaaagaaaggtgaatagtagatttcaggctatacagtataaatacagtcattagttgggggaggagggcagtgagcagagtggtccctgcagatgatcccacagcccttggcctggattctgagccctgcaccgccagccttcctcacccctctcctcacagggctctgtggtatatgactgcttcgaggctgccctagggagtgaggtacgaatctggtcctatactcagcccaggtacgagaaggaactcaaccacacacagcagctgcctggtaagtggacccccaagtcctggccccctagcctctgtcccctctggccattccccctcctgatttcaccctcttctagctccatccactctccggcaggggtctgagctgctatcctccccagagtcagtccctcggaccttctctctctgggtgatatggctttccagcccctggggaaggttctttgagcattggatagatgtgggtggtatgtaggggatggggagccattcctaatgcccccctgggagccaaattgcccccacttctttccttggcccccagccccactggaggctcttctgtgatctctcctcagactgcagggggctcgaagtctggaacagcatcccgagctgctggggtaggggctagggccagtgggccgggggtagggaggggcagggtctggagtataagaaacccttggagtccacttcagatatgggctaccacatctcagaagctcacagaacatattcattcattcattcattcattcatttgttcataacacattaattgcagtatctgtgctaagcactggaaatagaaagatgaatcttgggtcaggctcagtggctcatgcctgtaatcccagaactttgggaggccgaggtagaaggatcacttgagctcaaaagttcaagacgagcctgggcaacatggcaaatccccgtctctaccaaaaatacaaaaattaacaggacatggtggtgtgcatttgtggtcccagctactcaggaggctgaggcaggagaatcacttgagcctgggaggcaggggctacagtaagctgagactgcaccattgcacaccagcctgggtgacagagcaagactccgtctcaaaaaacaaaacaaaacaaaacaaaaacaaaaaacttgaaataaaagctaagaaagtcaagggtctaacttttttcccacgtactatttggattttgttttcgttttgtattttcttttttattgtgtataacatacatacataaaagtatgtaaagggtactgattttcttttttttttttttttttgagacagagtctcgctctgtcgctcaggctggagtgcagtggtgcaatctcggctcactgcaagctccgcctcccaggttcacgccattctcctgcctcagcctcccgagtagctgggactacaggcacccgccaccacgcctggctaatttttttttttttttagtagagacagggtttcaccgtgttagccaggatggtcttgatctcctgaccttgtgatccgcctgcctcagcctcccaaagtgctgggattacaggcgtgagccaccacgcccagccaaagggtactgatttccatgtccagttcttttttttttttttttttttggcggaatcttgctctgtcgcctaggctggactgcagtggtgtgatctcagctcactgcaacctctgccttctgggttcaagcgattctcctgcctcagcctcccaagcagctgggattacagacgtgcaccaccacgcacagctaatttttgtatttttagtagacatggagtttcaccatgctggccaggctggtcttgaactcctgacctcgtgatcctcccacctcggcctcccaaagtgctgggattacaggcatgagccgccacgtccggccaatttgtttttatatatgtatacacttgcataactagcacccagatcaatacataaatactgtgaatacatcacatactgtgatgttttctgaactactaaatgttttcaacttcattttctttttgccttcttaaaattaaagttggcctgcctctttggcaactcattaaagactattcaacaccagagttttgaaaacacagatgtgtatatcatggatttcatttcttccttcattaagtagacattgattcatttattcaacagatatttattaatttctgtgtaccaggcaaatccctggacactggaaatattaataaatcaataaatgaagatgacaaaaaacccgaccccacggagctggtgtcagggtcagggtgggggtgaggaaggacacaacaaacacatggagatgtgaagaatgcagtaagttagacagtgattagcactaaggagaacatttgtggaagggctggggaaggttgggagttgtagaggtcagggatggtctcattctggtgagcagagacctgaaagaggtgagggaggagccatatatttgagggaagagagaatagccagcaaaaagggcctggggtgggagtatgtcaggggtgtttaagaaatagtaaggagggggccgggcgcggtggctcacgcctgtaatcccagcactttgggaggccgaggctggcggatcacgaggtcaggagatcgagaccatcctggctaacacggtgaaaccccatctctacaaaaaatacaaaaaaatcagctgggcatggtggcaggcgcctgtagtcccagctactcgggagcctgaggcaggagaatggcttgaaccccaggaggcagagcttgcagtgagccgagatcacaccactgcactccagcctgggcgacagagccagactccatctcaaaaaaaaaaaaaggaaaaaaaaaagagagagaaacagtaaggaggtccttaataactctgcagcagagttattaaggacacaaatgccataggctgtgcgcgatggctcacgtctgcaatcccagcactttggggaagctgaggcaggaggattgcttgaggttaggagctcaagaccagcctggccaacatgagcgaaatcccatctctactaaaaatacaaaaactagccgggggtggtgacacacgcctgtaatcccagctactcgggtggctgaggcaagagaatcgcttgaacccaggaggtggaggttgcagtgagctatcgtgccaatgcactccagcctgggcaacagagcaagactccctctcaaaaaaaaaaaaggacacaagtatcaagaggtaaggtcagaaaggtcacagttctgaacagaggaaaatgacttgttttaaagaggttacaagatctttctgcagagggagaagcagggagaatagctcttctccgaccacacactagggtctccacgggcttggctttgggcagctgctaggagcaaagtctggtctgaaatgatgacacacgctctgccctccgagagcctcccagtctagggggtttgaaggaaactccaaagggtcagtcggggatgcagaagaggtgaggaagtctaagctgcgctctctttgcctctcccaccagccctgccctggctcaacgtgtcagcagatggtgacaacgtgcatctggttctgaatgtctctgaggagcagcacttcggcctctccctgtactggaatcaggtccagggccccccaaaaccccggtggcacaaaaacctggtgaggcctcccccttcccaagtccattcccactgtaggccgatgcctgtgcaaaggacgcagtgccatatcagagaggatccttgaagaggactcaccccaagcaagggaaaattggtgggggaacttctgccttcctggtttccttgactttggcctcctcctcttcctccttatcttctccaacctccttcctttatttgttccacagactggaccgcagatcattaccttgaaccacacagacctggttccctgcctctgtattcaggtaggagcagagtctagctgggtgccagaagaggagtgggaagatgatgatgggggtgatccctgccttcctggtctcaccattcttcaaacccttcattgaggtggagactgtggctccctggggtggctggccctcccttgacccttgctgtcctatgccttctgtctattacattccctgaatgctctccctgatcctccacagaactcctgcttattcttcatggccccattcaaatgtcaccttctccttgaaacctttccctactcctccagttctgtctttgtgttcccctggcgggcagagcatgtgctacgaacttggactggtttgaatcttggctcttgccatttgctagctgtgtaaccttgggcaagtcacttcacctctgtgagcctgtttctcatctgtaaaatgggaataataatagtaacagcctcatggggctgttataagaatgtgtgccacacccaggcttaaatatgctggctctttcctcttcctctgtacatttatttatttttttagacaaggtctcactctgttgcccaggctggagtgcagtggcacaatcatggcacactgcagcctcagccccatgggctcaagtgatcctcctgtctcagcctcccaagtagctggaactactggtgagcactaccatactcagctagtttttttttgttttgtgtagagacggggtcttgctatgttacccaggctgttctgaattcctgggcttatgctatcctcccacctcagcctcccaccaagtgctgggattataagcatgagccactgtggcttgccctgattgcactttttttttttttttttttaagacagagtctttctctgtcgcccaggctggagcaccgtggcgtgatctcggctcactgcaagctgcttctcctgggttcacgccattctcctgcctcagcctcgctgagtagctgggactacaggtgcctgcaaccacgcccagctaattttttgtattttcagtaaagacagggtttcaccgtgttagccaggatggtctcgatctcctgaccttatgatccacaagcctcgtcctcccaaagtgctgggattacaggcatgacccactgtgcccagccgctgattgcacatttaattggtcatcaggtctcatccatcttacctctgacattaatgtctctcattttctttccccctcctctccatctcagtccagcttagggctctatcatctgttttctagactgtttcaacacctccaagctcccctcccttcccatcactttcctggcattctgggcccatattctgcccccaacggtgccttttcactctattttccccatgattccccttcatgagaacattgttacatccagtggagctacttaccaagatacagctagctccctgccttttctcaggtggttcccattacctcaaatgccctcacctccttcccaaagcttttccccaaccacccggcctctcctagctccaaatccccttgcacttctatctttccttgtccatttatcacttcatttcttttattttcttaaattttttttttttttttagagacagcattttgctctgtcacccatggtagagtgcagtggcatgaacacgtctcattgcagccccaagctcccaggttcaagggatcctcctgcctcagcctctgcagctgggactgcaggcatgcgccaccatgcctggctaattgtttccttttttttttttttttttttttaatggagtttcactcttttgcccaggatggagtgcagtggcgtgatctcggctcactgcaacttccgcctcccaggttcaagccattctcctgcctcagcctcccaagtagctgagattacaggcacacaccaccatgcccagctaatttttgtatttttagtagagacagggtttcaccatgttggtcaggctggtcccaaattcctgacctcgtgatccacccgcctcggccgcccaaagtgctgggattacaggcgtgagccactgtgcccagcctgttttcattttttaatgttttgtggcgatgggccaccacacccagctcaatcacttactttcttatttgggcatctaatttcttcttgtacacaacagatgctcaataaatattatgaaatgaatgagtgttttactaatttatataaatattttatccttactacaagtgtgagtttgtgatttccttgaaggcaagcaaatcatatctaattcaaatgtaatagctttgcaagagccttgcacatagcgcctacttgttttttgtttttttgtgtttttgttttttttttgtttttttgtcttttttgagacagagtctcgctctattggcaggctggagtacagtggcgtgatctcggctcactgcaatctctgcctcctggattcaagcaattcttctgcctcagcctcccaagtagctgggactacaagtgcatgccaccatgcccggctaatttttgtattttcagtagagacggggtttcagcatgttggccagatggtctcgatctcttgacctcgtgatccgcccaccttggcctcccaaagtgctgggattacaggggtgagccaccgcgcccagccttgttttgtttttaaacaaggtaacagtatgaggtcctcactgttgaatgagtgaataaatgttactgcctaacacagccataggacacagcagatgttcatgagatgtatgctgtgatttaaatggcttcattgccaaacacagtgcctgccacatagtcggtgttcctaactaaaggcttgatggataaattaatgtattacctctagtgcttagcatagagctatgcacataataggcactcttgaaatgtctgttgaaagaataaatgaatgtgtccttagaacttagcacattccccaacacatagcaggtgcttacacaagtgattgtggaatgaattaaaattaattatccaccaggcacagtggctcacacctgtaatcccagcactttgggaggccaaggtgggtggatcacgaggtcaggagtttgagaccagcctggcctaacatagtgaaacccagtctctactaaaagtacaaaaattagccaggcatggtgatgtgcgcctgtagtccctgctacttgggaagctgaggcaggagaatcacttgaacccaggaggcggaggttgtggtgagctgagatcacaccactgcactccagcctgggcaacagagtgagattccatctcaaaaaataaaaaaataataaaaatttaattatccaaggtctcttgtgcttgccatactgctaagacacaatggtaggcactcattaaaagtctgttgaatgggccaggcgcggtggctcacgcttgtaatcccaacactttgggaggctgagacgggtggatcacttgaggtcaggagttcgagaccagcctgatcaatgtggtgaaaccccatctctactaaaaatacaaaaattaaccagttagccggccgttgtggcatgttcctgtaatcgcagctcctcaggagactgagatgggagaatcgcttgaacctgggaggtggaggttgtagtgagccaagattgcaccactgcactccagcctgggcgacagagcgagactctatctcaaaaaaaaaaaaaagtttgttaatgaagatgttgccagtgcccagcattatgtttgctggaagaatagatgtgagcacctccaggttttgtaaaaggcaggaagacccagcaagtgtttgtgaaatacctgctgaatgagtgcatccccactgtccagcagagggccaggcacatgcccatggaggggacctgagcagacccccatttcctttccaggtgtggcctctggaacctgactccgttaggacgaacatctgccccttcagggagggtgagccgaccggcctggggctggggttggggtgttgcgagcgatgggtacctggcctgcggtgactgtgccctttccttgcagacccccgcgcacaccagaacctctggcaagccgcccgactgcaactgctgaccctgcagagctggctgctggacgcaccgt

SEQ ID NO: 12553 - DNA, 946 bp, Homo sapiens
aaaacgaaagcactccgtgctggaagtaggaggagagtcaggactcccaggacagagagtgcacaaactacccagcacagccccctccgccccctctggaggctgaagagggattccagcccctgccacccacagacacgggctgactggggtgtctgccccccttgggggggggcagcacagggcctcaggcctgggtgccacctggcacctagaagatgcctgtgccctggttcttgctgtccttggcactgggccgaagcccagtggtcctttctctggagaggcttgtggggcctcaggacgctacccactgctctccgggcctctcctgccgcctctgggacagtgacatactctgcctgcctggggacatcgtgcctgctccgggccccgtgctggcgcctacgcacctgcagacagagctggtgctgaggtgccagaaggagaccgactgtgacctctgtctgcgtgtggctgtccacttggccgtgcatgggctctgtggtatatgactgcttcgaggctgccctagggagtgaggtacgaatctggtcctatactcagcccaggtacgagaaggaactcaaccacacacagcagctgcctgccctgccctggctcaacgtgtcagcagatggtgacaacgtgcatctggttctgaatgtctctgaggagcagcacttcggcctctccctgtactggaatcaggtccagggccccccaaaaccccggtggcacaaaaacctgactggaccgcagatcattaccttgaaccacacagacctggttccctgcctctgtattcaggtgtggcctctggaacctgactccgttaggacgaacatctgccccttcagggaggacccccgcgcacaccagaacctctggcaagccgcccgactgcaactgctgaccctgcagagctggctgctggacgcaccgt

SEQ ID NO: 12554 - DNA, 13326 bp, Homo sapiens
ggaagtaggaggagagtcaggactcccaggacagagagtgcacaaactacccagcacagccccctccgccccctctggaggctgaagagggattccagcccctgccacccacagacacgggctgactggggtgtctgccccccttgggggggggcagcacagggcctcaggcctgggtgccacctggcacctagaagatgcctgtgccctggttcttgctgtccttggcactgggccgaagcccagtggtcctttctctggagaggcttgtggggcctcaggacgctacccactgctctccggtgagtctggaaccctggggagacgaggaaaggctcagggttcagtttttggctcagcaaagccttagcctggctcctgtcactgctgccactgccagaactgccctgtctggtctgtctggtgctgatggtagaagagaagaacggggaaggggcaagagctgggtctgtctttctctgggagggtctgggaatacggagccccagaaaaaggtaggtggaggtcttaggcagagaacagtgcctagatggtgggggcacaaattctgactctcctttctttccttcccagggcctctcctgccgcctctggggtaagtatccctacttttaaaaagaatttcccaggttggccgaagggagcagagctgtcccaggcccatgccctccatgcccacctcagcctaggacagccaagttctttggctctctgggtatgtcaggtgccaccaaattctgggcttggaacagcttcagctcccacccgctcctccacacacagacagtgacatactctgcctgcctggggacatcgtgcctgctccgggccccgtgctggcgcctacgcacctgcagacagagctggtgctgaggtgccagaaggagaccgactgtgacctctgtctgcgtgtggctgtccacttggccgtgcatggtgagcaagtcatcctgtgacagtgcatgtgtacacgtgagtgtgtctggggtgggcatgagggccaggggatctctcaagcagtgctaggcatcctcagtgttctcctggaggacaccagcagaaggacccccaggccagtgtggtctccccagcccctgcttcccagcactgggctttccagaaggaagccaacgccaaagccagccagcccagagcagggggcctcacccagggccttgctcttgggtccttctagggcactgggaagagcctgaagatgaggaaaagtttggaggagcagctgactcaggggtggaggagcctaggaatggtgaggagaacctggctggcccaactgccccatgccaaggcctggcctgccgctcctgggcctgactgacccctgccctgttgcccacagcctctctccaggcccaagtcgtgctctccttccaggcctaccctactgcccgctgcgtcctgctggaggtgcaagtgcctgctgcccttgtgcagtttggtcagtctgtggtatgcaaaataataataatcaccttctaaacctaaaatctataaaactttttcacatgcattatctctttgaggattacaaaagaattaaatttattgaaacccttcagtaccaggcattacagccagtgttttacaggtatcaacttatttaattctcacaacagccatgtgaggtgggactattcttttgattctgatcagcgctgtgggcaagtcccttcagcctgttatgcctcagcttttatgtctgtaaaatggggatgagaatagttctacttcatatgcttgactgcgagaaatcaccaagcgtttttcagggtgcttctactattttcccctcctaccagcagtgtatgggagtcctagttgcttcccatctttgccaacacttgatggtgtaattttattttatttttaaattaaatatatttgaattttaaatatatgggaccctccatgaatttgcatgtcatcctcaggcacgggccttgctaatcttttctgtattgttccagttgtagtatatgtggtgccaaaacaagcataagtgttgtaattgtcataatttttctgcatatgtagtggtttgccattgtggttttaatttgtatcttccaatgactgatgaagttgagcacttttttcacatgcttattggctatttgtgtaacttccttgtgaaatatctcttaaagtttttttgtttttgtttttgtttttgtttttgccacataaaaaaacaatagttctggccgggcacagtggttcacacctgtaatcccagcactttgggaggctgaggcgggcagatcacgaagtcaggagattgagaccatcctggctaacactgtgaaaccctgcctccactaaaaaaatacaaaaaattagccaggcatggtggtgggcgcctgtagacccagctactcgggaggcagaggcaggagaatggcgtgaacccgggaggtggagcttgcagtgagccgagatcgcgccactgcactccagcctgggcgacagagcgagattccgtctcaaaaaaaaagaatagtcccacctcacatgactgttgtgagaattaaattaagttggtacctgtaaaacactggatgtaatgcctggcactgaataatttcaataaatttaattcttttgtaatcctcaaaactacctgatgaggcattattagtatcctcattttccagatagataaaatgaggcttggagaggggaggtctgtgggctggatgcacttctctgtactcttggaccaaagaaagagtcctaccatacataccatggtatacttaccatggtgtaagtaccatggtgcagggtgttggggcttctccctgccttaggaggccacatgtacctggaaggtctatttccactggggtcaaatcactcaaaccctttgactttccctccaacctccagcccccagccaatatcctatctggagaattgtagactgggagaacatctgcttggtccatgtcacaagcagttgtaaggaacactgaggcactgggttgagtgtgagaaccacttctgtggggaggggtgtgccatattgtgttggggtgtctcatctccttagctttggccaggtgatctagcacagcagggtgggtgcagggatttaaatgtctagggccttttcccgccctggtgacactcttactgaggacatttgctttagaattgaggccccttgaaagaaaggtgaatagtagatttcaggctatacagtataaatacagtcattagttgggggaggagggcagtgagcagagtggtccctgcagatgatcccacagcccttggcctggattctgagccctgcaccgccagccttcctcacccctctcctcacagggctctgtggtatatgactgcttcgaggctgccctagggagtgaggtacgaatctggtcctatactcagcccaggtacgagaaggaactcaaccacacacagcagctgcctggtaagtggacccccaagtcctggccccctagcctctgtcccctctggccattccccctcctgatttcaccctcttctagctccatccactctccggcaggggtctgagctgctatcctccccagagtcagtccctcggaccttctctctctgggtgatatggctttccagcccctggggaaggttctttgagcattggatagatgtgggtggtatgtaggggatggggagccattcctaatgcccccctgggagccaaattgcccccacttctttccttggcccccagccccactggaggctcttctgtgatctctcctcagactgcagggggctcgaagtctggaacagcatcccgagctgctggggtaggggctagggccagtgggccgggggtagggaggggcagggtctggagtataagaaacccttggagtccacttcagatatgggctaccacatctcagaagctcacagaacatattcattcattcattcattcattcatttgttcataacacattaattgcagtatctgtgctaagcactggaaatagaaagatgaatcttgggtcaggctcagtggctcatgcctgtaatcccagaactttgggaggccgaggtagaaggatcacttgagctcaaaagttcaagacgagcctgggcaacatggcaaatccccgtctctaccaaaaatacaaaaattaacaggacatggtggtgtgcatttgtggtcccagctactcaggaggctgaggcaggagaatcacttgagcctgggaggcaggggctacagtaagctgagactgcaccattgcacaccagcctgggtgacagagcaagactccgtctcaaaaaacaaaacaaaacaaaacaaaaacaaaaaacttgaaataaaagctaagaaagtcaagggtctaacttttttcccacgtactatttggattttgttttcgttttgtattttcttttttattgtgtataacatacatacataaaagtatgtaaagggtactgattttcttttttttttttttttttgagacagagtctcgctctgtcgctcaggctggagtgcagtggtgcaatctcggctcactgcaagctccgcctcccaggttcacgccattctcctgcctcagcctcccgagtagctgggactacaggcacccgccaccacgcctggctaatttttttttttttttagtagagacagggtttcaccgtgttagccaggatggtcttgatctcctgaccttgtgatccgcctgcctcagcctcccaaagtgctgggattacaggcgtgagccaccacgcccagccaaagggtactgatttccatgtccagttcttttttttttttttttttttggcggaatcttgctctgtcgcctaggctggactgcagtggtgtgatctcagctcactgcaacctctgccttctgggttcaagcgattctcctgcctcagcctcccaagcagctgggattacagacgtgcaccaccacgcacagctaatttttgtatttttagtagacatggagtttcaccatgctggccaggctggtcttgaactcctgacctcgtgatcctcccacctcggcctcccaaagtgctgggattacaggcatgagccgccacgtccggccaatttgtttttatatatgtatacacttgcataactagcacccagatcaatacataaatactgtgaatacatcacatactgtgatgttttctgaactactaaatgttttcaacttcattttctttttgccttcttaaaattaaagttggcctgcctctttggcaactcattaaagactattcaacaccagagttttgaaaacacagatgtgtatatcatggatttcatttcttccttcattaagtagacattgattcatttattcaacagatatttattaatttctgtgtaccaggcaaatccctggacactggaaatattaataaatcaataaatgaagatgacaaaaaacccgaccccacggagctggtgtcagggtcagggtgggggtgaggaaggacacaacaaacacatggagatgtgaagaatgcagtaagttagacagtgattagcactaaggagaacatttgtggaagggctggggaaggttgggagttgtagaggtcagggatggtctcattctggtgagcagagacctgaaagaggtgagggaggagccatatatttgagggaagagagaatagccagcaaaaagggcctggggtgggagtatgtcaggggtgtttaagaaatagtaaggagggggccgggcgcggtggctcacgcctgtaatcccagcactttgggaggccgaggctggcggatcacgaggtcaggagatcgagaccatcctggctaacacggtgaaaccccatctctacaaaaaatacaaaaaaatcagctgggcatggtggcaggcgcctgtagtcccagctactcgggagcctgaggcaggagaatggcttgaaccccaggaggcagagcttgcagtgagccgagatcacaccactgcactccagcctgggcgacagagccagactccatctcaaaaaaaaaaaaaggaaaaaaaaaagagagagaaacagtaaggaggtccttaataactctgcagcagagttattaaggacacaaatgccataggctgtgcgcgatggctcacgtctgcaatcccagcactttggggaagctgaggcaggaggattgcttgaggttaggagctcaagaccagcctggccaacatgagcgaaatcccatctctactaaaaatacaaaaactagccgggggtggtgacacacgcctgtaatcccagctactcgggtggctgaggcaagagaatcgcttgaacccaggaggtggaggttgcagtgagctatcgtgccaatgcactccagcctgggcaacagagcaagactccctctcaaaaaaaaaaaaggacacaagtatcaagaggtaaggtcagaaaggtcacagttctgaacagaggaaaatgacttgttttaaagaggttacaagatctttctgcagagggagaagcagggagaatagctcttctccgaccacacactagggtctccacgggcttggctttgggcagctgctaggagcaaagtctggtctgaaatgatgacacacgctctgccctccgagagcctcccagtctagggggtttgaaggaaactccaaagggtcagtcggggatgcagaagaggtgaggaagtctaagctgcgctctctttgcctctcccaccagccctgccctggctcaacgtgtcagcagatggtgacaacgtgcatctggttctgaatgtctctgaggagcagcacttcggcctctccctgtactggaatcaggtccagggccccccaaaaccccggtggcacaaaaacctggtgaggcctcccccttcccaagtccattcccactgtaggccgatgcctgtgcaaaggacgcagtgccatatcagagaggatccttgaagaggactcaccccaagcaagggaaaattggtgggggaacttctgccttcctggtttccttgactttggcctcctcctcttcctccttatcttctccaacctccttcctttatttgttccacagactggaccgcagatcattaccttgaaccacacagacctggttccctgcctctgtattcaggtaggagcagagtctagctgggtgccagaagaggagtgggaagatgatgatgggggtgatccctgccttcctggtctcaccattcttcaaacccttcattgaggtggagactgtggctccctggggtggctggccctcccttgacccttgctgtcctatgccttctgtctattacattccctgaatgctctccctgatcctccacagaactcctgcttattcttcatggccccattcaaatgtcaccttctccttgaaacctttccctactcctccagttctgtctttgtgttcccctggcgggcagagcatgtgctacgaacttggactggtttgaatcttggctcttgccatttgctagctgtgtaaccttgggcaagtcacttcacctctgtgagcctgtttctcatctgtaaaatgggaataataatagtaacagcctcatggggctgttataagaatgtgtgccacacccaggcttaaatatgctggctctttcctcttcctctgtacatttatttatttttttagacaaggtctcactctgttgcccaggctggagtgcagtggcacaatcatggcacactgcagcctcagccccatgggctcaagtgatcctcctgtctcagcctcccaagtagctggaactactggtgagcactaccatactcagctagtttttttttgttttgtgtagagacggggtcttgctatgttacccaggctgttctgaattcctgggcttatgctatcctcccacctcagcctcccaccaagtgctgggattataagcatgagccactgtggcttgccctgattgcactttttttttttttttttttaagacagagtctttctctgtcgcccaggctggagcaccgtggcgtgatctcggctcactgcaagctgcttctcctgggttcacgccattctcctgcctcagcctcgctgagtagctgggactacaggtgcctgcaaccacgcccagctaattttttgtattttcagtaaagacagggtttcaccgtgttagccaggatggtctcgatctcctgaccttatgatccacaagcctcgtcctcccaaagtgctgggattacaggcatgacccactgtgcccagccgctgattgcacatttaattggtcatcaggtctcatccatcttacctctgacattaatgtctctcattttctttccccctcctctccatctcagtccagcttagggctctatcatctgttttctagactgtttcaacacctccaagctcccctcccttcccatcactttcctggcattctgggcccatattctgcccccaacggtgccttttcactctattttccccatgattccccttcatgagaacattgttacatccagtggagctacttaccaagatacagctagctccctgccttttctcaggtggttcccattacctcaaatgccctcacctccttcccaaagcttttccccaaccacccggcctctcctagctccaaatccccttgcacttctatctttccttgtccatttatcacttcatttcttttattttcttaaattttttttttttttttagagacagcattttgctctgtcacccatggtagagtgcagtggcatgaacacgtctcattgcagccccaagctcccaggttcaagggatcctcctgcctcagcctctgcagctgggactgcaggcatgcgccaccatgcctggctaattgtttccttttttttttttttttttttttaatggagtttcactcttttgcccaggatggagtgcagtggcgtgatctcggctcactgcaacttccgcctcccaggttcaagccattctcctgcctcagcctcccaagtagctgagattacaggcacacaccaccatgcccagctaatttttgtatttttagtagagacagggtttcaccatgttggtcaggctggtcccaaattcctgacctcgtgatccacccgcctcggccgcccaaagtgctgggattacaggcgtgagccactgtgcccagcctgttttcattttttaatgttttgtggcgatgggccaccacacccagctcaatcacttactttcttatttgggcatctaatttcttcttgtacacaacagatgctcaataaatattatgaaatgaatgagtgttttactaatttatataaatattttatccttactacaagtgtgagtttgtgatttccttgaaggcaagcaaatcatatctaattcaaatgtaatagctttgcaagagccttgcacatagcgcctacttgttttttgtttttttgtgtttttgttttttttttgtttttttgtcttttttgagacagagtctcgctctattggcaggctggagtacagtggcgtgatctcggctcactgcaatctctgcctcctggattcaagcaattcttctgcctcagcctcccaagtagctgggactacaagtgcatgccaccatgcccggctaatttttgtattttcagtagagacggggtttcagcatgttggccagatggtctcgatctcttgacctcgtgatccgcccaccttggcctcccaaagtgctgggattacaggggtgagccaccgcgcccagccttgttttgtttttaaacaaggtaacagtatgaggtcctcactgttgaatgagtgaataaatgttactgcctaacacagccataggacacagcagatgttcatgagatgtatgctgtgatttaaatggcttcattgccaaacacagtgcctgccacatagtcggtgttcctaactaaaggcttgatggataaattaatgtattacctctagtgcttagcatagagctatgcacataataggcactcttgaaatgtctgttgaaagaataaatgaatgtgtccttagaacttagcacattccccaacacatagcaggtgcttacacaagtgattgtggaatgaattaaaattaattatccaccaggcacagtggctcacacctgtaatcccagcactttgggaggccaaggtgggtggatcacgaggtcaggagtttgagaccagcctggcctaacatagtgaaacccagtctctactaaaagtacaaaaattagccaggcatggtgatgtgcgcctgtagtccctgctacttgggaagctgaggcaggagaatcacttgaacccaggaggcggaggttgtggtgagctgagatcacaccactgcactccagcctgggcaacagagtgagattccatctcaaaaaataaaaaaataataaaaatttaattatccaaggtctcttgtgcttgccatactgctaagacacaatggtaggcactcattaaaagtctgttgaatgggccaggcgcggtggctcacgcttgtaatcccaacactttgggaggctgagacgggtggatcacttgaggtcaggagttcgagaccagcctgatcaatgtggtgaaaccccatctctactaaaaatacaaaaattaaccagttagccggccgttgtggcatgttcctgtaatcgcagctcctcaggagactgagatgggagaatcgcttgaacctgggaggtggaggttgtagtgagccaagattgcaccactgcactccagcctgggcgacagagcgagactctatctcaaaaaaaaaaaaaagtttgttaatgaagatgttgccagtgcccagcattatgtttgctggaagaatagatgtgagcacctccaggttttgtaaaaggcaggaagacccagcaagtgtttgtgaaatacctgctgaatgagtgcatccccactgtccagcagagggccaggcacatgcccatggaggggacctgagcagacccccatttcctttccaggtgtggcctctggaacctgactccgttaggacgaacatctgccccttcagggagggtgagccgaccggcctggggctggggttggggtgttgcgagcgatgggtacctggcctgcggtgactgtgccctttccttgcagacccccgcgcacaccagaacctctggcaagccgcccgactgcaactgctgaccctgcagagctggctgctggacgcaccgtgctcgctgcccgcagaagcggcactgtgctggcgggctccgggtggggacccctgccagccactggtcccaccgctttcctgggagaacgtcactgtggacgtaagtgaagcagagggcacctcccgtggtgaggggagagtggggaaccgggggtccccttttgtgatcccacccattcctctctttccacagaaggttctcgagttcccattgctgaaaggccaccctaacctctgtgttcaggtcagaaaggggtgcatagtgctgggctggaggctggacctgggcagaccccccagccaagggggtcttagttcttgggccgctaaagcatagtggttgccagcttcctctatgggagttccactgcctactttagtagtgcgcgggaccctgggcaactcacttcacctctctgaacgtcagtttcctcatctgtttaatgcagatgataatacagtaactacctcatggagtggttgtgacaatgaaataagagaagtgcttccccttaggaatcggtacagactaaatgctccataaatgtagccacttttattattgctatccttattctatttccatacctgtagaatgggttgctctacagtttcaaagggtgattataagaacattcactcatccggccaggcgcggtggctcacgcctgtaatcccagcactttgggaggccgaggcgggcagatcacgaggtcaggacatcaagaccatcctggctaacatggtgaaaccccatctctactaaaaatacaaaaaattagccggtcgtggtggtgggcacctgtagtcccagctactaggaaggctggggcaggagaatggcgtgaacctgggaggctgagcttgcagtgagctgagagggcgccactgcactccagcctgggtgacagagtgagactgggcgacagagtgaaactccgtctcaaaaaaaaaaaaaattcactcattcaagattttttgagcagcacaagtcactgttttaggcacttgtgatagaccctaacatctctaccctcatagaacttatattgtaatggagaaaggcaggcaacagacattgtaaataaatcatatagtatcttaaaattgcatacaaataccatgggaaagggataaggtgggactggggttgcaatttttagcagggtggtcatgtgagaaaggaatctctttgagaaggttagatgagaggggaaccatgctccgtaagacataaaaacagctttagggtcagaagacgctttatacagatgatctcacaaggctggggcagagaaagatgtagtgattcctaatcacccagccttgaatccacatctgcctcaggtcagattgagtgcagattcccaacccaacaggccttctgttgcctgccccattctggtctttctgcctttggcttttgcttttcttagtggccctaaccatggtctcttcccagcaggtgaacagctcggagaagctgcagctgcaggagtgcttgtgggctggtgagttgggcctgggggcagctggggcagggccacctcctaggggtgaaggtcagggcatgggaggcaggcaagtggccaatcccagcaaggatgggtcttggtcagagtggcctctcaccccttccagactccctggggcctctcaaagacgatgtgctactgttggagacacgaggcccccaggacaacagatccctctgtgccttggaacccagtggctgtacttcactacccagcaaagcctccacggttaggactgggcgaccctcctccacagatctctccaaatgcatctcacatctggcctcaaattttcactccatccaccctgtgccggtctctgggaacatggggggtgactcagaccagggccatattcagcggcatcaccaaagtctcccagtcccctctacctcattctacccagctgtagcctggtaggtgctgccctaagggtgctacctccaggtaacagtgcccccatcctttggcttggcagagggcagctcgccttggagagtacttactacaagacctgcagtca

SEQ ID NO: 12555 - DNA, 1445 bp, Homo sapiens
ggaagtaggaggagagtcaggactcccaggacagagagtgcacaaactacccagcacagccccctccgccccctctggaggctgaagagggattccagcccctgccacccacagacacgggctgactggggtgtctgccccccttgggggggggcagcacagggcctcaggcctgggtgccacctggcacctagaagatgcctgtgccctggttcttgctgtccttggcactgggccgaagcccagtggtcctttctctggagaggcttgtggggcctcaggacgctacccactgctctccgggcctctcctgccgcctctgggacagtgacatactctgcctgcctggggacatcgtgcctgctccgggccccgtgctggcgcctacgcacctgcagacagagctggtgctgaggtgccagaaggagaccgactgtgacctctgtctgcgtgtggctgtccacttggccgtgcatgcctctctccaggcccaagtcgtgctctccttccaggcctaccctactgcccgctgcgtcctgctggaggtgcaagtgcctgctgcccttgtgcagtttggtcagtctgtgggctctgtggtatatgactgcttcgaggctgccctagggagtgaggtacgaatctggtcctatactcagcccaggtacgagaaggaactcaaccacacacagcagctgcctgactgcagggggctcgaagtctggaacagcatcccgagctgctgggccctgccctggctcaacgtgtcagcagatggtgacaacgtgcatctggttctgaatgtctctgaggagcagcacttcggcctctccctgtactggaatcaggtccagggccccccaaaaccccggtggcacaaaaacctgactggaccgcagatcattaccttgaaccacacagacctggttccctgcctctgtattcaggtgtggcctctggaacctgactccgttaggacgaacatctgccccttcagggaggacccccgcgcacaccagaacctctggcaagccgcccgactgcaactgctgaccctgcagagctggctgctggacgcaccgtgctcgctgcccgcagaagcggcactgtgctggcgggctccgggtggggacccctgccagccactggtcccaccgctttcctgggagaacgtcactgtggacaaggttctcgagttcccattgctgaaaggccaccctaacctctgtgttcaggtgaacagctcggagaagctgcagctgcaggagtgcttgtgggctgactccctggggcctctcaaagacgatgtgctactgttggagacacgaggcccccaggacaacagatccctctgtgccttggaacccagtggctgtacttcactacccagcaaagcctccacgagggcagctcgccttggagagtacttactacaagacctgcagtca

SEQ ID NO: 12556 - DNA, 11533 bp, Homo sapiens
aaaacgaaagcactccgtgctggaagtaggaggagagtcaggactcccaggacagagagtgcacaaactacccagcacagccccctccgccccctctggaggctgaagagggattccagcccctgccacccacagacacgggctgactggggtgtctgccccccttgggggggggcagcacagggcctcaggcctgggtgccacctggcacctagaagatgcctgtgccctggttcttgctgtccttggcactgggccgaagcccagtggtcctttctctggagaggcttgtggggcctcaggacgctacccactgctctccggtgagtctggaaccctggggagacgaggaaaggctcagggttcagtttttggctcagcaaagccttagcctggctcctgtcactgctgccactgccagaactgccctgtctggtctgtctggtgctgatggtagaagagaagaacggggaaggggcaagagctgggtctgtctttctctgggagggtctgggaatacggagccccagaaaaaggtaggtggaggtcttaggcagagaacagtgcctagatggtgggggcacaaattctgactctcctttctttccttcccagggcctctcctgccgcctctggggtaagtatccctacttttaaaaagaatttcccaggttggccgaagggagcagagctgtcccaggcccatgccctccatgcccacctcagcctaggacagccaagttctttggctctctgggtatgtcaggtgccaccaaattctgggcttggaacagcttcagctcccacccgctcctccacacacagacagtgacatactctgcctgcctggggacatcgtgcctgctccgggccccgtgctggcgcctacgcacctgcagacagagctggtgctgaggtgccagaaggagaccgactgtgacctctgtctgcgtgtggctgtccacttggccgtgcatggtgagcaagtcatcctgtgacagtgcatgtgtacacgtgagtgtgtctggggtgggcatgagggccaggggatctctcaagcagtgctaggcatcctcagtgttctcctggaggacaccagcagaaggacccccaggccagtgtggtctccccagcccctgcttcccagcactgggctttccagaaggaagccaacgccaaagccagccagcccagagcagggggcctcacccagggccttgctcttgggtccttctagggcactgggaagagcctgaagatgaggaaaagtttggaggagcagctgactcaggggtggaggagcctaggaatggtgaggagaacctggctggcccaactgccccatgccaaggcctggcctgccgctcctgggcctgactgacccctgccctgttgcccacagcctctctccaggcccaagtcgtgctctccttccaggcctaccctactgcccgctgcgtcctgctggaggtgcaagtgcctgctgcccttgtgcagtttggtcagtctgtggtatgcaaaataataataatcaccttctaaacctaaaatctataaaactttttcacatgcattatctctttgaggattacaaaagaattaaatttattgaaacccttcagtaccaggcattacagccagtgttttacaggtatcaacttatttaattctcacaacagccatgtgaggtgggactattcttttgattctgatcagcgctgtgggcaagtcccttcagcctgttatgcctcagcttttatgtctgtaaaatggggatgagaatagttctacttcatatgcttgactgcgagaaatcaccaagcgtttttcagggtgcttctactattttcccctcctaccagcagtgtatgggagtcctagttgcttcccatctttgccaacacttgatggtgtaattttattttatttttaaattaaatatatttgaattttaaatatatgggaccctccatgaatttgcatgtcatcctcaggcacgggccttgctaatcttttctgtattgttccagttgtagtatatgtggtgccaaaacaagcataagtgttgtaattgtcataatttttctgcatatgtagtggtttgccattgtggttttaatttgtatcttccaatgactgatgaagttgagcacttttttcacatgcttattggctatttgtgtaacttccttgtgaaatatctcttaaagtttttttgtttttgtttttgtttttgtttttgccacataaaaaaacaatagttctggccgggcacagtggttcacacctgtaatcccagcactttgggaggctgaggcgggcagatcacgaagtcaggagattgagaccatcctggctaacactgtgaaaccctgcctccactaaaaaaatacaaaaaattagccaggcatggtggtgggcgcctgtagacccagctactcgggaggcagaggcaggagaatggcgtgaacccgggaggtggagcttgcagtgagccgagatcgcgccactgcactccagcctgggcgacagagcgagattccgtctcaaaaaaaaagaatagtcccacctcacatgactgttgtgagaattaaattaagttggtacctgtaaaacactggatgtaatgcctggcactgaataatttcaataaatttaattcttttgtaatcctcaaaactacctgatgaggcattattagtatcctcattttccagatagataaaatgaggcttggagaggggaggtctgtgggctggatgcacttctctgtactcttggaccaaagaaagagtcctaccatacataccatggtatacttaccatggtgtaagtaccatggtgcagggtgttggggcttctccctgccttaggaggccacatgtacctggaaggtctatttccactggggtcaaatcactcaaaccctttgactttccctccaacctccagcccccagccaatatcctatctggagaattgtagactgggagaacatctgcttggtccatgtcacaagcagttgtaaggaacactgaggcactgggttgagtgtgagaaccacttctgtggggaggggtgtgccatattgtgttggggtgtctcatctccttagctttggccaggtgatctagcacagcagggtgggtgcagggatttaaatgtctagggccttttcccgccctggtgacactcttactgaggacatttgctttagaattgaggccccttgaaagaaaggtgaatagtagatttcaggctatacagtataaatacagtcattagttgggggaggagggcagtgagcagagtggtccctgcagatgatcccacagcccttggcctggattctgagccctgcaccgccagccttcctcacccctctcctcacagggctctgtggtatatgactgcttcgaggctgccctagggagtgaggtacgaatctggtcctatactcagcccaggtacgagaaggaactcaaccacacacagcagctgcctggtaagtggacccccaagtcctggccccctagcctctgtcccctctggccattccccctcctgatttcaccctcttctagctccatccactctccggcaggggtctgagctgctatcctccccagagtcagtccctcggaccttctctctctgggtgatatggctttccagcccctggggaaggttctttgagcattggatagatgtgggtggtatgtaggggatggggagccattcctaatgcccccctgggagccaaattgcccccacttctttccttggcccccagccccactggaggctcttctgtgatctctcctcagactgcagggggctcgaagtctggaacagcatcccgagctgctggggtaggggctagggccagtgggccgggggtagggaggggcagggtctggagtataagaaacccttggagtccacttcagatatgggctaccacatctcagaagctcacagaacatattcattcattcattcattcattcatttgttcataacacattaattgcagtatctgtgctaagcactggaaatagaaagatgaatcttgggtcaggctcagtggctcatgcctgtaatcccagaactttgggaggccgaggtagaaggatcacttgagctcaaaagttcaagacgagcctgggcaacatggcaaatccccgtctctaccaaaaatacaaaaattaacaggacatggtggtgtgcatttgtggtcccagctactcaggaggctgaggcaggagaatcacttgagcctgggaggcaggggctacagtaagctgagactgcaccattgcacaccagcctgggtgacagagcaagactccgtctcaaaaaacaaaacaaaacaaaacaaaaacaaaaaacttgaaataaaagctaagaaagtcaagggtctaacttttttcccacgtactatttggattttgttttcgttttgtattttcttttttattgtgtataacatacatacataaaagtatgtaaagggtactgattttcttttttttttttttttttgagacagagtctcgctctgtcgctcaggctggagtgcagtggtgcaatctcggctcactgcaagctccgcctcccaggttcacgccattctcctgcctcagcctcccgagtagctgggactacaggcacccgccaccacgcctggctaatttttttttttttttagtagagacagggtttcaccgtgttagccaggatggtcttgatctcctgaccttgtgatccgcctgcctcagcctcccaaagtgctgggattacaggcgtgagccaccacgcccagccaaagggtactgatttccatgtccagttcttttttttttttttttttttggcggaatcttgctctgtcgcctaggctggactgcagtggtgtgatctcagctcactgcaacctctgccttctgggttcaagcgattctcctgcctcagcctcccaagcagctgggattacagacgtgcaccaccacgcacagctaatttttgtatttttagtagacatggagtttcaccatgctggccaggctggtcttgaactcctgacctcgtgatcctcccacctcggcctcccaaagtgctgggattacaggcatgagccgccacgtccggccaatttgtttttatatatgtatacacttgcataactagcacccagatcaatacataaatactgtgaatacatcacatactgtgatgttttctgaactactaaatgttttcaacttcattttctttttgccttcttaaaattaaagttggcctgcctctttggcaactcattaaagactattcaacaccagagttttgaaaacacagatgtgtatatcatggatttcatttcttccttcattaagtagacattgattcatttattcaacagatatttattaatttctgtgtaccaggcaaatccctggacactggaaatattaataaatcaataaatgaagatgacaaaaaacccgaccccacggagctggtgtcagggtcagggtgggggtgaggaaggacacaacaaacacatggagatgtgaagaatgcagtaagttagacagtgattagcactaaggagaacatttgtggaagggctggggaaggttgggagttgtagaggtcagggatggtctcattctggtgagcagagacctgaaagaggtgagggaggagccatatatttgagggaagagagaatagccagcaaaaagggcctggggtgggagtatgtcaggggtgtttaagaaatagtaaggagggggccgggcgcggtggctcacgcctgtaatcccagcactttgggaggccgaggctggcggatcacgaggtcaggagatcgagaccatcctggctaacacggtgaaaccccatctctacaaaaaatacaaaaaaatcagctgggcatggtggcaggcgcctgtagtcccagctactcgggagcctgaggcaggagaatggcttgaaccccaggaggcagagcttgcagtgagccgagatcacaccactgcactccagcctgggcgacagagccagactccatctcaaaaaaaaaaaaaggaaaaaaaaaagagagagaaacagtaaggaggtccttaataactctgcagcagagttattaaggacacaaatgccataggctgtgcgcgatggctcacgtctgcaatcccagcactttggggaagctgaggcaggaggattgcttgaggttaggagctcaagaccagcctggccaacatgagcgaaatcccatctctactaaaaatacaaaaactagccgggggtggtgacacacgcctgtaatcccagctactcgggtggctgaggcaagagaatcgcttgaacccaggaggtggaggttgcagtgagctatcgtgccaatgcactccagcctgggcaacagagcaagactccctctcaaaaaaaaaaaaggacacaagtatcaagaggtaaggtcagaaaggtcacagttctgaacagaggaaaatgacttgttttaaagaggttacaagatctttctgcagagggagaagcagggagaatagctcttctccgaccacacactagggtctccacgggcttggctttgggcagctgctaggagcaaagtctggtctgaaatgatgacacacgctctgccctccgagagcctcccagtctagggggtttgaaggaaactccaaagggtcagtcggggatgcagaagaggtgaggaagtctaagctgcgctctctttgcctctcccaccagccctgccctggctcaacgtgtcagcagatggtgacaacgtgcatctggttctgaatgtctctgaggagcagcacttcggcctctccctgtactggaatcaggtccagggccccccaaaaccccggtggcacaaaaacctggtgaggcctcccccttcccaagtccattcccactgtaggccgatgcctgtgcaaaggacgcagtgccatatcagagaggatccttgaagaggactcaccccaagcaagggaaaattggtgggggaacttctgccttcctggtttccttgactttggcctcctcctcttcctccttatcttctccaacctccttcctttatttgttccacagactggaccgcagatcattaccttgaaccacacagacctggttccctgcctctgtattcaggtaggagcagagtctagctgggtgccagaagaggagtgggaagatgatgatgggggtgatccctgccttcctggtctcaccattcttcaaacccttcattgaggtggagactgtggctccctggggtggctggccctcccttgacccttgctgtcctatgccttctgtctattacattccctgaatgctctccctgatcctccacagaactcctgcttattcttcatggccccattcaaatgtcaccttctccttgaaacctttccctactcctccagttctgtctttgtgttcccctggcgggcagagcatgtgctacgaacttggactggtttgaatcttggctcttgccatttgctagctgtgtaaccttgggcaagtcacttcacctctgtgagcctgtttctcatctgtaaaatgggaataataatagtaacagcctcatggggctgttataagaatgtgtgccacacccaggcttaaatatgctggctctttcctcttcctctgtacatttatttatttttttagacaaggtctcactctgttgcccaggctggagtgcagtggcacaatcatggcacactgcagcctcagccccatgggctcaagtgatcctcctgtctcagcctcccaagtagctggaactactggtgagcactaccatactcagctagtttttttttgttttgtgtagagacggggtcttgctatgttacccaggctgttctgaattcctgggcttatgctatcctcccacctcagcctcccaccaagtgctgggattataagcatgagccactgtggcttgccctgattgcactttttttttttttttttttaagacagagtctttctctgtcgcccaggctggagcaccgtggcgtgatctcggctcactgcaagctgcttctcctgggttcacgccattctcctgcctcagcctcgctgagtagctgggactacaggtgcctgcaaccacgcccagctaattttttgtattttcagtaaagacagggtttcaccgtgttagccaggatggtctcgatctcctgaccttatgatccacaagcctcgtcctcccaaagtgctgggattacaggcatgacccactgtgcccagccgctgattgcacatttaattggtcatcaggtctcatccatcttacctctgacattaatgtctctcattttctttccccctcctctccatctcagtccagcttagggctctatcatctgttttctagactgtttcaacacctccaagctcccctcccttcccatcactttcctggcattctgggcccatattctgcccccaacggtgccttttcactctattttccccatgattccccttcatgagaacattgttacatccagtggagctacttaccaagatacagctagctccctgccttttctcaggtggttcccattacctcaaatgccctcacctccttcccaaagcttttccccaaccacccggcctctcctagctccaaatccccttgcacttctatctttccttgtccatttatcacttcatttcttttattttcttaaattttttttttttttttagagacagcattttgctctgtcacccatggtagagtgcagtggcatgaacacgtctcattgcagccccaagctcccaggttcaagggatcctcctgcctcagcctctgcagctgggactgcaggcatgcgccaccatgcctggctaattgtttccttttttttttttttttttttttaatggagtttcactcttttgcccaggatggagtgcagtggcgtgatctcggctcactgcaacttccgcctcccaggttcaagccattctcctgcctcagcctcccaagtagctgagattacaggcacacaccaccatgcccagctaatttttgtatttttagtagagacagggtttcaccatgttggtcaggctggtcccaaattcctgacctcgtgatccacccgcctcggccgcccaaagtgctgggattacaggcgtgagccactgtgcccagcctgttttcattttttaatgttttgtggcgatgggccaccacacccagctcaatcacttactttcttatttgggcatctaatttcttcttgtacacaacagatgctcaataaatattatgaaatgaatgagtgttttactaatttatataaatattttatccttactacaagtgtgagtttgtgatttccttgaaggcaagcaaatcatatctaattcaaatgtaatagctttgcaagagccttgcacatagcgcctacttgttttttgtttttttgtgtttttgttttttttttgtttttttgtcttttttgagacagagtctcgctctattggcaggctggagtacagtggcgtgatctcggctcactgcaatctctgcctcctggattcaagcaattcttctgcctcagcctcccaagtagctgggactacaagtgcatgccaccatgcccggctaatttttgtattttcagtagagacggggtttcagcatgttggccagatggtctcgatctcttgacctcgtgatccgcccaccttggcctcccaaagtgctgggattacaggggtgagccaccgcgcccagccttgttttgtttttaaacaaggtaacagtatgaggtcctcactgttgaatgagtgaataaatgttactgcctaacacagccataggacacagcagatgttcatgagatgtatgctgtgatttaaatggcttcattgccaaacacagtgcctgccacatagtcggtgttcctaactaaaggcttgatggataaattaatgtattacctctagtgcttagcatagagctatgcacataataggcactcttgaaatgtctgttgaaagaataaatgaatgtgtccttagaacttagcacattccccaacacatagcaggtgcttacacaagtgattgtggaatgaattaaaattaattatccaccaggcacagtggctcacacctgtaatcccagcactttgggaggccaaggtgggtggatcacgaggtcaggagtttgagaccagcctggcctaacatagtgaaacccagtctctactaaaagtacaaaaattagccaggcatggtgatgtgcgcctgtagtccctgctacttgggaagctgaggcaggagaatcacttgaacccaggaggcggaggttgtggtgagctgagatcacaccactgcactccagcctgggcaacagagtgagattccatctcaaaaaataaaaaaataataaaaatttaattatccaaggtctcttgtgcttgccatactgctaagacacaatggtaggcactcattaaaagtctgttgaatgggccaggcgcggtggctcacgcttgtaatcccaacactttgggaggctgagacgggtggatcacttgaggtcaggagttcgagaccagcctgatcaatgtggtgaaaccccatctctactaaaaatacaaaaattaaccagttagccggccgttgtggcatgttcctgtaatcgcagctcctcaggagactgagatgggagaatcgcttgaacctgggaggtggaggttgtagtgagccaagattgcaccactgcactccagcctgggcgacagagcgagactctatctcaaaaaaaaaaaaaagtttgttaatgaagatgttgccagtgcccagcattatgtttgctggaagaatagatgtgagcacctccaggttttgtaaaaggcaggaagacccagcaagtgtttgtgaaatacctgctgaatgagtgcatccccactgtccagcagagggccaggcacatgcccatggaggggacctgagcagacccccatttcctttccaggtgtggcctctggaacctgactccgttaggacgaacatctgccccttcagggagggtgagccgaccggcctggggctggggttggggtgttgcgagcgatgggtacctggcctgcggtgactgtgccctttccttgcagacccccgcgcacaccagaacctctggcaagccgcccgactgcaactgctgaccctgcagagctggctgctggacgcaccgtgctcgctgcccgcagaagcggcactgtgctggcgggctccgggtggggacccctgccagccactggtcccaccgctttcctgggagaacgtcactgtggacgtaagtgaagcagagggcacctcccgtggtgaggggagagtggggaaccgggggtccccttttgtgatcccacccattcctctctttccacagaaggttctcgagttcccattgctgaaaggccaccctaacctctgtgttcag

SEQ ID NO: 12557 - DNA, 1208 bp, Homo sapiens
aaaacgaaagcactccgtgctggaagtaggaggagagtcaggactcccaggacagagagtgcacaaactacccagcacagccccctccgccccctctggaggctgaagagggattccagcccctgccacccacagacacgggctgactggggtgtctgccccccttgggggggggcagcacagggcctcaggcctgggtgccacctggcacctagaagatgcctgtgccctggttcttgctgtccttggcactgggccgaagcccagtggtcctttctctggagaggcttgtggggcctcaggacgctacccactgctctccgggcctctcctgccgcctctgggacagtgacatactctgcctgcctggggacatcgtgcctgctccgggccccgtgctggcgcctacgcacctgcagacagagctggtgctgaggtgccagaaggagaccgactgtgacctctgtctgcgtgtggctgtccacttggccgtgcatgcctctctccaggcccaagtcgtgctctccttccaggcctaccctactgcccgctgcgtcctgctggaggtgcaagtgcctgctgcccttgtgcagtttggtcagtctgtgggctctgtggtatatgactgcttcgaggctgccctagggagtgaggtacgaatctggtcctatactcagcccaggtacgagaaggaactcaaccacacacagcagctgcctgccctgccctggctcaacgtgtcagcagatggtgacaacgtgcatctggttctgaatgtctctgaggagcagcacttcggcctctccctgtactggaatcaggtccagggccccccaaaaccccggtggcacaaaaacctgactggaccgcagatcattaccttgaaccacacagacctggttccctgcctctgtattcaggtgtggcctctggaacctgactccgttaggacgaacatctgccccttcagggaggacccccgcgcacaccagaacctctggcaagccgcccgactgcaactgctgaccctgcagagctggctgctggacgcaccgtgctcgctgcccgcagaagcggcactgtgctggcgggctccgggtggggacccctgccagccactggtcccaccgctttcctgggagaacgtcactgtggacaaggttctcgagttcccattgctgaaaggccaccctaacctctgtgttcag

SEQ ID NO: 12558 - DNA, 3446 bp, Homo sapiens
agtgcacaaactacccagcacagccccctccgccccctctggaggctgaagagggattccagcccctgccacccacagacacgggctgactggggtgtctgccccccttgggggggggcagcacagggcctcaggcctgggtgccacctggcacctagaagatgcctgtgccctggttcttgctgtccttggcactgggccgaagcccagtggtcctttctctggagaggcttgtggggcctcaggacgctacccactgctctccggtgagtctggaaccctggggagacgaggaaaggctcagggttcagtttttggctcagcaaagccttagcctggctcctgtcactgctgccactgccagaactgccctgtctggtctgtctggtgctgatggtagaagagaagaacggggaaggggcaagagctgggtctgtctttctctgggagggtctgggaatacggagccccagaaaaaggtaggtggaggtcttaggcagagaacagtgcctagatggtgggggcacaaattctgactctcctttctttccttcccagggcctctcctgccgcctctggggtaagtatccctacttttaaaaagaatttcccaggttggccgaagggagcagagctgtcccaggcccatgccctccatgcccacctcagcctaggacagccaagttctttggctctctgggtatgtcaggtgccaccaaattctgggcttggaacagcttcagctcccacccgctcctccacacacagacagtgacatactctgcctgcctggggacatcgtgcctgctccgggccccgtgctggcgcctacgcacctgcagacagagctggtgctgaggtgccagaaggagaccgactgtgacctctgtctgcgtgtggctgtccacttggccgtgcatggtgagcaagtcatcctgtgacagtgcatgtgtacacgtgagtgtgtctggggtgggcatgagggccaggggatctctcaagcagtgctaggcatcctcagtgttctcctggaggacaccagcagaaggacccccaggccagtgtggtctccccagcccctgcttcccagcactgggctttccagaaggaagccaacgccaaagccagccagcccagagcagggggcctcacccagggccttgctcttgggtccttctagggcactgggaagagcctgaagatgaggaaaagtttggaggagcagctgactcaggggtggaggagcctaggaatggtgaggagaacctggctggcccaactgccccatgccaaggcctggcctgccgctcctgggcctgactgacccctgccctgttgcccacagcctctctccaggcccaagtcgtgctctccttccaggcctaccctactgcccgctgcgtcctgctggaggtgcaagtgcctgctgcccttgtgcagtttggtcagtctgtggtatgcaaaataataataatcaccttctaaacctaaaatctataaaactttttcacatgcattatctctttgaggattacaaaagaattaaatttattgaaacccttcagtaccaggcattacagccagtgttttacaggtatcaacttatttaattctcacaacagccatgtgaggtgggactattcttttgattctgatcagcgctgtgggcaagtcccttcagcctgttatgcctcagcttttatgtctgtaaaatggggatgagaatagttctacttcatatgcttgactgcgagaaatcaccaagcgtttttcagggtgcttctactattttcccctcctaccagcagtgtatgggagtcctagttgcttcccatctttgccaacacttgatggtgtaattttattttatttttaaattaaatatatttgaattttaaatatatgggaccctccatgaatttgcatgtcatcctcaggcacgggccttgctaatcttttctgtattgttccagttgtagtatatgtggtgccaaaacaagcataagtgttgtaattgtcataatttttctgcatatgtagtggtttgccattgtggttttaatttgtatcttccaatgactgatgaagttgagcacttttttcacatgcttattggctatttgtgtaacttccttgtgaaatatctcttaaagtttttttgtttttgtttttgtttttgtttttgccacataaaaaaacaatagttctggccgggcacagtggttcacacctgtaatcccagcactttgggaggctgaggcgggcagatcacgaagtcaggagattgagaccatcctggctaacactgtgaaaccctgcctccactaaaaaaatacaaaaaattagccaggcatggtggtgggcgcctgtagacccagctactcgggaggcagaggcaggagaatggcgtgaacccgggaggtggagcttgcagtgagccgagatcgcgccactgcactccagcctgggcgacagagcgagattccgtctcaaaaaaaaagaatagtcccacctcacatgactgttgtgagaattaaattaagttggtacctgtaaaacactggatgtaatgcctggcactgaataatttcaataaatttaattcttttgtaatcctcaaaactacctgatgaggcattattagtatcctcattttccagatagataaaatgaggcttggagaggggaggtctgtgggctggatgcacttctctgtactcttggaccaaagaaagagtcctaccatacataccatggtatacttaccatggtgtaagtaccatggtgcagggtgttggggcttctccctgccttaggaggccacatgtacctggaaggtctatttccactggggtcaaatcactcaaaccctttgactttccctccaacctccagcccccagccaatatcctatctggagaattgtagactgggagaacatctgcttggtccatgtcacaagcagttgtaaggaacactgaggcactgggttgagtgtgagaaccacttctgtggggaggggtgtgccatattgtgttggggtgtctcatctccttagctttggccaggtgatctagcacagcagggtgggtgcagggatttaaatgtctagggccttttcccgccctggtgacactcttactgaggacatttgctttagaattgaggccccttgaaagaaaggtgaatagtagatttcaggctatacagtataaatacagtcattagttgggggaggagggcagtgagcagagtggtccctgcagatgatcccacagcccttggcctggattctgagccctgcaccgccagccttcctcacccctctcctcacagggctctgtggtatatgactgcttcgaggctgccctagggagtgaggtacgaatctggtcctatactcagcccaggtacgagaaggaactcaaccacacacagcagctgcc

SEQ ID NO: 12559 - DNA, 772 bp, Homo sapiens
agtgcacaaactacccagcacagccccctccgccccctctggaggctgaagagggattccagcccctgccacccacagacacgggctgactggggtgtctgccccccttgggggggggcagcacagggcctcaggcctgggtgccacctggcacctagaagatgcctgtgccctggttcttgctgtccttggcactgggccgaagcccagtggtcctttctctggagaggcttgtggggcctcaggacgctacccactgctctccgggcctctcctgccgcctctgggacagtgacatactctgcctgcctggggacatcgtgcctgctccgggccccgtgctggcgcctacgcacctgcagacagagctggtgctgaggtgccagaaggagaccgactgtgacctctgtctgcgtgtggctgtccacttggccgtgcatggtgagcaagtcatcctgtgacagtgcatgtgtacacggcactgggaagagcctgaagatgaggaaaagtttggaggagcagctgactcaggggtggaggagcctaggaatgcctctctccaggcccaagtcgtgctctccttccaggcctaccctactgcccgctgcgtcctgctggaggtgcaagtgcctgctgcccttgtgcagtttggtcagtctgtgggctctgtggtatatgactgcttcgaggctgccctagggagtgaggtacgaatctggtcctatactcagcccaggtacgagaaggaactcaaccacacacagcagctgcc

SEQ ID NO: 12560 - DNA, 6901 bp, Homo sapiens
ggcttgtggggcctcaggacgctacccactgctctccggtgagtctggaaccctggggagacgaggaaaggctcagggttcagtttttggctcagcaaagccttagcctggctcctgtcactgctgccactgccagaactgccctgtctggtctgtctggtgctgatggtagaagagaagaacggggaaggggcaagagctgggtctgtctttctctgggagggtctgggaatacggagccccagaaaaaggtaggtggaggtcttaggcagagaacagtgcctagatggtgggggcacaaattctgactctcctttctttccttcccagggcctctcctgccgcctctggggtaagtatccctacttttaaaaagaatttcccaggttggccgaagggagcagagctgtcccaggcccatgccctccatgcccacctcagcctaggacagccaagttctttggctctctgggtatgtcaggtgccaccaaattctgggcttggaacagcttcagctcccacccgctcctccacacacagacagtgacatactctgcctgcctggggacatcgtgcctgctccgggccccgtgctggcgcctacgcacctgcagacagagctggtgctgaggtgccagaaggagaccgactgtgacctctgtctgcgtgtggctgtccacttggccgtgcatggtgagcaagtcatcctgtgacagtgcatgtgtacacgtgagtgtgtctggggtgggcatgagggccaggggatctctcaagcagtgctaggcatcctcagtgttctcctggaggacaccagcagaaggacccccaggccagtgtggtctccccagcccctgcttcccagcactgggctttccagaaggaagccaacgccaaagccagccagcccagagcagggggcctcacccagggccttgctcttgggtccttctagggcactgggaagagcctgaagatgaggaaaagtttggaggagcagctgactcaggggtggaggagcctaggaatggtgaggagaacctggctggcccaactgccccatgccaaggcctggcctgccgctcctgggcctgactgacccctgccctgttgcccacagcctctctccaggcccaagtcgtgctctccttccaggcctaccctactgcccgctgcgtcctgctggaggtgcaagtgcctgctgcccttgtgcagtttggtcagtctgtggtatgcaaaataataataatcaccttctaaacctaaaatctataaaactttttcacatgcattatctctttgaggattacaaaagaattaaatttattgaaacccttcagtaccaggcattacagccagtgttttacaggtatcaacttatttaattctcacaacagccatgtgaggtgggactattcttttgattctgatcagcgctgtgggcaagtcccttcagcctgttatgcctcagcttttatgtctgtaaaatggggatgagaatagttctacttcatatgcttgactgcgagaaatcaccaagcgtttttcagggtgcttctactattttcccctcctaccagcagtgtatgggagtcctagttgcttcccatctttgccaacacttgatggtgtaattttattttatttttaaattaaatatatttgaattttaaatatatgggaccctccatgaatttgcatgtcatcctcaggcacgggccttgctaatcttttctgtattgttccagttgtagtatatgtggtgccaaaacaagcataagtgttgtaattgtcataatttttctgcatatgtagtggtttgccattgtggttttaatttgtatcttccaatgactgatgaagttgagcacttttttcacatgcttattggctatttgtgtaacttccttgtgaaatatctcttaaagtttttttgtttttgtttttgtttttgtttttgccacataaaaaaacaatagttctggccgggcacagtggttcacacctgtaatcccagcactttgggaggctgaggcgggcagatcacgaagtcaggagattgagaccatcctggctaacactgtgaaaccctgcctccactaaaaaaatacaaaaaattagccaggcatggtggtgggcgcctgtagacccagctactcgggaggcagaggcaggagaatggcgtgaacccgggaggtggagcttgcagtgagccgagatcgcgccactgcactccagcctgggcgacagagcgagattccgtctcaaaaaaaaagaatagtcccacctcacatgactgttgtgagaattaaattaagttggtacctgtaaaacactggatgtaatgcctggcactgaataatttcaataaatttaattcttttgtaatcctcaaaactacctgatgaggcattattagtatcctcattttccagatagataaaatgaggcttggagaggggaggtctgtgggctggatgcacttctctgtactcttggaccaaagaaagagtcctaccatacataccatggtatacttaccatggtgtaagtaccatggtgcagggtgttggggcttctccctgccttaggaggccacatgtacctggaaggtctatttccactggggtcaaatcactcaaaccctttgactttccctccaacctccagcccccagccaatatcctatctggagaattgtagactgggagaacatctgcttggtccatgtcacaagcagttgtaaggaacactgaggcactgggttgagtgtgagaaccacttctgtggggaggggtgtgccatattgtgttggggtgtctcatctccttagctttggccaggtgatctagcacagcagggtgggtgcagggatttaaatgtctagggccttttcccgccctggtgacactcttactgaggacatttgctttagaattgaggccccttgaaagaaaggtgaatagtagatttcaggctatacagtataaatacagtcattagttgggggaggagggcagtgagcagagtggtccctgcagatgatcccacagcccttggcctggattctgagccctgcaccgccagccttcctcacccctctcctcacagggctctgtggtatatgactgcttcgaggctgccctagggagtgaggtacgaatctggtcctatactcagcccaggtacgagaaggaactcaaccacacacagcagctgcctggtaagtggacccccaagtcctggccccctagcctctgtcccctctggccattccccctcctgatttcaccctcttctagctccatccactctccggcaggggtctgagctgctatcctccccagagtcagtccctcggaccttctctctctgggtgatatggctttccagcccctggggaaggttctttgagcattggatagatgtgggtggtatgtaggggatggggagccattcctaatgcccccctgggagccaaattgcccccacttctttccttggcccccagccccactggaggctcttctgtgatctctcctcagactgcagggggctcgaagtctggaacagcatcccgagctgctggggtaggggctagggccagtgggccgggggtagggaggggcagggtctggagtataagaaacccttggagtccacttcagatatgggctaccacatctcagaagctcacagaacatattcattcattcattcattcattcatttgttcataacacattaattgcagtatctgtgctaagcactggaaatagaaagatgaatcttgggtcaggctcagtggctcatgcctgtaatcccagaactttgggaggccgaggtagaaggatcacttgagctcaaaagttcaagacgagcctgggcaacatggcaaatccccgtctctaccaaaaatacaaaaattaacaggacatggtggtgtgcatttgtggtcccagctactcaggaggctgaggcaggagaatcacttgagcctgggaggcaggggctacagtaagctgagactgcaccattgcacaccagcctgggtgacagagcaagactccgtctcaaaaaacaaaacaaaacaaaacaaaaacaaaaaacttgaaataaaagctaagaaagtcaagggtctaacttttttcccacgtactatttggattttgttttcgttttgtattttcttttttattgtgtataacatacatacataaaagtatgtaaagggtactgattttcttttttttttttttttttgagacagagtctcgctctgtcgctcaggctggagtgcagtggtgcaatctcggctcactgcaagctccgcctcccaggttcacgccattctcctgcctcagcctcccgagtagctgggactacaggcacccgccaccacgcctggctaatttttttttttttttagtagagacagggtttcaccgtgttagccaggatggtcttgatctcctgaccttgtgatccgcctgcctcagcctcccaaagtgctgggattacaggcgtgagccaccacgcccagccaaagggtactgatttccatgtccagttcttttttttttttttttttttggcggaatcttgctctgtcgcctaggctggactgcagtggtgtgatctcagctcactgcaacctctgccttctgggttcaagcgattctcctgcctcagcctcccaagcagctgggattacagacgtgcaccaccacgcacagctaatttttgtatttttagtagacatggagtttcaccatgctggccaggctggtcttgaactcctgacctcgtgatcctcccacctcggcctcccaaagtgctgggattacaggcatgagccgccacgtccggccaatttgtttttatatatgtatacacttgcataactagcacccagatcaatacataaatactgtgaatacatcacatactgtgatgttttctgaactactaaatgttttcaacttcattttctttttgccttcttaaaattaaagttggcctgcctctttggcaactcattaaagactattcaacaccagagttttgaaaacacagatgtgtatatcatggatttcatttcttccttcattaagtagacattgattcatttattcaacagatatttattaatttctgtgtaccaggcaaatccctggacactggaaatattaataaatcaataaatgaagatgacaaaaaacccgaccccacggagctggtgtcagggtcagggtgggggtgaggaaggacacaacaaacacatggagatgtgaagaatgcagtaagttagacagtgattagcactaaggagaacatttgtggaagggctggggaaggttgggagttgtagaggtcagggatggtctcattctggtgagcagagacctgaaagaggtgagggaggagccatatatttgagggaagagagaatagccagcaaaaagggcctggggtgggagtatgtcaggggtgtttaagaaatagtaaggagggggccgggcgcggtggctcacgcctgtaatcccagcactttgggaggccgaggctggcggatcacgaggtcaggagatcgagaccatcctggctaacacggtgaaaccccatctctacaaaaaatacaaaaaaatcagctgggcatggtggcaggcgcctgtagtcccagctactcgggagcctgaggcaggagaatggcttgaaccccaggaggcagagcttgcagtgagccgagatcacaccactgcactccagcctgggcgacagagccagactccatctcaaaaaaaaaaaaaggaaaaaaaaaagagagagaaacagtaaggaggtccttaataactctgcagcagagttattaaggacacaaatgccataggctgtgcgcgatggctcacgtctgcaatcccagcactttggggaagctgaggcaggaggattgcttgaggttaggagctcaagaccagcctggccaacatgagcgaaatcccatctctactaaaaatacaaaaactagccgggggtggtgacacacgcctgtaatcccagctactcgggtggctgaggcaagagaatcgcttgaacccaggaggtggaggttgcagtgagctatcgtgccaatgcactccagcctgggcaacagagcaagactccctctcaaaaaaaaaaaaggacacaagtatcaagaggtaaggtcagaaaggtcacagttctgaacagaggaaaatgacttgttttaaagaggttacaagatctttctgcagagggagaagcagggagaatagctcttctccgaccacacactagggtctccacgggcttggctttgggcagctgctaggagcaaagtctggtctgaaatgatgacacacgctctgccctccgagagcctcccagtctagggggtttgaaggaaactccaaagggtcagtcggggatgcagaagaggtgaggaagtctaagctgcgctctctttgcctctcccaccagccctgccctggctcaacgtgtcagcagatggtgacaacgtgcatctggttctgaatgtctctgaggagcagcacttcggcctctccctgtactggaatcaggtccagggccccccaaaaccccggtggcacaaaaacctggtgaggcctcccccttcccaagtccattcccactgtaggccgatgcctgtgcaaaggacgcagtgccatatcagagaggatccttgaagaggactcaccccaagcaagggaaaattggtgggggaacttctgccttcctggtttccttgactttggcctcctcctcttcctccttatcttctccaacctccttcctttatttgttccacagactggaccgcagatcattaccttgaaccacacagacctggttccctgcctct

SEQ ID NO: 12561 - DNA, 633 bp, Homo sapiens
ggcttgtggggcctcaggacgctacccactgctctccgggcctctcctgccgcctctgggacagtgacatactctgcctgcctggggacatcgtgcctgctccgggccccgtgctggcgcctacgcacctgcagacagagctggtgctgaggtgccagaaggagaccgactgtgacctctgtctgcgtgtggctgtccacttggccgtgcatgggcactgggaagagcctgaagatgaggaaaagtttggaggagcagctgactcaggggtggaggagcctaggaatgcctctctccaggcccaagtcgtgctctccttccaggcctaccctactgcccgctgcgtcctgctggaggtgcaagtgcctgctgcccttgtgcagtttggtcagtctgtgcccaggtacgagaaggaactcaaccacacacagcagctgcctgccctgccctggctcaacgtgtcagcagatggtgacaacgtgcatctggttctgaatgtctctgaggagcagcacttcggcctctccctgtactggaatcaggtccagggccccccaaaaccccggtggcacaaaaacctgactggaccgcagatcattaccttgaaccacacagacctggttccctgcctct

SEQ ID NO: 12562 - DNA, 16523 bp, Homo sapiens; identical to SEQ ID NO: 12538

SEQ ID NO: 12563 - DNA, 2163 bp, Homo sapiens
aaaacgaaagcactccgtgctggaagtaggaggagagtcaggactcccaggacagagagtgcacaaactacccagcacagccccctccgccccctctggaggctgaagagggattccagcccctgccacccacagacacgggctgactggggtgtctgccccccttgggggggggcagcacagggcctcaggcctgggtgccacctggcacctagaagatgcctgtgccctggttcttgctgtccttggcactgggccgaagcccagtggtcctttctctggagaggcttgtggggcctcaggacgctacccactgctctccgggcctctcctgccgcctctgggacagtgacatactctgcctgcctggggacatcgtgcctgctccgggccccgtgctggcgcctacgcacctgcagacagagctggtgctgaggtgccagaaggagaccgactgtgacctctgtctgcgtgtggctgtccacttggccgtgcatggcctaccctactgcccgctgcgtcctgctggaggtgcaagtgcctgctgcccttgtgcagtttggtcagtctgtgggctctgtggtatatgactgcttcgaggctgccctagggagtgaggtacgaatctggtcctatactcagcccaggtacgagaaggaactcaaccacacacagcagctgcctgccctgccctggctcaacgtgtcagcagatggtgacaacgtgcatctggttctgaatgtctctgaggagcagcacttcggcctctccctgtactggaatcaggtccagggccccccaaaaccccggtggcacaaaaacctgactggaccgcagatcattaccttgaaccacacagacctggttccctgcctctgtattcaggtgtggcctctggaacctgactccgttaggacgaacatctgccccttcagggaggacccccgcgcacaccagaacctctggcaagccgcccgactgcaactgctgaccctgcagagctggctgctggacgcaccgtgctcgctgcccgcagaagcggcactgtgctggcgggctccgggtggggacccctgccagccactggtcccaccgctttcctgggagaacgtcactgtggacgtgaacagctcggagaagctgcagctgcaggagtgcttgtgggctgactccctggggcctctcaaagacgatgtgctactgttggagacacgaggcccccaggacaacagatccctctgtgccttggaacccagtggctgtacttcactacccagcaaagcctccacgagggcagctcgccttggagagtacttactacaagacctgcagtcaggccagtgtctgcagctatgggacgatgacttgggagcgctatgggcctgccccatggacaaatacatccacaagcgctgggccctcgtgtggctggcctgcctactctttgccgctgcgctttccctcatcctccttctcaaaaaggatcacgcgaaagcggccgccaggggccgcgcggctctgctcctctactcagccgatgactcgggtttcgagcgcctggtgggcgccctggcgtcggccctgtgccagctgccgctgcgcgtggccgtagacctgtggagccgtcgtgaactgagcgcgcaggggcccgtggcttggtttcacgcgcagcggcgccagaccctgcaggagggcggcgtggtggtcttgctcttctctcccggtgcggtggcgctgtgcagcgagtggctacaggatggggtgtccgggcccggggcgcacggcccgcacgacgccttccgcgcctcgctcagctgcgtgctgcccgacttcttgcagggccgggcgcccggcagctacgtgggggcctgcttcgacaggctgctccacccggacgccgtacccgcccttttccgcaccgtgcccgtcttcacactgccctcccaactgccagacttcctgggggccctgcagcagcctcgcgccccgcgttccgggcggctccaagagagagcggagcaagtgtcccgggcccttcagccagccctggatagctacttccatcccccggggactcccgcgccgggacgcggggtgggaccaggcgcgggacctggggcgggggacgggacttaaataaaggcagacgctgtttttctaccc

SEQ ID NO: 12564 - DNA, 16493 bp, Homo sapiens
aggaggagagtcaggactcccaggacagagagtgcacaaactacccagcacagccccctccgccccctctggaggctgaagagggattccagcccctgccacccacagacacgggctgactggggtgtctgccccccttgggggggggcagcacagggcctcaggcctgggtgccacctggcacctagaagatgcctgtgccctggttcttgctgtccttggcactgggccgaagcccagtggtcctttctctggagaggcttgtggggcctcaggacgctacccactgctctccggtgagtctggaaccctggggagacgaggaaaggctcagggttcagtttttggctcagcaaagccttagcctggctcctgtcactgctgccactgccagaactgccctgtctggtctgtctggtgctgatggtagaagagaagaacggggaaggggcaagagctgggtctgtctttctctgggagggtctgggaatacggagccccagaaaaaggtaggtggaggtcttaggcagagaacagtgcctagatggtgggggcacaaattctgactctcctttctttccttcccagggcctctcctgccgcctctggggtaagtatccctacttttaaaaagaatttcccaggttggccgaagggagcagagctgtcccaggcccatgccctccatgcccacctcagcctaggacagccaagttctttggctctctgggtatgtcaggtgccaccaaattctgggcttggaacagcttcagctcccacccgctcctccacacacagacagtgacatactctgcctgcctggggacatcgtgcctgctccgggccccgtgctggcgcctacgcacctgcagacagagctggtgctgaggtgccagaaggagaccgactgtgacctctgtctgcgtgtggctgtccacttggccgtgcatggtgagcaagtcatcctgtgacagtgcatgtgtacacgtgagtgtgtctggggtgggcatgagggccaggggatctctcaagcagtgctaggcatcctcagtgttctcctggaggacaccagcagaaggacccccaggccagtgtggtctccccagcccctgcttcccagcactgggctttccagaaggaagccaacgccaaagccagccagcccagagcagggggcctcacccagggccttgctcttgggtccttctagggcactgggaagagcctgaagatgaggaaaagtttggaggagcagctgactcaggggtggaggagcctaggaatggtgaggagaacctggctggcccaactgccccatgccaaggcctggcctgccgctcctgggcctgactgacccctgccctgttgcccacagcctctctccaggcccaagtcgtgctctccttccaggcctaccctactgcccgctgcgtcctgctggaggtgcaagtgcctgctgcccttgtgcagtttggtcagtctgtggtatgcaaaataataataatcaccttctaaacctaaaatctataaaactttttcacatgcattatctctttgaggattacaaaagaattaaatttattgaaacccttcagtaccaggcattacagccagtgttttacaggtatcaacttatttaattctcacaacagccatgtgaggtgggactattcttttgattctgatcagcgctgtgggcaagtcccttcagcctgttatgcctcagcttttatgtctgtaaaatggggatgagaatagttctacttcatatgcttgactgcgagaaatcaccaagcgtttttcagggtgcttctactattttcccctcctaccagcagtgtatgggagtcctagttgcttcccatctttgccaacacttgatggtgtaattttattttatttttaaattaaatatatttgaattttaaatatatgggaccctccatgaatttgcatgtcatcctcaggcacgggccttgctaatcttttctgtattgttccagttgtagtatatgtggtgccaaaacaagcataagtgttgtaattgtcataatttttctgcatatgtagtggtttgccattgtggttttaatttgtatcttccaatgactgatgaagttgagcacttttttcacatgcttattggctatttgtgtaacttccttgtgaaatatctcttaaagtttttttgtttttgtttttgtttttgtttttgccacataaaaaaacaatagttctggccgggcacagtggttcacacctgtaatcccagcactttgggaggctgaggcgggcagatcacgaagtcaggagattgagaccatcctggctaacactgtgaaaccctgcctccactaaaaaaatacaaaaaattagccaggcatggtggtgggcgcctgtagacccagctactcgggaggcagaggcaggagaatggcgtgaacccgggaggtggagcttgcagtgagccgagatcgcgccactgcactccagcctgggcgacagagcgagattccgtctcaaaaaaaaagaatagtcccacctcacatgactgttgtgagaattaaattaagttggtacctgtaaaacactggatgtaatgcctggcactgaataatttcaataaatttaattcttttgtaatcctcaaaactacctgatgaggcattattagtatcctcattttccagatagataaaatgaggcttggagaggggaggtctgtgggctggatgcacttctctgtactcttggaccaaagaaagagtcctaccatacataccatggtatacttaccatggtgtaagtaccatggtgcagggtgttggggcttctccctgccttaggaggccacatgtacctggaaggtctatttccactggggtcaaatcactcaaaccctttgactttccctccaacctccagcccccagccaatatcctatctggagaattgtagactgggagaacatctgcttggtccatgtcacaagcagttgtaaggaacactgaggcactgggttgagtgtgagaaccacttctgtggggaggggtgtgccatattgtgttggggtgtctcatctccttagctttggccaggtgatctagcacagcagggtgggtgcagggatttaaatgtctagggccttttcccgccctggtgacactcttactgaggacatttgctttagaattgaggccccttgaaagaaaggtgaatagtagatttcaggctatacagtataaatacagtcattagttgggggaggagggcagtgagcagagtggtccctgcagatgatcccacagcccttggcctggattctgagccctgcaccgccagccttcctcacccctctcctcacagggctctgtggtatatgactgcttcgaggctgccctagggagtgaggtacgaatctggtcctatactcagcccaggtacgagaaggaactcaaccacacacagcagctgcctggtaagtggacccccaagtcctggccccctagcctctgtcccctctggccattccccctcctgatttcaccctcttctagctccatccactctccggcaggggtctgagctgctatcctccccagagtcagtccctcggaccttctctctctgggtgatatggctttccagcccctggggaaggttctttgagcattggatagatgtgggtggtatgtaggggatggggagccattcctaatgcccccctgggagccaaattgcccccacttctttccttggcccccagccccactggaggctcttctgtgatctctcctcagactgcagggggctcgaagtctggaacagcatcccgagctgctggggtaggggctagggccagtgggccgggggtagggaggggcagggtctggagtataagaaacccttggagtccacttcagatatgggctaccacatctcagaagctcacagaacatattcattcattcattcattcattcatttgttcataacacattaattgcagtatctgtgctaagcactggaaatagaaagatgaatcttgggtcaggctcagtggctcatgcctgtaatcccagaactttgggaggccgaggtagaaggatcacttgagctcaaaagttcaagacgagcctgggcaacatggcaaatccccgtctctaccaaaaatacaaaaattaacaggacatggtggtgtgcatttgtggtcccagctactcaggaggctgaggcaggagaatcacttgagcctgggaggcaggggctacagtaagctgagactgcaccattgcacaccagcctgggtgacagagcaagactccgtctcaaaaaacaaaacaaaacaaaacaaaaacaaaaaacttgaaataaaagctaagaaagtcaagggtctaacttttttcccacgtactatttggattttgttttcgttttgtattttcttttttattgtgtataacatacatacataaaagtatgtaaagggtactgattttcttttttttttttttttttgagacagagtctcgctctgtcgctcaggctggagtgcagtggtgcaatctcggctcactgcaagctccgcctcccaggttcacgccattctcctgcctcagcctcccgagtagctgggactacaggcacccgccaccacgcctggctaatttttttttttttttagtagagacagggtttcaccgtgttagccaggatggtcttgatctcctgaccttgtgatccgcctgcctcagcctcccaaagtgctgggattacaggcgtgagccaccacgcccagccaaagggtactgatttccatgtccagttcttttttttttttttttttttggcggaatcttgctctgtcgcctaggctggactgcagtggtgtgatctcagctcactgcaacctctgccttctgggttcaagcgattctcctgcctcagcctcccaagcagctgggattacagacgtgcaccaccacgcacagctaatttttgtatttttagtagacatggagtttcaccatgctggccaggctggtcttgaactcctgacctcgtgatcctcccacctcggcctcccaaagtgctgggattacaggcatgagccgccacgtccggccaatttgtttttatatatgtatacacttgcataactagcacccagatcaatacataaatactgtgaatacatcacatactgtgatgttttctgaactactaaatgttttcaacttcattttctttttgccttcttaaaattaaagttggcctgcctctttggcaactcattaaagactattcaacaccagagttttgaaaacacagatgtgtatatcatggatttcatttcttccttcattaagtagacattgattcatttattcaacagatatttattaatttctgtgtaccaggcaaatccctggacactggaaatattaataaatcaataaatgaagatgacaaaaaacccgaccccacggagctggtgtcagggtcagggtgggggtgaggaaggacacaacaaacacatggagatgtgaagaatgcagtaagttagacagtgattagcactaaggagaacatttgtggaagggctggggaaggttgggagttgtagaggtcagggatggtctcattctggtgagcagagacctgaaagaggtgagggaggagccatatatttgagggaagagagaatagccagcaaaaagggcctggggtgggagtatgtcaggggtgtttaagaaatagtaaggagggggccgggcgcggtggctcacgcctgtaatcccagcactttgggaggccgaggctggcggatcacgaggtcaggagatcgagaccatcctggctaacacggtgaaaccccatctctacaaaaaatacaaaaaaatcagctgggcatggtggcaggcgcctgtagtcccagctactcgggagcctgaggcaggagaatggcttgaaccccaggaggcagagcttgcagtgagccgagatcacaccactgcactccagcctgggcgacagagccagactccatctcaaaaaaaaaaaaaggaaaaaaaaaagagagagaaacagtaaggaggtccttaataactctgcagcagagttattaaggacacaaatgccataggctgtgcgcgatggctcacgtctgcaatcccagcactttggggaagctgaggcaggaggattgcttgaggttaggagctcaagaccagcctggccaacatgagcgaaatcccatctctactaaaaatacaaaaactagccgggggtggtgacacacgcctgtaatcccagctactcgggtggctgaggcaagagaatcgcttgaacccaggaggtggaggttgcagtgagctatcgtgccaatgcactccagcctgggcaacagagcaagactccctctcaaaaaaaaaaaaggacacaagtatcaagaggtaaggtcagaaaggtcacagttctgaacagaggaaaatgacttgttttaaagaggttacaagatctttctgcagagggagaagcagggagaatagctcttctccgaccacacactagggtctccacgggcttggctttgggcagctgctaggagcaaagtctggtctgaaatgatgacacacgctctgccctccgagagcctcccagtctagggggtttgaaggaaactccaaagggtcagtcggggatgcagaagaggtgaggaagtctaagctgcgctctctttgcctctcccaccagccctgccctggctcaacgtgtcagcagatggtgacaacgtgcatctggttctgaatgtctctgaggagcagcacttcggcctctccctgtactggaatcaggtccagggccccccaaaaccccggtggcacaaaaacctggtgaggcctcccccttcccaagtccattcccactgtaggccgatgcctgtgcaaaggacgcagtgccatatcagagaggatccttgaagaggactcaccccaagcaagggaaaattggtgggggaacttctgccttcctggtttccttgactttggcctcctcctcttcctccttatcttctccaacctccttcctttatttgttccacagactggaccgcagatcattaccttgaaccacacagacctggttccctgcctctgtattcaggtaggagcagagtctagctgggtgccagaagaggagtgggaagatgatgatgggggtgatccctgccttcctggtctcaccattcttcaaacccttcattgaggtggagactgtggctccctggggtggctggccctcccttgacccttgctgtcctatgccttctgtctattacattccctgaatgctctccctgatcctccacagaactcctgcttattcttcatggccccattcaaatgtcaccttctccttgaaacctttccctactcctccagttctgtctttgtgttcccctggcgggcagagcatgtgctacgaacttggactggtttgaatcttggctcttgccatttgctagctgtgtaaccttgggcaagtcacttcacctctgtgagcctgtttctcatctgtaaaatgggaataataatagtaacagcctcatggggctgttataagaatgtgtgccacacccaggcttaaatatgctggctctttcctcttcctctgtacatttatttatttttttagacaaggtctcactctgttgcccaggctggagtgcagtggcacaatcatggcacactgcagcctcagccccatgggctcaagtgatcctcctgtctcagcctcccaagtagctggaactactggtgagcactaccatactcagctagtttttttttgttttgtgtagagacggggtcttgctatgttacccaggctgttctgaattcctgggcttatgctatcctcccacctcagcctcccaccaagtgctgggattataagcatgagccactgtggcttgccctgattgcactttttttttttttttttttaagacagagtctttctctgtcgcccaggctggagcaccgtggcgtgatctcggctcactgcaagctgcttctcctgggttcacgccattctcctgcctcagcctcgctgagtagctgggactacaggtgcctgcaaccacgcccagctaattttttgtattttcagtaaagacagggtttcaccgtgttagccaggatggtctcgatctcctgaccttatgatccacaagcctcgtcctcccaaagtgctgggattacaggcatgacccactgtgcccagccgctgattgcacatttaattggtcatcaggtctcatccatcttacctctgacattaatgtctctcattttctttccccctcctctccatctcagtccagcttagggctctatcatctgttttctagactgtttcaacacctccaagctcccctcccttcccatcactttcctggcattctgggcccatattctgcccccaacggtgccttttcactctattttccccatgattccccttcatgagaacattgttacatccagtggagctacttaccaagatacagctagctccctgccttttctcaggtggttcccattacctcaaatgccctcacctccttcccaaagcttttccccaaccacccggcctctcctagctccaaatccccttgcacttctatctttccttgtccatttatcacttcatttcttttattttcttaaattttttttttttttttagagacagcattttgctctgtcacccatggtagagtgcagtggcatgaacacgtctcattgcagccccaagctcccaggttcaagggatcctcctgcctcagcctctgcagctgggactgcaggcatgcgccaccatgcctggctaattgtttccttttttttttttttttttttttaatggagtttcactcttttgcccaggatggagtgcagtggcgtgatctcggctcactgcaacttccgcctcccaggttcaagccattctcctgcctcagcctcccaagtagctgagattacaggcacacaccaccatgcccagctaatttttgtatttttagtagagacagggtttcaccatgttggtcaggctggtcccaaattcctgacctcgtgatccacccgcctcggccgcccaaagtgctgggattacaggcgtgagccactgtgcccagcctgttttcattttttaatgttttgtggcgatgggccaccacacccagctcaatcacttactttcttatttgggcatctaatttcttcttgtacacaacagatgctcaataaatattatgaaatgaatgagtgttttactaatttatataaatattttatccttactacaagtgtgagtttgtgatttccttgaaggcaagcaaatcatatctaattcaaatgtaatagctttgcaagagccttgcacatagcgcctacttgttttttgtttttttgtgtttttgttttttttttgtttttttgtcttttttgagacagagtctcgctctattggcaggctggagtacagtggcgtgatctcggctcactgcaatctctgcctcctggattcaagcaattcttctgcctcagcctcccaagtagctgggactacaagtgcatgccaccatgcccggctaatttttgtattttcagtagagacggggtttcagcatgttggccagatggtctcgatctcttgacctcgtgatccgcccaccttggcctcccaaagtgctgggattacaggggtgagccaccgcgcccagccttgttttgtttttaaacaaggtaacagtatgaggtcctcactgttgaatgagtgaataaatgttactgcctaacacagccataggacacagcagatgttcatgagatgtatgctgtgatttaaatggcttcattgccaaacacagtgcctgccacatagtcggtgttcctaactaaaggcttgatggataaattaatgtattacctctagtgcttagcatagagctatgcacataataggcactcttgaaatgtctgttgaaagaataaatgaatgtgtccttagaacttagcacattccccaacacatagcaggtgcttacacaagtgattgtggaatgaattaaaattaattatccaccaggcacagtggctcacacctgtaatcccagcactttgggaggccaaggtgggtggatcacgaggtcaggagtttgagaccagcctggcctaacatagtgaaacccagtctctactaaaagtacaaaaattagccaggcatggtgatgtgcgcctgtagtccctgctacttgggaagctgaggcaggagaatcacttgaacccaggaggcggaggttgtggtgagctgagatcacaccactgcactccagcctgggcaacagagtgagattccatctcaaaaaataaaaaaataataaaaatttaattatccaaggtctcttgtgcttgccatactgctaagacacaatggtaggcactcattaaaagtctgttgaatgggccaggcgcggtggctcacgcttgtaatcccaacactttgggaggctgagacgggtggatcacttgaggtcaggagttcgagaccagcctgatcaatgtggtgaaaccccatctctactaaaaatacaaaaattaaccagttagccggccgttgtggcatgttcctgtaatcgcagctcctcaggagactgagatgggagaatcgcttgaacctgggaggtggaggttgtagtgagccaagattgcaccactgcactccagcctgggcgacagagcgagactctatctcaaaaaaaaaaaaaagtttgttaatgaagatgttgccagtgcccagcattatgtttgctggaagaatagatgtgagcacctccaggttttgtaaaaggcaggaagacccagcaagtgtttgtgaaatacctgctgaatgagtgcatccccactgtccagcagagggccaggcacatgcccatggaggggacctgagcagacccccatttcctttccaggtgtggcctctggaacctgactccgttaggacgaacatctgccccttcagggagggtgagccgaccggcctggggctggggttggggtgttgcgagcgatgggtacctggcctgcggtgactgtgccctttccttgcagacccccgcgcacaccagaacctctggcaagccgcccgactgcaactgctgaccctgcagagctggctgctggacgcaccgtgctcgctgcccgcagaagcggcactgtgctggcgggctccgggtggggacccctgccagccactggtcccaccgctttcctgggagaacgtcactgtggacgtaagtgaagcagagggcacctcccgtggtgaggggagagtggggaaccgggggtccccttttgtgatcccacccattcctctctttccacagaaggttctcgagttcccattgctgaaaggccaccctaacctctgtgttcaggtcagaaaggggtgcatagtgctgggctggaggctggacctgggcagaccccccagccaagggggtcttagttcttgggccgctaaagcatagtggttgccagcttcctctatgggagttccactgcctactttagtagtgcgcgggaccctgggcaactcacttcacctctctgaacgtcagtttcctcatctgtttaatgcagatgataatacagtaactacctcatggagtggttgtgacaatgaaataagagaagtgcttccccttaggaatcggtacagactaaatgctccataaatgtagccacttttattattgctatccttattctatttccatacctgtagaatgggttgctctacagtttcaaagggtgattataagaacattcactcatccggccaggcgcggtggctcacgcctgtaatcccagcactttgggaggccgaggcgggcagatcacgaggtcaggacatcaagaccatcctggctaacatggtgaaaccccatctctactaaaaatacaaaaaattagccggtcgtggtggtgggcacctgtagtcccagctactaggaaggctggggcaggagaatggcgtgaacctgggaggctgagcttgcagtgagctgagagggcgccactgcactccagcctgggtgacagagtgagactgggcgacagagtgaaactccgtctcaaaaaaaaaaaaaattcactcattcaagattttttgagcagcacaagtcactgttttaggcacttgtgatagaccctaacatctctaccctcatagaacttatattgtaatggagaaaggcaggcaacagacattgtaaataaatcatatagtatcttaaaattgcatacaaataccatgggaaagggataaggtgggactggggttgcaatttttagcagggtggtcatgtgagaaaggaatctctttgagaaggttagatgagaggggaaccatgctccgtaagacataaaaacagctttagggtcagaagacgctttatacagatgatctcacaaggctggggcagagaaagatgtagtgattcctaatcacccagccttgaatccacatctgcctcaggtcagattgagtgcagattcccaacccaacaggccttctgttgcctgccccattctggtctttctgcctttggcttttgcttttcttagtggccctaaccatggtctcttcccagcaggtgaacagctcggagaagctgcagctgcaggagtgcttgtgggctggtgagttgggcctgggggcagctggggcagggccacctcctaggggtgaaggtcagggcatgggaggcaggcaagtggccaatcccagcaaggatgggtcttggtcagagtggcctctcaccccttccagactccctggggcctctcaaagacgatgtgctactgttggagacacgaggcccccaggacaacagatccctctgtgccttggaacccagtggctgtacttcactacccagcaaagcctccacggttaggactgggcgaccctcctccacagatctctccaaatgcatctcacatctggcctcaaattttcactccatccaccctgtgccggtctctgggaacatggggggtgactcagaccagggccatattcagcggcatcaccaaagtctcccagtcccctctacctcattctacccagctgtagcctggtaggtgctgccctaagggtgctacctccaggtaacagtgcccccatcctttggcttggcagagggcagctcgccttggagagtacttactacaagacctgcagtcaggccagtgtctgcaggtgagctggtggaagaagggccccacctcaatgcctaggggcaacaggcctaaaactagcactcacctactgtctatttaggcttattttatgttcagccctgggaaagttaagagtagaagaagcacagttcctatccccaaggagcacactgttggctagacacccataaacagataaccacacctacaggtgctaagttttgggttccagggagagcttccgggaagaatttcttcctataagccagatttggtatggaagaagtcataccctagtcagtgggcacagcacaaaggcagagcagctgcaggaaccttagccgggagatatgcatagttgatgctgggaatttggagatcaggccaccagagcttggtgaatattggaacacctggctggtgccctggatttggttctgtttgtatcttacagctatgggacgatgacttgggagcgctatgggcctgccccatggacaaatgtgagtattgtaagaactgcctttcctttctgtaccaggagtggggatcttgacagggaccactcttgggcacagcacatgcaatggccttgtccttccctgagatcagataaacagagggtcattccttcattcactcaaaaaatgatgagagcttgcagggatcgcaggaacaccaaaaatataaatccttgcccccgccccacccctagaagactagcaagacatgagccagtcacttacatttaaagtgggagctactgaagcaccaccaagtgttcagtgctgtaaatgcatacaatgtggacctgacctgggtggggtgaggggtgaggggctcagggggaaggttccagcaaaactctgaagactgagctaggggaagggggtagagatacagggtcttggacaggcaggtttctgtcatgagataaagatgcaggagacatgtaggggatttggatcttatgttgagagcagcaggagctacgatcaaatttttatatatttcacacacacacacacacatatatatatatatatatatatatatatatatacttatttttttatttatttttgaggcagagtctcactctgttgcccaggctggagtgcaatggcgcgatctcggctaactgcaacctctgcctcccgggttcaagcaattctctacctcagcctcccgggtagctgggattaataggcgcctgccaccatgccctgctaatttttgtatttttagtagagatggggtttcaccatcttggccaggctggtcttgaactcctgacctcgtgatccgcccgcgtcggcctcccaaagtgctgggattatagtcgtgagtcaccgcacctggcccaaatttatatttttaaaagatctctgaggctgtcatgaatcaattcaaggcaaatcaattggaggtaaaaaaaaaaaaaaaaagacagggcagggacaccaggtagttgcagacacccaggacagcaagatcaagggcccagcaaccctagcttaggggagaaaaacagctgacattttagcacttaagatgctcggcattgtgttaagtatgtattaacacattgtgttaagctttatatgtattaatatatttagtcctcacaccaaccctatgacacaggtacaactttacagaggagaaaactgaggcagagggtgacattacttattcaaagacccctaaacagatggagctatattcatccactggctctgacactgtgctgtggactctgggcaaatcatttcttcgttttttgttttgttttgttttgttttgagaggagtctcaccctgtcgcccaggctggagtgcaatggcgcgatctcggctcactgcaacctctgcctcccgagttcaagcgattctcttgcctcagcctcccgagtagctgggattacaggcgtgtgccaccacgcccggctaattttttgtatttttagtagagacggggtttcaccgtgttagccaggatggtcttgatgtcctgacctcgtgatctgcccgcctcggcctcccgaagtgctgggattatataaaggcatgagccaccgcacccggcccaattcatttctgttaagtctcagtttttcttctctgtggagggtaagtttctaactcttcttctctgggtctcccagacatccacaagcgctgggccctcgtgtggctggcctgcctactctttgccgctgcgctttccctcatcctccttctcaaaaaggatcacgcgaaaggtgagcgcttcccggctccccattcccctgggggaggaccagagtggctgtgggagttctccgagggaaagcggcggccgagctcactggctgcctccgcccctctcccctaacagggtggctgaggctcttgaaacaggacgtccgctcggggggtgagtgggagcaagcgctgggcggagggccgcccccggggagccaggcctgtgccagctcacctcttccctccccatctgttttctccggcagcggccgccaggggccgcgcggctctgctcctctactcagccgatgactcgggtttcgagcgcctggtgggcgccctggcgtcggccctgtgccagctgccgctgcgcgtggccgtagacctgtggagccgtcgtgaactgagcgcgcaggggcccgtggcttggtttcacgcgcagcggcgccagaccctgcaggagggcggcgtggtggtcttgctcttctctcccggtgcggtggcgctgtgcagcgagtggctacaggatggggtgtccgggcccggggcgcacggcccgcacgacgccttccgcgcctcgctcagctgcgtgctgcccgacttcttgcagggccgggcgcccggcagctacgtgggggcctgcttcgacaggctgctccacccggacgccgtacccgcccttttccgcaccgtgcccgtcttcacactgccctcccaactgccagacttcctgggggccctgcagcagcctcgcgccccgcgttccgggcggctccaagagagagcggagcaagtgtcccgggcccttcagccagccctggatagctacttccatcccccggggactcccgcgccgggacgcggggtgggaccaggcgcgggacctggggcgggggacgggacttaaataaaggcagacgctgtttttcta

SEQ ID NO: 12565 - DNA, 2284 bp, Homo sapiens
aggaggagagtcaggactcccaggacagagagtgcacaaactacccagcacagccccctccgccccctctggaggctgaagagggattccagcccctgccacccacagacacgggctgactggggtgtctgccccccttgggggggggcagcacagggcctcaggcctgggtgccacctggcacctagaagatgcctgtgccctggttcttgctgtccttggcactgggccgaagcccagtggtcctttctctggagaggcttgtggggcctcaggacgctacccactgctctccgggcctctcctgccgcctctgggtgacatactctgcctgcctggggacatcgtgcctgctccgggccccgtgctggcgcctacgcacctgcagacagagctggtgctgaggtgccagaaggagaccgactgtgacctctgtctgcgtgtggctgtccacttggccgtgcatgggcactgggaagagcctgaagatgaggaaaagtttggaggagcagctgactcaggggtggaggagcctaggaatgcctctctccaggcccaagtcgtgctctccttccaggcctaccctactgcccgctgcgtcctgctggaggtgcaagtgcctgctgcccttgtgcagtttggtcagtctgtgggctctgtggtatatgactgcttcgaggctgccctagggagtgaggtacgaatctggtcctatactcagcccaggtacgagaaggaactcaaccacacacagcagctgcctgactgcagggggctcgaagtctggaacagcatcccgagctgctgggccctgccctggctcaacgtgtcagcagatggtgacaacgtgcatctggttctgaatgtctctgaggagcagcacttcggcctctccctgtactggaatcaggtccagggccccccaaaaccccggtggcacaaaaacctgactggaccgcagatcattaccttgaaccacacagacctggttccctgcctctgtattcaggtgtggcctctggaacctgactccgttaggacgaacatctgccccttcagggaggacccccgcgcacaccagaacctctggcaagccgcccgactgcaactgctgaccctgcagagctggctgctggacgcaccgtgctcgctgcccgcagaagcggcactgtgctggcgggctccgggtggggacccctgccagccactggtcccaccgctttcctgggagaacgtcactgtggacgtgaacagctcggagaagctgcagctgcaggagtgcttgtgggctgactccctggggcctctcaaagacgatgtgctactgttggagacacgaggcccccaggacaacagatccctctgtgccttggaacccagtggctgtacttcactacccagcaaagcctccacgagggcagctcgccttggagagtacttactacaagacctgcagtcaggccagtgtctgcagctatgggacgatgacttgggagcgctatgggcctgccccatggacaaatacatccacaagcgctgggccctcgtgtggctggcctgcctactctttgccgctgcgctttccctcatcctccttctcaaaaaggatcacgcgaaagcggccgccaggggccgcgcggctctgctcctctactcagccgatgactcgggtttcgagcgcctggtgggcgccctggcgtcggccctgtgccagctgccgctgcgcgtggccgtagacctgtggagccgtcgtgaactgagcgcgcaggggcccgtggcttggtttcacgcgcagcggcgccagaccctgcaggagggcggcgtggtggtcttgctcttctctcccggtgcggtggcgctgtgcagcgagtggctacaggatggggtgtccgggcccggggcgcacggcccgcacgacgccttccgcgcctcgctcagctgcgtgctgcccgacttcttgcagggccgggcgcccggcagctacgtgggggcctgcttcgacaggctgctccacccggacgccgtacccgcccttttccgcaccgtgcccgtcttcacactgccctcccaactgccagacttcctgggggccctgcagcagcctcgcgccccgcgttccgggcggctccaagagagagcggagcaagtgtcccgggcccttcagccagccctggatagctacttccatcccccggggactcccgcgccgggacgcggggtgggaccaggcgcgggacctggggcgggggacgggacttaaataaaggcagacgctgtttttcta

SEQ ID NO: 12566 - DNA, 16455 bp, Homo sapiens
aactacccagcacagccccctccgccccctctggaggctgaagagggattccagcccctgccacccacagacacgggctgactggggtgtctgccccccttgggggggggcagcacagggcctcaggcctgggtgccacctggcacctagaagatgcctgtgccctggttcttgctgtccttggcactgggccgaagcccagtggtcctttctctggagaggcttgtggggcctcaggacgctacccactgctctccggtgagtctggaaccctggggagacgaggaaaggctcagggttcagtttttggctcagcaaagccttagcctggctcctgtcactgctgccactgccagaactgccctgtctggtctgtctggtgctgatggtagaagagaagaacggggaaggggcaagagctgggtctgtctttctctgggagggtctgggaatacggagccccagaaaaaggtaggtggaggtcttaggcagagaacagtgcctagatggtgggggcacaaattctgactctcctttctttccttcccagggcctctcctgccgcctctggggtaagtatccctacttttaaaaagaatttcccaggttggccgaagggagcagagctgtcccaggcccatgccctccatgcccacctcagcctaggacagccaagttctttggctctctgggtatgtcaggtgccaccaaattctgggcttggaacagcttcagctcccacccgctcctccacacacagacagtgacatactctgcctgcctggggacatcgtgcctgctccgggccccgtgctggcgcctacgcacctgcagacagagctggtgctgaggtgccagaaggagaccgactgtgacctctgtctgcgtgtggctgtccacttggccgtgcatggtgagcaagtcatcctgtgacagtgcatgtgtacacgtgagtgtgtctggggtgggcatgagggccaggggatctctcaagcagtgctaggcatcctcagtgttctcctggaggacaccagcagaaggacccccaggccagtgtggtctccccagcccctgcttcccagcactgggctttccagaaggaagccaacgccaaagccagccagcccagagcagggggcctcacccagggccttgctcttgggtccttctagggcactgggaagagcctgaagatgaggaaaagtttggaggagcagctgactcaggggtggaggagcctaggaatggtgaggagaacctggctggcccaactgccccatgccaaggcctggcctgccgctcctgggcctgactgacccctgccctgttgcccacagcctctctccaggcccaagtcgtgctctccttccaggcctaccctactgcccgctgcgtcctgctggaggtgcaagtgcctgctgcccttgtgcagtttggtcagtctgtggtatgcaaaataataataatcaccttctaaacctaaaatctataaaactttttcacatgcattatctctttgaggattacaaaagaattaaatttattgaaacccttcagtaccaggcattacagccagtgttttacaggtatcaacttatttaattctcacaacagccatgtgaggtgggactattcttttgattctgatcagcgctgtgggcaagtcccttcagcctgttatgcctcagcttttatgtctgtaaaatggggatgagaatagttctacttcatatgcttgactgcgagaaatcaccaagcgtttttcagggtgcttctactattttcccctcctaccagcagtgtatgggagtcctagttgcttcccatctttgccaacacttgatggtgtaattttattttatttttaaattaaatatatttgaattttaaatatatgggaccctccatgaatttgcatgtcatcctcaggcacgggccttgctaatcttttctgtattgttccagttgtagtatatgtggtgccaaaacaagcataagtgttgtaattgtcataatttttctgcatatgtagtggtttgccattgtggttttaatttgtatcttccaatgactgatgaagttgagcacttttttcacatgcttattggctatttgtgtaacttccttgtgaaatatctcttaaagtttttttgtttttgtttttgtttttgtttttgccacataaaaaaacaatagttctggccgggcacagtggttcacacctgtaatcccagcactttgggaggctgaggcgggcagatcacgaagtcaggagattgagaccatcctggctaacactgtgaaaccctgcctccactaaaaaaatacaaaaaattagccaggcatggtggtgggcgcctgtagacccagctactcgggaggcagaggcaggagaatggcgtgaacccgggaggtggagcttgcagtgagccgagatcgcgccactgcactccagcctgggcgacagagcgagattccgtctcaaaaaaaaagaatagtcccacctcacatgactgttgtgagaattaaattaagttggtacctgtaaaacactggatgtaatgcctggcactgaataatttcaataaatttaattcttttgtaatcctcaaaactacctgatgaggcattattagtatcctcattttccagatagataaaatgaggcttggagaggggaggtctgtgggctggatgcacttctctgtactcttggaccaaagaaagagtcctaccatacataccatggtatacttaccatggtgtaagtaccatggtgcagggtgttggggcttctccctgccttaggaggccacatgtacctggaaggtctatttccactggggtcaaatcactcaaaccctttgactttccctccaacctccagcccccagccaatatcctatctggagaattgtagactgggagaacatctgcttggtccatgtcacaagcagttgtaaggaacactgaggcactgggttgagtgtgagaaccacttctgtggggaggggtgtgccatattgtgttggggtgtctcatctccttagctttggccaggtgatctagcacagcagggtgggtgcagggatttaaatgtctagggccttttcccgccctggtgacactcttactgaggacatttgctttagaattgaggccccttgaaagaaaggtgaatagtagatttcaggctatacagtataaatacagtcattagttgggggaggagggcagtgagcagagtggtccctgcagatgatcccacagcccttggcctggattctgagccctgcaccgccagccttcctcacccctctcctcacagggctctgtggtatatgactgcttcgaggctgccctagggagtgaggtacgaatctggtcctatactcagcccaggtacgagaaggaactcaaccacacacagcagctgcctggtaagtggacccccaagtcctggccccctagcctctgtcccctctggccattccccctcctgatttcaccctcttctagctccatccactctccggcaggggtctgagctgctatcctccccagagtcagtccctcggaccttctctctctgggtgatatggctttccagcccctggggaaggttctttgagcattggatagatgtgggtggtatgtaggggatggggagccattcctaatgcccccctgggagccaaattgcccccacttctttccttggcccccagccccactggaggctcttctgtgatctctcctcagactgcagggggctcgaagtctggaacagcatcccgagctgctggggtaggggctagggccagtgggccgggggtagggaggggcagggtctggagtataagaaacccttggagtccacttcagatatgggctaccacatctcagaagctcacagaacatattcattcattcattcattcattcatttgttcataacacattaattgcagtatctgtgctaagcactggaaatagaaagatgaatcttgggtcaggctcagtggctcatgcctgtaatcccagaactttgggaggccgaggtagaaggatcacttgagctcaaaagttcaagacgagcctgggcaacatggcaaatccccgtctctaccaaaaatacaaaaattaacaggacatggtggtgtgcatttgtggtcccagctactcaggaggctgaggcaggagaatcacttgagcctgggaggcaggggctacagtaagctgagactgcaccattgcacaccagcctgggtgacagagcaagactccgtctcaaaaaacaaaacaaaacaaaacaaaaacaaaaaacttgaaataaaagctaagaaagtcaagggtctaacttttttcccacgtactatttggattttgttttcgttttgtattttcttttttattgtgtataacatacatacataaaagtatgtaaagggtactgattttcttttttttttttttttttgagacagagtctcgctctgtcgctcaggctggagtgcagtggtgcaatctcggctcactgcaagctccgcctcccaggttcacgccattctcctgcctcagcctcccgagtagctgggactacaggcacccgccaccacgcctggctaatttttttttttttttagtagagacagggtttcaccgtgttagccaggatggtcttgatctcctgaccttgtgatccgcctgcctcagcctcccaaagtgctgggattacaggcgtgagccaccacgcccagccaaagggtactgatttccatgtccagttcttttttttttttttttttttggcggaatcttgctctgtcgcctaggctggactgcagtggtgtgatctcagctcactgcaacctctgccttctgggttcaagcgattctcctgcctcagcctcccaagcagctgggattacagacgtgcaccaccacgcacagctaatttttgtatttttagtagacatggagtttcaccatgctggccaggctggtcttgaactcctgacctcgtgatcctcccacctcggcctcccaaagtgctgggattacaggcatgagccgccacgtccggccaatttgtttttatatatgtatacacttgcataactagcacccagatcaatacataaatactgtgaatacatcacatactgtgatgttttctgaactactaaatgttttcaacttcattttctttttgccttcttaaaattaaagttggcctgcctctttggcaactcattaaagactattcaacaccagagttttgaaaacacagatgtgtatatcatggatttcatttcttccttcattaagtagacattgattcatttattcaacagatatttattaatttctgtgtaccaggcaaatccctggacactggaaatattaataaatcaataaatgaagatgacaaaaaacccgaccccacggagctggtgtcagggtcagggtgggggtgaggaaggacacaacaaacacatggagatgtgaagaatgcagtaagttagacagtgattagcactaaggagaacatttgtggaagggctggggaaggttgggagttgtagaggtcagggatggtctcattctggtgagcagagacctgaaagaggtgagggaggagccatatatttgagggaagagagaatagccagcaaaaagggcctggggtgggagtatgtcaggggtgtttaagaaatagtaaggagggggccgggcgcggtggctcacgcctgtaatcccagcactttgggaggccgaggctggcggatcacgaggtcaggagatcgagaccatcctggctaacacggtgaaaccccatctctacaaaaaatacaaaaaaatcagctgggcatggtggcaggcgcctgtagtcccagctactcgggagcctgaggcaggagaatggcttgaaccccaggaggcagagcttgcagtgagccgagatcacaccactgcactccagcctgggcgacagagccagactccatctcaaaaaaaaaaaaaggaaaaaaaaaagagagagaaacagtaaggaggtccttaataactctgcagcagagttattaaggacacaaatgccataggctgtgcgcgatggctcacgtctgcaatcccagcactttggggaagctgaggcaggaggattgcttgaggttaggagctcaagaccagcctggccaacatgagcgaaatcccatctctactaaaaatacaaaaactagccgggggtggtgacacacgcctgtaatcccagctactcgggtggctgaggcaagagaatcgcttgaacccaggaggtggaggttgcagtgagctatcgtgccaatgcactccagcctgggcaacagagcaagactccctctcaaaaaaaaaaaaggacacaagtatcaagaggtaaggtcagaaaggtcacagttctgaacagaggaaaatgacttgttttaaagaggttacaagatctttctgcagagggagaagcagggagaatagctcttctccgaccacacactagggtctccacgggcttggctttgggcagctgctaggagcaaagtctggtctgaaatgatgacacacgctctgccctccgagagcctcccagtctagggggtttgaaggaaactccaaagggtcagtcggggatgcagaagaggtgaggaagtctaagctgcgctctctttgcctctcccaccagccctgccctggctcaacgtgtcagcagatggtgacaacgtgcatctggttctgaatgtctctgaggagcagcacttcggcctctccctgtactggaatcaggtccagggccccccaaaaccccggtggcacaaaaacctggtgaggcctcccccttcccaagtccattcccactgtaggccgatgcctgtgcaaaggacgcagtgccatatcagagaggatccttgaagaggactcaccccaagcaagggaaaattggtgggggaacttctgccttcctggtttccttgactttggcctcctcctcttcctccttatcttctccaacctccttcctttatttgttccacagactggaccgcagatcattaccttgaaccacacagacctggttccctgcctctgtattcaggtaggagcagagtctagctgggtgccagaagaggagtgggaagatgatgatgggggtgatccctgccttcctggtctcaccattcttcaaacccttcattgaggtggagactgtggctccctggggtggctggccctcccttgacccttgctgtcctatgccttctgtctattacattccctgaatgctctccctgatcctccacagaactcctgcttattcttcatggccccattcaaatgtcaccttctccttgaaacctttccctactcctccagttctgtctttgtgttcccctggcgggcagagcatgtgctacgaacttggactggtttgaatcttggctcttgccatttgctagctgtgtaaccttgggcaagtcacttcacctctgtgagcctgtttctcatctgtaaaatgggaataataatagtaacagcctcatggggctgttataagaatgtgtgccacacccaggcttaaatatgctggctctttcctcttcctctgtacatttatttatttttttagacaaggtctcactctgttgcccaggctggagtgcagtggcacaatcatggcacactgcagcctcagccccatgggctcaagtgatcctcctgtctcagcctcccaagtagctggaactactggtgagcactaccatactcagctagtttttttttgttttgtgtagagacggggtcttgctatgttacccaggctgttctgaattcctgggcttatgctatcctcccacctcagcctcccaccaagtgctgggattataagcatgagccactgtggcttgccctgattgcactttttttttttttttttttaagacagagtctttctctgtcgcccaggctggagcaccgtggcgtgatctcggctcactgcaagctgcttctcctgggttcacgccattctcctgcctcagcctcgctgagtagctgggactacaggtgcctgcaaccacgcccagctaattttttgtattttcagtaaagacagggtttcaccgtgttagccaggatggtctcgatctcctgaccttatgatccacaagcctcgtcctcccaaagtgctgggattacaggcatgacccactgtgcccagccgctgattgcacatttaattggtcatcaggtctcatccatcttacctctgacattaatgtctctcattttctttccccctcctctccatctcagtccagcttagggctctatcatctgttttctagactgtttcaacacctccaagctcccctcccttcccatcactttcctggcattctgggcccatattctgcccccaacggtgccttttcactctattttccccatgattccccttcatgagaacattgttacatccagtggagctacttaccaagatacagctagctccctgccttttctcaggtggttcccattacctcaaatgccctcacctccttcccaaagcttttccccaaccacccggcctctcctagctccaaatccccttgcacttctatctttccttgtccatttatcacttcatttcttttattttcttaaattttttttttttttttagagacagcattttgctctgtcacccatggtagagtgcagtggcatgaacacgtctcattgcagccccaagctcccaggttcaagggatcctcctgcctcagcctctgcagctgggactgcaggcatgcgccaccatgcctggctaattgtttccttttttttttttttttttttttaatggagtttcactcttttgcccaggatggagtgcagtggcgtgatctcggctcactgcaacttccgcctcccaggttcaagccattctcctgcctcagcctcccaagtagctgagattacaggcacacaccaccatgcccagctaatttttgtatttttagtagagacagggtttcaccatgttggtcaggctggtcccaaattcctgacctcgtgatccacccgcctcggccgcccaaagtgctgggattacaggcgtgagccactgtgcccagcctgttttcattttttaatgttttgtggcgatgggccaccacacccagctcaatcacttactttcttatttgggcatctaatttcttcttgtacacaacagatgctcaataaatattatgaaatgaatgagtgttttactaatttatataaatattttatccttactacaagtgtgagtttgtgatttccttgaaggcaagcaaatcatatctaattcaaatgtaatagctttgcaagagccttgcacatagcgcctacttgttttttgtttttttgtgtttttgttttttttttgtttttttgtcttttttgagacagagtctcgctctattggcaggctggagtacagtggcgtgatctcggctcactgcaatctctgcctcctggattcaagcaattcttctgcctcagcctcccaagtagctgggactacaagtgcatgccaccatgcccggctaatttttgtattttcagtagagacggggtttcagcatgttggccagatggtctcgatctcttgacctcgtgatccgcccaccttggcctcccaaagtgctgggattacaggggtgagccaccgcgcccagccttgttttgtttttaaacaaggtaacagtatgaggtcctcactgttgaatgagtgaataaatgttactgcctaacacagccataggacacagcagatgttcatgagatgtatgctgtgatttaaatggcttcattgccaaacacagtgcctgccacatagtcggtgttcctaactaaaggcttgatggataaattaatgtattacctctagtgcttagcatagagctatgcacataataggcactcttgaaatgtctgttgaaagaataaatgaatgtgtccttagaacttagcacattccccaacacatagcaggtgcttacacaagtgattgtggaatgaattaaaattaattatccaccaggcacagtggctcacacctgtaatcccagcactttgggaggccaaggtgggtggatcacgaggtcaggagtttgagaccagcctggcctaacatagtgaaacccagtctctactaaaagtacaaaaattagccaggcatggtgatgtgcgcctgtagtccctgctacttgggaagctgaggcaggagaatcacttgaacccaggaggcggaggttgtggtgagctgagatcacaccactgcactccagcctgggcaacagagtgagattccatctcaaaaaataaaaaaataataaaaatttaattatccaaggtctcttgtgcttgccatactgctaagacacaatggtaggcactcattaaaagtctgttgaatgggccaggcgcggtggctcacgcttgtaatcccaacactttgggaggctgagacgggtggatcacttgaggtcaggagttcgagaccagcctgatcaatgtggtgaaaccccatctctactaaaaatacaaaaattaaccagttagccggccgttgtggcatgttcctgtaatcgcagctcctcaggagactgagatgggagaatcgcttgaacctgggaggtggaggttgtagtgagccaagattgcaccactgcactccagcctgggcgacagagcgagactctatctcaaaaaaaaaaaaaagtttgttaatgaagatgttgccagtgcccagcattatgtttgctggaagaatagatgtgagcacctccaggttttgtaaaaggcaggaagacccagcaagtgtttgtgaaatacctgctgaatgagtgcatccccactgtccagcagagggccaggcacatgcccatggaggggacctgagcagacccccatttcctttccaggtgtggcctctggaacctgactccgttaggacgaacatctgccccttcagggagggtgagccgaccggcctggggctggggttggggtgttgcgagcgatgggtacctggcctgcggtgactgtgccctttccttgcagacccccgcgcacaccagaacctctggcaagccgcccgactgcaactgctgaccctgcagagctggctgctggacgcaccgtgctcgctgcccgcagaagcggcactgtgctggcgggctccgggtggggacccctgccagccactggtcccaccgctttcctgggagaacgtcactgtggacgtaagtgaagcagagggcacctcccgtggtgaggggagagtggggaaccgggggtccccttttgtgatcccacccattcctctctttccacagaaggttctcgagttcccattgctgaaaggccaccctaacctctgtgttcaggtcagaaaggggtgcatagtgctgggctggaggctggacctgggcagaccccccagccaagggggtcttagttcttgggccgctaaagcatagtggttgccagcttcctctatgggagttccactgcctactttagtagtgcgcgggaccctgggcaactcacttcacctctctgaacgtcagtttcctcatctgtttaatgcagatgataatacagtaactacctcatggagtggttgtgacaatgaaataagagaagtgcttccccttaggaatcggtacagactaaatgctccataaatgtagccacttttattattgctatccttattctatttccatacctgtagaatgggttgctctacagtttcaaagggtgattataagaacattcactcatccggccaggcgcggtggctcacgcctgtaatcccagcactttgggaggccgaggcgggcagatcacgaggtcaggacatcaagaccatcctggctaacatggtgaaaccccatctctactaaaaatacaaaaaattagccggtcgtggtggtgggcacctgtagtcccagctactaggaaggctggggcaggagaatggcgtgaacctgggaggctgagcttgcagtgagctgagagggcgccactgcactccagcctgggtgacagagtgagactgggcgacagagtgaaactccgtctcaaaaaaaaaaaaaattcactcattcaagattttttgagcagcacaagtcactgttttaggcacttgtgatagaccctaacatctctaccctcatagaacttatattgtaatggagaaaggcaggcaacagacattgtaaataaatcatatagtatcttaaaattgcatacaaataccatgggaaagggataaggtgggactggggttgcaatttttagcagggtggtcatgtgagaaaggaatctctttgagaaggttagatgagaggggaaccatgctccgtaagacataaaaacagctttagggtcagaagacgctttatacagatgatctcacaaggctggggcagagaaagatgtagtgattcctaatcacccagccttgaatccacatctgcctcaggtcagattgagtgcagattcccaacccaacaggccttctgttgcctgccccattctggtctttctgcctttggcttttgcttttcttagtggccctaaccatggtctcttcccagcaggtgaacagctcggagaagctgcagctgcaggagtgcttgtgggctggtgagttgggcctgggggcagctggggcagggccacctcctaggggtgaaggtcagggcatgggaggcaggcaagtggccaatcccagcaaggatgggtcttggtcagagtggcctctcaccccttccagactccctggggcctctcaaagacgatgtgctactgttggagacacgaggcccccaggacaacagatccctctgtgccttggaacccagtggctgtacttcactacccagcaaagcctccacggttaggactgggcgaccctcctccacagatctctccaaatgcatctcacatctggcctcaaattttcactccatccaccctgtgccggtctctgggaacatggggggtgactcagaccagggccatattcagcggcatcaccaaagtctcccagtcccctctacctcattctacccagctgtagcctggtaggtgctgccctaagggtgctacctccaggtaacagtgcccccatcctttggcttggcagagggcagctcgccttggagagtacttactacaagacctgcagtcaggccagtgtctgcaggtgagctggtggaagaagggccccacctcaatgcctaggggcaacaggcctaaaactagcactcacctactgtctatttaggcttattttatgttcagccctgggaaagttaagagtagaagaagcacagttcctatccccaaggagcacactgttggctagacacccataaacagataaccacacctacaggtgctaagttttgggttccagggagagcttccgggaagaatttcttcctataagccagatttggtatggaagaagtcataccctagtcagtgggcacagcacaaaggcagagcagctgcaggaaccttagccgggagatatgcatagttgatgctgggaatttggagatcaggccaccagagcttggtgaatattggaacacctggctggtgccctggatttggttctgtttgtatcttacagctatgggacgatgacttgggagcgctatgggcctgccccatggacaaatgtgagtattgtaagaactgcctttcctttctgtaccaggagtggggatcttgacagggaccactcttgggcacagcacatgcaatggccttgtccttccctgagatcagataaacagagggtcattccttcattcactcaaaaaatgatgagagcttgcagggatcgcaggaacaccaaaaatataaatccttgcccccgccccacccctagaagactagcaagacatgagccagtcacttacatttaaagtgggagctactgaagcaccaccaagtgttcagtgctgtaaatgcatacaatgtggacctgacctgggtggggtgaggggtgaggggctcagggggaaggttccagcaaaactctgaagactgagctaggggaagggggtagagatacagggtcttggacaggcaggtttctgtcatgagataaagatgcaggagacatgtaggggatttggatcttatgttgagagcagcaggagctacgatcaaatttttatatatttcacacacacacacacacatatatatatatatatatatatatatatatatacttatttttttatttatttttgaggcagagtctcactctgttgcccaggctggagtgcaatggcgcgatctcggctaactgcaacctctgcctcccgggttcaagcaattctctacctcagcctcccgggtagctgggattaataggcgcctgccaccatgccctgctaatttttgtatttttagtagagatggggtttcaccatcttggccaggctggtcttgaactcctgacctcgtgatccgcccgcgtcggcctcccaaagtgctgggattatagtcgtgagtcaccgcacctggcccaaatttatatttttaaaagatctctgaggctgtcatgaatcaattcaaggcaaatcaattggaggtaaaaaaaaaaaaaaaaagacagggcagggacaccaggtagttgcagacacccaggacagcaagatcaagggcccagcaaccctagcttaggggagaaaaacagctgacattttagcacttaagatgctcggcattgtgttaagtatgtattaacacattgtgttaagctttatatgtattaatatatttagtcctcacaccaaccctatgacacaggtacaactttacagaggagaaaactgaggcagagggtgacattacttattcaaagacccctaaacagatggagctatattcatccactggctctgacactgtgctgtggactctgggcaaatcatttcttcgttttttgttttgttttgttttgttttgagaggagtctcaccctgtcgcccaggctggagtgcaatggcgcgatctcggctcactgcaacctctgcctcccgagttcaagcgattctcttgcctcagcctcccgagtagctgggattacaggcgtgtgccaccacgcccggctaattttttgtatttttagtagagacggggtttcaccgtgttagccaggatggtcttgatgtcctgacctcgtgatctgcccgcctcggcctcccgaagtgctgggattatataaaggcatgagccaccgcacccggcccaattcatttctgttaagtctcagtttttcttctctgtggagggtaagtttctaactcttcttctctgggtctcccagacatccacaagcgctgggccctcgtgtggctggcctgcctactctttgccgctgcgctttccctcatcctccttctcaaaaaggatcacgcgaaaggtgagcgcttcccggctccccattcccctgggggaggaccagagtggctgtgggagttctccgagggaaagcggcggccgagctcactggctgcctccgcccctctcccctaacagggtggctgaggctcttgaaacaggacgtccgctcggggggtgagtgggagcaagcgctgggcggagggccgcccccggggagccaggcctgtgccagctcacctcttccctccccatctgttttctccggcagcggccgccaggggccgcgcggctctgctcctctactcagccgatgactcgggtttcgagcgcctggtgggcgccctggcgtcggccctgtgccagctgccgctgcgcgtggccgtagacctgtggagccgtcgtgaactgagcgcgcaggggcccgtggcttggtttcacgcgcagcggcgccagaccctgcaggagggcggcgtggtggtcttgctcttctctcccggtgcggtggcgctgtgcagcgagtggctacaggatggggtgtccgggcccggggcgcacggcccgcacgacgccttccgcgcctcgctcagctgcgtgctgcccgacttcttgcagggccgggcgcccggcagctacgtgggggcctgcttcgacaggctgctccacccggacgccgtacccgcccttttccgcaccgtgcccgtcttcacactgccctcccaactgccagacttcctgggggccctgcagcagcctcgcgccccgcgttccgggcggctccaagagagagcggagcaagtgtcccgggcccttcagccagccctggatagctacttccatcccccggggactcccgcgccgggacgcggggtgggaccaggcgcgggacctggggcgggggacgggacttaaataaaggcagacgctgtttttcta

SEQ ID NO: 12567 - DNA, 2244 bp, Homo sapiens
aactacccagcacagccccctccgccccctctggaggctgaagagggattccagcccctgccacccacagacacgggctgactggggtgtctgccccccttgggggggggcagcacagggcctcaggcctgggtgccacctggcacctagaagatgcctgtgccctggttcttgctgtccttggcactgggccgaagcccagtggtcctttctctggagaggcttgtggggcctcaggacgctacccactgctctccgggcctctcctgccgcctctgggacagtgacatactctgcctgcctggggacatcgtgcctgctccgggccccgtgctggcgcctacgcacctgcagacagagctggtgctgaggtgccagaaggagaccgactgtgacctctgtctgcgtgtggctgtccacttggccgtgcatgggcactgggaagagcctgaagatgaggaaaagtttggaggagcagctgactcaggggtggaggagcctaggaatgcctctctccaggcccaagtcgtgctctccttccaggcctaccctactgcccgctgcgtcctgctggaggtgcaagtgcctgctgcccttgtgcagtttggtcagtctgtgggctctgtggtatatgactgcttcgaggctgccctagggagtgaggtacgaatctggtcctatactcagcccaggtacgagaaggaactcaaccacacacagcagctgcctgccctgccctggctcaacgtgtcagcagatggtgacaacgtgcatctggttctgaatgtctctgaggagcagcacttcggcctctccctgtactggaatcaggtccagggccccccaaaaccccggtggcacaaaaacctgactggaccgcagatcattaccttgaaccacacagacctggttccctgcctctgtattcaggtgtggcctctggaacctgactccgttaggacgaacatctgccccttcagggaggacccccgcgcacaccagaacctctggcaagccgcccgactgcaactgctgaccctgcagagctggctgctggacgcaccgtgctcgctgcccgcagaagcggcactgtgctggcgggctccgggtggggacccctgccagccactggtcccaccgctttcctgggagaacgtcactgtggacgtgaacagctcggagaagctgcagctgcaggagtgcttgtgggctgactccctggggcctctcaaagacgatgtgctactgttggagacacgaggcccccaggacaacagatccctctgtgccttggaacccagtggctgtacttcactacccagcaaagcctccacgagggcagctcgccttggagagtacttactacaagacctgcagtcaggccagtgtctgcagctatgggacgatgacttgggagcgctatgggcctgccccatggacaaatacatccacaagcgctgggccctcgtgtggctggcctgcctactctttgccgctgcgctttccctcatcctccttctcaaaaaggatcacgcgaaagggtggctgaggctcttgaaacaggacgtccgctcgggggcggccgccaggggccgcgcggctctgctcctctactcagccgatgactcgggtttcgagcgcctggtgggcgccctggcgtcggccctgtgccagctgccgctgcgcgtggccgtagacctgtggagccgtcgtgaactgagcgcgcaggggcccgtggcttggtttcacgcgcagcggcgccagaccctgcaggagggcggcgtggtggtcttgctcttctctcccggtgcggtggcgctgtgcagcgagtggctacaggatggggtgtccgggcccggggcgcacggcccgcacgacgccttccgcgcctcgctcagctgcgtgctgcccgacttcttgcagggccgggcgcccggcagctacgtgggggcctgcttcgacaggctgctccacccggacgccgtacccgcccttttccgcaccgtgcccgtcttcacactgccctcccaactgccagacttcctgggggccctgcagcagcctcgcgccccgcgttccgggcggctccaagagagagcggagcaagtgtcccgggcccttcagccagccctggatagctacttccatcccccggggactcccgcgccgggacgcggggtgggaccaggcgcgggacctggggcgggggacgggacttaaataaaggcagacgctgtttttcta

SEQ ID NO: 12568 - DNA, 4988 bp, Homo sapiens
tccaggtgtggcctctggaacctgactccgttaggacgaacatctgccccttcagggagggtgagccgaccggcctggggctggggttggggtgttgcgagcgatgggtacctggcctgcggtgactgtgccctttccttgcagacccccgcgcacaccagaacctctggcaagccgcccgactgcaactgctgaccctgcagagctggctgctggacgcaccgtgctcgctgcccgcagaagcggcactgtgctggcgggctccgggtggggacccctgccagccactggtcccaccgctttcctgggagaacgtcactgtggacgtaagtgaagcagagggcacctcccgtggtgaggggagagtggggaaccgggggtccccttttgtgatcccacccattcctctctttccacagaaggttctcgagttcccattgctgaaaggccaccctaacctctgtgttcaggtcagaaaggggtgcatagtgctgggctggaggctggacctgggcagaccccccagccaagggggtcttagttcttgggccgctaaagcatagtggttgccagcttcctctatgggagttccactgcctactttagtagtgcgcgggaccctgggcaactcacttcacctctctgaacgtcagtttcctcatctgtttaatgcagatgataatacagtaactacctcatggagtggttgtgacaatgaaataagagaagtgcttccccttaggaatcggtacagactaaatgctccataaatgtagccacttttattattgctatccttattctatttccatacctgtagaatgggttgctctacagtttcaaagggtgattataagaacattcactcatccggccaggcgcggtggctcacgcctgtaatcccagcactttgggaggccgaggcgggcagatcacgaggtcaggacatcaagaccatcctggctaacatggtgaaaccccatctctactaaaaatacaaaaaattagccggtcgtggtggtgggcacctgtagtcccagctactaggaaggctggggcaggagaatggcgtgaacctgggaggctgagcttgcagtgagctgagagggcgccactgcactccagcctgggtgacagagtgagactgggcgacagagtgaaactccgtctcaaaaaaaaaaaaaattcactcattcaagattttttgagcagcacaagtcactgttttaggcacttgtgatagaccctaacatctctaccctcatagaacttatattgtaatggagaaaggcaggcaacagacattgtaaataaatcatatagtatcttaaaattgcatacaaataccatgggaaagggataaggtgggactggggttgcaatttttagcagggtggtcatgtgagaaaggaatctctttgagaaggttagatgagaggggaaccatgctccgtaagacataaaaacagctttagggtcagaagacgctttatacagatgatctcacaaggctggggcagagaaagatgtagtgattcctaatcacccagccttgaatccacatctgcctcaggtcagattgagtgcagattcccaacccaacaggccttctgttgcctgccccattctggtctttctgcctttggcttttgcttttcttagtggccctaaccatggtctcttcccagcaggtgaacagctcggagaagctgcagctgcaggagtgcttgtgggctggtgagttgggcctgggggcagctggggcagggccacctcctaggggtgaaggtcagggcatgggaggcaggcaagtggccaatcccagcaaggatgggtcttggtcagagtggcctctcaccccttccagactccctggggcctctcaaagacgatgtgctactgttggagacacgaggcccccaggacaacagatccctctgtgccttggaacccagtggctgtacttcactacccagcaaagcctccacggttaggactgggcgaccctcctccacagatctctccaaatgcatctcacatctggcctcaaattttcactccatccaccctgtgccggtctctgggaacatggggggtgactcagaccagggccatattcagcggcatcaccaaagtctcccagtcccctctacctcattctacccagctgtagcctggtaggtgctgccctaagggtgctacctccaggtaacagtgcccccatcctttggcttggcagagggcagctcgccttggagagtacttactacaagacctgcagtcaggccagtgtctgcaggtgagctggtggaagaagggccccacctcaatgcctaggggcaacaggcctaaaactagcactcacctactgtctatttaggcttattttatgttcagccctgggaaagttaagagtagaagaagcacagttcctatccccaaggagcacactgttggctagacacccataaacagataaccacacctacaggtgctaagttttgggttccagggagagcttccgggaagaatttcttcctataagccagatttggtatggaagaagtcataccctagtcagtgggcacagcacaaaggcagagcagctgcaggaaccttagccgggagatatgcatagttgatgctgggaatttggagatcaggccaccagagcttggtgaatattggaacacctggctggtgccctggatttggttctgtttgtatcttacagctatgggacgatgacttgggagcgctatgggcctgccccatggacaaatgtgagtattgtaagaactgcctttcctttctgtaccaggagtggggatcttgacagggaccactcttgggcacagcacatgcaatggccttgtccttccctgagatcagataaacagagggtcattccttcattcactcaaaaaatgatgagagcttgcagggatcgcaggaacaccaaaaatataaatccttgcccccgccccacccctagaagactagcaagacatgagccagtcacttacatttaaagtgggagctactgaagcaccaccaagtgttcagtgctgtaaatgcatacaatgtggacctgacctgggtggggtgaggggtgaggggctcagggggaaggttccagcaaaactctgaagactgagctaggggaagggggtagagatacagggtcttggacaggcaggtttctgtcatgagataaagatgcaggagacatgtaggggatttggatcttatgttgagagcagcaggagctacgatcaaatttttatatatttcacacacacacacacacatatatatatatatatatatatatatatatatacttatttttttatttatttttgaggcagagtctcactctgttgcccaggctggagtgcaatggcgcgatctcggctaactgcaacctctgcctcccgggttcaagcaattctctacctcagcctcccgggtagctgggattaataggcgcctgccaccatgccctgctaatttttgtatttttagtagagatggggtttcaccatcttggccaggctggtcttgaactcctgacctcgtgatccgcccgcgtcggcctcccaaagtgctgggattatagtcgtgagtcaccgcacctggcccaaatttatatttttaaaagatctctgaggctgtcatgaatcaattcaaggcaaatcaattggaggtaaaaaaaaaaaaaaaaagacagggcagggacaccaggtagttgcagacacccaggacagcaagatcaagggcccagcaaccctagcttaggggagaaaaacagctgacattttagcacttaagatgctcggcattgtgttaagtatgtattaacacattgtgttaagctttatatgtattaatatatttagtcctcacaccaaccctatgacacaggtacaactttacagaggagaaaactgaggcagagggtgacattacttattcaaagacccctaaacagatggagctatattcatccactggctctgacactgtgctgtggactctgggcaaatcatttcttcgttttttgttttgttttgttttgttttgagaggagtctcaccctgtcgcccaggctggagtgcaatggcgcgatctcggctcactgcaacctctgcctcccgagttcaagcgattctcttgcctcagcctcccgagtagctgggattacaggcgtgtgccaccacgcccggctaattttttgtatttttagtagagacggggtttcaccgtgttagccaggatggtcttgatgtcctgacctcgtgatctgcccgcctcggcctcccgaagtgctgggattatataaaggcatgagccaccgcacccggcccaattcatttctgttaagtctcagtttttcttctctgtggagggtaagtttctaactcttcttctctgggtctcccagacatccacaagcgctgggccctcgtgtggctggcctgcctactctttgccgctgcgctttccctcatcctccttctcaaaaaggatcacgcgaaaggtgagcgcttcccggctccccattcccctgggggaggaccagagtggctgtgggagttctccgagggaaagcggcggccgagctcactggctgcctccgcccctctcccctaacagggtggctgaggctcttgaaacaggacgtccgctcggggggtgagtgggagcaagcgctgggcggagggccgcccccggggagccaggcctgtgccagctcacctcttccctccccatctgttttctccggcagcggccgccaggggccgcgcggctctgctcctctactcagccgatgactcgggtttcgagcgcctggtgggcgccctggcgtcggccctgtgccagctgccgctgcgcgtggccgtagacctgtggagccgtcgtgaactgagcgcgcaggggcccgtggcttggtttcacgcgcagcggcgccagaccctgcagga

SEQ ID NO: 12569 - DNA, 862 bp, Homo sapiens
tccaggtgtggcctctggaacctgactccgttaggacgaacatctgccccttcagggaggacccccgcgcacaccagaacctctggcaagccgcccgactgcaactgctgaccctgcagagctggctgctggacgcaccgtgctcgctgcccgcagaagcggcactgtgctggcgggctccgggtggggacccctgccagccactggtcccaccgctttcctgggagaacgtcactgtggacaaggttctcgagttcccattgctgaaaggccaccctaacctctgtgttcaggtgaacagctcggagaagctgcagctgcaggagtgcttgtgggctgactccctggggcctctcaaagacgatgtgctactgttggagacacgaggcccccaggacaacagatccctctgtgccttggaacccagtggctgtacttcactacccagcaaagcctccacgagggcagctcgccttggagagtacttactacaagacctgcagtcaggccagtgtctgcagctatgggacgatgacttgggagcgctatgggcctgccccatggacaaatacatccacaagcgctgggccctcgtgtggctggcctgcctactctttgccgctgcgctttccctcatcctccttctcaaaaaggatcacgcgaaagcggccgccaggggccgcgcggctctgctcctctactcagccgatgactcgggtttcgagcgcctggtgggcgccctggcgtcggccctgtgccagctgccgctgcgcgtggccgtagacctgtggagccgtcgtgaactgagcgcgcaggggcccgtggcttggtttcacgcgcagcggcgccagaccctgcagga

SEQ ID NO: 12570 - DNA, 8680 bp, Homo sapiens
tgaggcctcccccttcccaagtccattcccactgtaggccgatgcctgtgcaaaggacgcagtgccatatcagagaggatccttgaagaggactcaccccaagcaagggaaaattggtgggggaacttctgccttcctggtttccttgactttggcctcctcctcttcctccttatcttctccaacctccttcctttatttgttccacagactggaccgcagatcattaccttgaaccacacagacctggttccctgcctctgtattcaggtaggagcagagtctagctgggtgccagaagaggagtgggaagatgatgatgggggtgatccctgccttcctggtctcaccattcttcaaacccttcattgaggtggagactgtggctccctggggtggctggccctcccttgacccttgctgtcctatgccttctgtctattacattccctgaatgctctccctgatcctccacagaactcctgcttattcttcatggccccattcaaatgtcaccttctccttgaaacctttccctactcctccagttctgtctttgtgttcccctggcgggcagagcatgtgctacgaacttggactggtttgaatcttggctcttgccatttgctagctgtgtaaccttgggcaagtcacttcacctctgtgagcctgtttctcatctgtaaaatgggaataataatagtaacagcctcatggggctgttataagaatgtgtgccacacccaggcttaaatatgctggctctttcctcttcctctgtacatttatttatttttttagacaaggtctcactctgttgcccaggctggagtgcagtggcacaatcatggcacactgcagcctcagccccatgggctcaagtgatcctcctgtctcagcctcccaagtagctggaactactggtgagcactaccatactcagctagtttttttttgttttgtgtagagacggggtcttgctatgttacccaggctgttctgaattcctgggcttatgctatcctcccacctcagcctcccaccaagtgctgggattataagcatgagccactgtggcttgccctgattgcactttttttttttttttttttaagacagagtctttctctgtcgcccaggctggagcaccgtggcgtgatctcggctcactgcaagctgcttctcctgggttcacgccattctcctgcctcagcctcgctgagtagctgggactacaggtgcctgcaaccacgcccagctaattttttgtattttcagtaaagacagggtttcaccgtgttagccaggatggtctcgatctcctgaccttatgatccacaagcctcgtcctcccaaagtgctgggattacaggcatgacccactgtgcccagccgctgattgcacatttaattggtcatcaggtctcatccatcttacctctgacattaatgtctctcattttctttccccctcctctccatctcagtccagcttagggctctatcatctgttttctagactgtttcaacacctccaagctcccctcccttcccatcactttcctggcattctgggcccatattctgcccccaacggtgccttttcactctattttccccatgattccccttcatgagaacattgttacatccagtggagctacttaccaagatacagctagctccctgccttttctcaggtggttcccattacctcaaatgccctcacctccttcccaaagcttttccccaaccacccggcctctcctagctccaaatccccttgcacttctatctttccttgtccatttatcacttcatttcttttattttcttaaattttttttttttttttagagacagcattttgctctgtcacccatggtagagtgcagtggcatgaacacgtctcattgcagccccaagctcccaggttcaagggatcctcctgcctcagcctctgcagctgggactgcaggcatgcgccaccatgcctggctaattgtttccttttttttttttttttttttttaatggagtttcactcttttgcccaggatggagtgcagtggcgtgatctcggctcactgcaacttccgcctcccaggttcaagccattctcctgcctcagcctcccaagtagctgagattacaggcacacaccaccatgcccagctaatttttgtatttttagtagagacagggtttcaccatgttggtcaggctggtcccaaattcctgacctcgtgatccacccgcctcggccgcccaaagtgctgggattacaggcgtgagccactgtgcccagcctgttttcattttttaatgttttgtggcgatgggccaccacacccagctcaatcacttactttcttatttgggcatctaatttcttcttgtacacaacagatgctcaataaatattatgaaatgaatgagtgttttactaatttatataaatattttatccttactacaagtgtgagtttgtgatttccttgaaggcaagcaaatcatatctaattcaaatgtaatagctttgcaagagccttgcacatagcgcctacttgttttttgtttttttgtgtttttgttttttttttgtttttttgtcttttttgagacagagtctcgctctattggcaggctggagtacagtggcgtgatctcggctcactgcaatctctgcctcctggattcaagcaattcttctgcctcagcctcccaagtagctgggactacaagtgcatgccaccatgcccggctaatttttgtattttcagtagagacggggtttcagcatgttggccagatggtctcgatctcttgacctcgtgatccgcccaccttggcctcccaaagtgctgggattacaggggtgagccaccgcgcccagccttgttttgtttttaaacaaggtaacagtatgaggtcctcactgttgaatgagtgaataaatgttactgcctaacacagccataggacacagcagatgttcatgagatgtatgctgtgatttaaatggcttcattgccaaacacagtgcctgccacatagtcggtgttcctaactaaaggcttgatggataaattaatgtattacctctagtgcttagcatagagctatgcacataataggcactcttgaaatgtctgttgaaagaataaatgaatgtgtccttagaacttagcacattccccaacacatagcaggtgcttacacaagtgattgtggaatgaattaaaattaattatccaccaggcacagtggctcacacctgtaatcccagcactttgggaggccaaggtgggtggatcacgaggtcaggagtttgagaccagcctggcctaacatagtgaaacccagtctctactaaaagtacaaaaattagccaggcatggtgatgtgcgcctgtagtccctgctacttgggaagctgaggcaggagaatcacttgaacccaggaggcggaggttgtggtgagctgagatcacaccactgcactccagcctgggcaacagagtgagattccatctcaaaaaataaaaaaataataaaaatttaattatccaaggtctcttgtgcttgccatactgctaagacacaatggtaggcactcattaaaagtctgttgaatgggccaggcgcggtggctcacgcttgtaatcccaacactttgggaggctgagacgggtggatcacttgaggtcaggagttcgagaccagcctgatcaatgtggtgaaaccccatctctactaaaaatacaaaaattaaccagttagccggccgttgtggcatgttcctgtaatcgcagctcctcaggagactgagatgggagaatcgcttgaacctgggaggtggaggttgtagtgagccaagattgcaccactgcactccagcctgggcgacagagcgagactctatctcaaaaaaaaaaaaaagtttgttaatgaagatgttgccagtgcccagcattatgtttgctggaagaatagatgtgagcacctccaggttttgtaaaaggcaggaagacccagcaagtgtttgtgaaatacctgctgaatgagtgcatccccactgtccagcagagggccaggcacatgcccatggaggggacctgagcagacccccatttcctttccaggtgtggcctctggaacctgactccgttaggacgaacatctgccccttcagggagggtgagccgaccggcctggggctggggttggggtgttgcgagcgatgggtacctggcctgcggtgactgtgccctttccttgcagacccccgcgcacaccagaacctctggcaagccgcccgactgcaactgctgaccctgcagagctggctgctggacgcaccgtgctcgctgcccgcagaagcggcactgtgctggcgggctccgggtggggacccctgccagccactggtcccaccgctttcctgggagaacgtcactgtggacgtaagtgaagcagagggcacctcccgtggtgaggggagagtggggaaccgggggtccccttttgtgatcccacccattcctctctttccacagaaggttctcgagttcccattgctgaaaggccaccctaacctctgtgttcaggtcagaaaggggtgcatagtgctgggctggaggctggacctgggcagaccccccagccaagggggtcttagttcttgggccgctaaagcatagtggttgccagcttcctctatgggagttccactgcctactttagtagtgcgcgggaccctgggcaactcacttcacctctctgaacgtcagtttcctcatctgtttaatgcagatgataatacagtaactacctcatggagtggttgtgacaatgaaataagagaagtgcttccccttaggaatcggtacagactaaatgctccataaatgtagccacttttattattgctatccttattctatttccatacctgtagaatgggttgctctacagtttcaaagggtgattataagaacattcactcatccggccaggcgcggtggctcacgcctgtaatcccagcactttgggaggccgaggcgggcagatcacgaggtcaggacatcaagaccatcctggctaacatggtgaaaccccatctctactaaaaatacaaaaaattagccggtcgtggtggtgggcacctgtagtcccagctactaggaaggctggggcaggagaatggcgtgaacctgggaggctgagcttgcagtgagctgagagggcgccactgcactccagcctgggtgacagagtgagactgggcgacagagtgaaactccgtctcaaaaaaaaaaaaaattcactcattcaagattttttgagcagcacaagtcactgttttaggcacttgtgatagaccctaacatctctaccctcatagaacttatattgtaatggagaaaggcaggcaacagacattgtaaataaatcatatagtatcttaaaattgcatacaaataccatgggaaagggataaggtgggactggggttgcaatttttagcagggtggtcatgtgagaaaggaatctctttgagaaggttagatgagaggggaaccatgctccgtaagacataaaaacagctttagggtcagaagacgctttatacagatgatctcacaaggctggggcagagaaagatgtagtgattcctaatcacccagccttgaatccacatctgcctcaggtcagattgagtgcagattcccaacccaacaggccttctgttgcctgccccattctggtctttctgcctttggcttttgcttttcttagtggccctaaccatggtctcttcccagcaggtgaacagctcggagaagctgcagctgcaggagtgcttgtgggctggtgagttgggcctgggggcagctggggcagggccacctcctaggggtgaaggtcagggcatgggaggcaggcaagtggccaatcccagcaaggatgggtcttggtcagagtggcctctcaccccttccagactccctggggcctctcaaagacgatgtgctactgttggagacacgaggcccccaggacaacagatccctctgtgccttggaacccagtggctgtacttcactacccagcaaagcctccacggttaggactgggcgaccctcctccacagatctctccaaatgcatctcacatctggcctcaaattttcactccatccaccctgtgccggtctctgggaacatggggggtgactcagaccagggccatattcagcggcatcaccaaagtctcccagtcccctctacctcattctacccagctgtagcctggtaggtgctgccctaagggtgctacctccaggtaacagtgcccccatcctttggcttggcagagggcagctcgccttggagagtacttactacaagacctgcagtcaggccagtgtctgcaggtgagctggtggaagaagggccccacctcaatgcctaggggcaacaggcctaaaactagcactcacctactgtctatttaggcttattttatgttcagccctgggaaagttaagagtagaagaagcacagttcctatccccaaggagcacactgttggctagacacccataaacagataaccacacctacaggtgctaagttttgggttccagggagagcttccgggaagaatttcttcctataagccagatttggtatggaagaagtcataccctagtcagtgggcacagcacaaaggcagagcagctgcaggaaccttagccgggagatatgcatagttgatgctgggaatttggagatcaggccaccagagcttggtgaatattggaacacctggctggtgccctggatttggttctgtttgtatcttacagctatgggacgatgacttgggagcgctatgggcctgccccatggacaaatgtgagtattgtaagaactgcctttcctttctgtaccaggagtggggatcttgacagggaccactcttgggcacagcacatgcaatggccttgtccttccctgagatcagataaacagagggtcattccttcattcactcaaaaaatgatgagagcttgcagggatcgcaggaacaccaaaaatataaatccttgcccccgccccacccctagaagactagcaagacatgagccagtcacttacatttaaagtgggagctactgaagcaccaccaagtgttcagtgctgtaaatgcatacaatgtggacctgacctgggtggggtgaggggtgaggggctcagggggaaggttccagcaaaactctgaagactgagctaggggaagggggtagagatacagggtcttggacaggcaggtttctgtcatgagataaagatgcaggagacatgtaggggatttggatcttatgttgagagcagcaggagctacgatcaaatttttatatatttcacacacacacacacacatatatatatatatatatatatatatatatatacttatttttttatttatttttgaggcagagtctcactctgttgcccaggctggagtgcaatggcgcgatctcggctaactgcaacctctgcctcccgggttcaagcaattctctacctcagcctcccgggtagctgggattaataggcgcctgccaccatgccctgctaatttttgtatttttagtagagatggggtttcaccatcttggccaggctggtcttgaactcctgacctcgtgatccgcccgcgtcggcctcccaaagtgctgggattatagtcgtgagtcaccgcacctggcccaaatttatatttttaaaagatctctgaggctgtcatgaatcaattcaaggcaaatcaattggaggtaaaaaaaaaaaaaaaaagacagggcagggacaccaggtagttgcagacacccaggacagcaagatcaagggcccagcaaccctagcttaggggagaaaaacagctgacattttagcacttaagatgctcggcattgtgttaagtatgtattaacacattgtgttaagctttatatgtattaatatatttagtcctcacaccaaccctatgacacaggtacaactttacagaggagaaaactgaggcagagggtgacattacttattcaaagacccctaaacagatggagctatattcatccactggctctgacactgtgctgtggactctgggcaaatcatttcttcgttttttgttttgttttgttttgttttgagaggagtctcaccctgtcgcccaggctggagtgcaatggcgcgatctcggctcactgcaacctctgcctcccgagttcaagcgattctcttgcctcagcctcccgagtagctgggattacaggcgtgtgccaccacgcccggctaattttttgtatttttagtagagacggggtttcaccgtgttagccaggatggtcttgatgtcctgacctcgtgatctgcccgcctcggcctcccgaagtgctgggattatataaaggcatgagccaccgcacccggcccaattcatttctgttaagtctcagtttttcttctctgtggagggtaagtttctaactcttcttctctgggtctcccagacatccacaagcgctgggccctcgtgtggctggcctgcctactctttgccgctgcgctttccctcatcctccttctcaaaaaggatcacgcgaa

SEQ ID NO: 12571 - DNA, 807 bp, Homo sapiens
tgaggcctcccccttcccaagtccattcccactgtaggccgatgcctgtgcaaaggacgcagtgccatatcagagaggatccttgaagaggactcaccccaagcaagggaaaattggtgggggaacttctgccttcctggtttccttgactttggcctcctcctcttcctccttatcttctccaacctccttcctttatttgttccacagactggaccgcagatcattaccttgaaccacacagacctggttccctgcctctgtattcaggtgtggcctctggaacctgactccgttaggacgaacatctgccccttcagggaggacccccgcgcacaccagaacctctggcaagccgcccgactgcaactgctgaccctgcagagctggctgctggacgcaccgtgctcgctgcccgcagaagcggcactgtgctggcgggctccgggtggggacccctgccagccactggtcccaccgctttcctgggagaacgtcactgtggacaaggttctcgagttcccattgctgaaaggccaccctaacctctgtgttcaggtgaacagctcggagaagctgcagctgcaggagtgcttgtgggctgagggcagctcgccttggagagtacttactacaagacctgcagtcaggccagtgtctgcagctatgggacgatgacttgggagcgctatgggcctgccccatggacaaatacatccacaagcgctgggccctcgtgtggctggcctgcctactctttgccgctgcgctttccctcatcctccttctcaaaaaggatcacgcgaa

SEQ ID NO: 12572 - DNA, 2136 bp, Homo sapiens
ggccaccagagcttggtgaatattggaacacctggctggtgccctggatttggttctgtttgtatcttacagctatgggacgatgacttgggagcgctatgggcctgccccatggacaaatgtgagtattgtaagaactgcctttcctttctgtaccaggagtggggatcttgacagggaccactcttgggcacagcacatgcaatggccttgtccttccctgagatcagataaacagagggtcattccttcattcactcaaaaaatgatgagagcttgcagggatcgcaggaacaccaaaaatataaatccttgcccccgccccacccctagaagactagcaagacatgagccagtcacttacatttaaagtgggagctactgaagcaccaccaagtgttcagtgctgtaaatgcatacaatgtggacctgacctgggtggggtgaggggtgaggggctcagggggaaggttccagcaaaactctgaagactgagctaggggaagggggtagagatacagggtcttggacaggcaggtttctgtcatgagataaagatgcaggagacatgtaggggatttggatcttatgttgagagcagcaggagctacgatcaaatttttatatatttcacacacacacacacacatatatatatatatatatatatatatatatatacttatttttttatttatttttgaggcagagtctcactctgttgcccaggctggagtgcaatggcgcgatctcggctaactgcaacctctgcctcccgggttcaagcaattctctacctcagcctcccgggtagctgggattaataggcgcctgccaccatgccctgctaatttttgtatttttagtagagatggggtttcaccatcttggccaggctggtcttgaactcctgacctcgtgatccgcccgcgtcggcctcccaaagtgctgggattatagtcgtgagtcaccgcacctggcccaaatttatatttttaaaagatctctgaggctgtcatgaatcaattcaaggcaaatcaattggaggtaaaaaaaaaaaaaaaaagacagggcagggacaccaggtagttgcagacacccaggacagcaagatcaagggcccagcaaccctagcttaggggagaaaaacagctgacattttagcacttaagatgctcggcattgtgttaagtatgtattaacacattgtgttaagctttatatgtattaatatatttagtcctcacaccaaccctatgacacaggtacaactttacagaggagaaaactgaggcagagggtgacattacttattcaaagacccctaaacagatggagctatattcatccactggctctgacactgtgctgtggactctgggcaaatcatttcttcgttttttgttttgttttgttttgttttgagaggagtctcaccctgtcgcccaggctggagtgcaatggcgcgatctcggctcactgcaacctctgcctcccgagttcaagcgattctcttgcctcagcctcccgagtagctgggattacaggcgtgtgccaccacgcccggctaattttttgtatttttagtagagacggggtttcaccgtgttagccaggatggtcttgatgtcctgacctcgtgatctgcccgcctcggcctcccgaagtgctgggattatataaaggcatgagccaccgcacccggcccaattcatttctgttaagtctcagtttttcttctctgtggagggtaagtttctaactcttcttctctgggtctcccagacatccacaagcgctgggccctcgtgtggctggcctgcctactctttgccgctgcgctttccctcatcctccttctcaaaaaggatcacgcgaaaggtgagcgcttcccggctccccattcccctgggggaggaccagagtggctgtgggagttctccgagggaaagcggcggccgagctcactggctgcctccgcccctctcccctaacagggtggctgaggctcttgaaacaggacgtccgctcggggggtgagtgggagcaagcgctgggcggagggccgcccccggggagccaggcctgtgccagctcacctcttccctccccatctgttttctccggcagcggccg

SEQ ID NO: 12573 - DNA, 472 bp, Homo sapiens
ggccaccagagcttggtgaatattggaacacctggctggtgccctggatttggttctgtttgtatcttacagctatgggacgatgacttgggagcgctatgggcctgccccatggacaaatacatccacaagcgctgggccctcgtgtggctggcctgcctactctttgccgctgcgctttccctcatcctccttctcaaaaaggatcacgcgaaaggtgagcgcttcccggctccccattcccctgggggaggaccagagtggctgtgggagttctccgagggaaagcggcggccgagctcactggctgcctccgcccctctcccctaacagggtggctgaggctcttgaaacaggacgtccgctcggggggtgagtgggagcaagcgctgggcggagggccgcccccggggagccaggcctgtgccagctcacctcttccctccccatctgttttctccggcagcggccg

SEQ ID NO: 12574 - DNA, 16496 bp, Homo sapiens
aaaacgaaagcactccgtgctggaagtaggaggagagtcaggactcccaggacagagagtgcacaaactacccagcacagccccctccgccccctctggaggctgaagagggattccagcccctgccacccacagacacgggctgactggggtgtctgccccccttgggggggggcagcacagggcctcaggcctgggtgccacctggcacctagaagatgcctgtgccctggttcttgctgtccttggcactgggccgaagcccagtggtcctttctctggagaggcttgtggggcctcaggacgctacccactgctctccggtgagtctggaaccctggggagacgaggaaaggctcagggttcagtttttggctcagcaaagccttagcctggctcctgtcactgctgccactgccagaactgccctgtctggtctgtctggtgctgatggtagaagagaagaacggggaaggggcaagagctgggtctgtctttctctgggagggtctgggaatacggagccccagaaaaaggtaggtggaggtcttaggcagagaacagtgcctagatggtgggggcacaaattctgactctcctttctttccttcccagggcctctcctgccgcctctggggtaagtatccctacttttaaaaagaatttcccaggttggccgaagggagcagagctgtcccaggcccatgccctccatgcccacctcagcctaggacagccaagttctttggctctctgggtatgtcaggtgccaccaaattctgggcttggaacagcttcagctcccacccgctcctccacacacagacagtgacatactctgcctgcctggggacatcgtgcctgctccgggccccgtgctggcgcctacgcacctgcagacagagctggtgctgaggtgccagaaggagaccgactgtgacctctgtctgcgtgtggctgtccacttggccgtgcatggtgagcaagtcatcctgtgacagtgcatgtgtacacgtgagtgtgtctggggtgggcatgagggccaggggatctctcaagcagtgctaggcatcctcagtgttctcctggaggacaccagcagaaggacccccaggccagtgtggtctccccagcccctgcttcccagcactgggctttccagaaggaagccaacgccaaagccagccagcccagagcagggggcctcacccagggccttgctcttgggtccttctagggcactgggaagagcctgaagatgaggaaaagtttggaggagcagctgactcaggggtggaggagcctaggaatggtgaggagaacctggctggcccaactgccccatgccaaggcctggcctgccgctcctgggcctgactgacccctgccctgttgcccacagcctctctccaggcccaagtcgtgctctccttccaggcctaccctactgcccgctgcgtcctgctggaggtgcaagtgcctgctgcccttgtgcagtttggtcagtctgtggtatgcaaaataataataatcaccttctaaacctaaaatctataaaactttttcacatgcattatctctttgaggattacaaaagaattaaatttattgaaacccttcagtaccaggcattacagccagtgttttacaggtatcaacttatttaattctcacaacagccatgtgaggtgggactattcttttgattctgatcagcgctgtgggcaagtcccttcagcctgttatgcctcagcttttatgtctgtaaaatggggatgagaatagttctacttcatatgcttgactgcgagaaatcaccaagcgtttttcagggtgcttctactattttcccctcctaccagcagtgtatgggagtcctagttgcttcccatctttgccaacacttgatggtgtaattttattttatttttaaattaaatatatttgaattttaaatatatgggaccctccatgaatttgcatgtcatcctcaggcacgggccttgctaatcttttctgtattgttccagttgtagtatatgtggtgccaaaacaagcataagtgttgtaattgtcataatttttctgcatatgtagtggtttgccattgtggttttaatttgtatcttccaatgactgatgaagttgagcacttttttcacatgcttattggctatttgtgtaacttccttgtgaaatatctcttaaagtttttttgtttttgtttttgtttttgtttttgccacataaaaaaacaatagttctggccgggcacagtggttcacacctgtaatcccagcactttgggaggctgaggcgggcagatcacgaagtcaggagattgagaccatcctggctaacactgtgaaaccctgcctccactaaaaaaatacaaaaaattagccaggcatggtggtgggcgcctgtagacccagctactcgggaggcagaggcaggagaatggcgtgaacccgggaggtggagcttgcagtgagccgagatcgcgccactgcactccagcctgggcgacagagcgagattccgtctcaaaaaaaaagaatagtcccacctcacatgactgttgtgagaattaaattaagttggtacctgtaaaacactggatgtaatgcctggcactgaataatttcaataaatttaattcttttgtaatcctcaaaactacctgatgaggcattattagtatcctcattttccagatagataaaatgaggcttggagaggggaggtctgtgggctggatgcacttctctgtactcttggaccaaagaaagagtcctaccatacataccatggtatacttaccatggtgtaagtaccatggtgcagggtgttggggcttctccctgccttaggaggccacatgtacctggaaggtctatttccactggggtcaaatcactcaaaccctttgactttccctccaacctccagcccccagccaatatcctatctggagaattgtagactgggagaacatctgcttggtccatgtcacaagcagttgtaaggaacactgaggcactgggttgagtgtgagaaccacttctgtggggaggggtgtgccatattgtgttggggtgtctcatctccttagctttggccaggtgatctagcacagcagggtgggtgcagggatttaaatgtctagggccttttcccgccctggtgacactcttactgaggacatttgctttagaattgaggccccttgaaagaaaggtgaatagtagatttcaggctatacagtataaatacagtcattagttgggggaggagggcagtgagcagagtggtccctgcagatgatcccacagcccttggcctggattctgagccctgcaccgccagccttcctcacccctctcctcacagggctctgtggtatatgactgcttcgaggctgccctagggagtgaggtacgaatctggtcctatactcagcccaggtacgagaaggaactcaaccacacacagcagctgcctggtaagtggacccccaagtcctggccccctagcctctgtcccctctggccattccccctcctgatttcaccctcttctagctccatccactctccggcaggggtctgagctgctatcctccccagagtcagtccctcggaccttctctctctgggtgatatggctttccagcccctggggaaggttctttgagcattggatagatgtgggtggtatgtaggggatggggagccattcctaatgcccccctgggagccaaattgcccccacttctttccttggcccccagccccactggaggctcttctgtgatctctcctcagactgcagggggctcgaagtctggaacagcatcccgagctgctggggtaggggctagggccagtgggccgggggtagggaggggcagggtctggagtataagaaacccttggagtccacttcagatatgggctaccacatctcagaagctcacagaacatattcattcattcattcattcattcatttgttcataacacattaattgcagtatctgtgctaagcactggaaatagaaagatgaatcttgggtcaggctcagtggctcatgcctgtaatcccagaactttgggaggccgaggtagaaggatcacttgagctcaaaagttcaagacgagcctgggcaacatggcaaatccccgtctctaccaaaaatacaaaaattaacaggacatggtggtgtgcatttgtggtcccagctactcaggaggctgaggcaggagaatcacttgagcctgggaggcaggggctacagtaagctgagactgcaccattgcacaccagcctgggtgacagagcaagactccgtctcaaaaaacaaaacaaaacaaaacaaaaacaaaaaacttgaaataaaagctaagaaagtcaagggtctaacttttttcccacgtactatttggattttgttttcgttttgtattttcttttttattgtgtataacatacatacataaaagtatgtaaagggtactgattttcttttttttttttttttttgagacagagtctcgctctgtcgctcaggctggagtgcagtggtgcaatctcggctcactgcaagctccgcctcccaggttcacgccattctcctgcctcagcctcccgagtagctgggactacaggcacccgccaccacgcctggctaatttttttttttttttagtagagacagggtttcaccgtgttagccaggatggtcttgatctcctgaccttgtgatccgcctgcctcagcctcccaaagtgctgggattacaggcgtgagccaccacgcccagccaaagggtactgatttccatgtccagttcttttttttttttttttttttggcggaatcttgctctgtcgcctaggctggactgcagtggtgtgatctcagctcactgcaacctctgccttctgggttcaagcgattctcctgcctcagcctcccaagcagctgggattacagacgtgcaccaccacgcacagctaatttttgtatttttagtagacatggagtttcaccatgctggccaggctggtcttgaactcctgacctcgtgatcctcccacctcggcctcccaaagtgctgggattacaggcatgagccgccacgtccggccaatttgtttttatatatgtatacacttgcataactagcacccagatcaatacataaatactgtgaatacatcacatactgtgatgttttctgaactactaaatgttttcaacttcattttctttttgccttcttaaaattaaagttggcctgcctctttggcaactcattaaagactattcaacaccagagttttgaaaacacagatgtgtatatcatggatttcatttcttccttcattaagtagacattgattcatttattcaacagatatttattaatttctgtgtaccaggcaaatccctggacactggaaatattaataaatcaataaatgaagatgacaaaaaacccgaccccacggagctggtgtcagggtcagggtgggggtgaggaaggacacaacaaacacatggagatgtgaagaatgcagtaagttagacagtgattagcactaaggagaacatttgtggaagggctggggaaggttgggagttgtagaggtcagggatggtctcattctggtgagcagagacctgaaagaggtgagggaggagccatatatttgagggaagagagaatagccagcaaaaagggcctggggtgggagtatgtcaggggtgtttaagaaatagtaaggagggggccgggcgcggtggctcacgcctgtaatcccagcactttgggaggccgaggctggcggatcacgaggtcaggagatcgagaccatcctggctaacacggtgaaaccccatctctacaaaaaatacaaaaaaatcagctgggcatggtggcaggcgcctgtagtcccagctactcgggagcctgaggcaggagaatggcttgaaccccaggaggcagagcttgcagtgagccgagatcacaccactgcactccagcctgggcgacagagccagactccatctcaaaaaaaaaaaaaggaaaaaaaaaagagagagaaacagtaaggaggtccttaataactctgcagcagagttattaaggacacaaatgccataggctgtgcgcgatggctcacgtctgcaatcccagcactttggggaagctgaggcaggaggattgcttgaggttaggagctcaagaccagcctggccaacatgagcgaaatcccatctctactaaaaatacaaaaactagccgggggtggtgacacacgcctgtaatcccagctactcgggtggctgaggcaagagaatcgcttgaacccaggaggtggaggttgcagtgagctatcgtgccaatgcactccagcctgggcaacagagcaagactccctctcaaaaaaaaaaaaggacacaagtatcaagaggtaaggtcagaaaggtcacagttctgaacagaggaaaatgacttgttttaaagaggttacaagatctttctgcagagggagaagcagggagaatagctcttctccgaccacacactagggtctccacgggcttggctttgggcagctgctaggagcaaagtctggtctgaaatgatgacacacgctctgccctccgagagcctcccagtctagggggtttgaaggaaactccaaagggtcagtcggggatgcagaagaggtgaggaagtctaagctgcgctctctttgcctctcccaccagccctgccctggctcaacgtgtcagcagatggtgacaacgtgcatctggttctgaatgtctctgaggagcagcacttcggcctctccctgtactggaatcaggtccagggccccccaaaaccccggtggcacaaaaacctggtgaggcctcccccttcccaagtccattcccactgtaggccgatgcctgtgcaaaggacgcagtgccatatcagagaggatccttgaagaggactcaccccaagcaagggaaaattggtgggggaacttctgccttcctggtttccttgactttggcctcctcctcttcctccttatcttctccaacctccttcctttatttgttccacagactggaccgcagatcattaccttgaaccacacagacctggttccctgcctctgtattcaggtaggagcagagtctagctgggtgccagaagaggagtgggaagatgatgatgggggtgatccctgccttcctggtctcaccattcttcaaacccttcattgaggtggagactgtggctccctggggtggctggccctcccttgacccttgctgtcctatgccttctgtctattacattccctgaatgctctccctgatcctccacagaactcctgcttattcttcatggccccattcaaatgtcaccttctccttgaaacctttccctactcctccagttctgtctttgtgttcccctggcgggcagagcatgtgctacgaacttggactggtttgaatcttggctcttgccatttgctagctgtgtaaccttgggcaagtcacttcacctctgtgagcctgtttctcatctgtaaaatgggaataataatagtaacagcctcatggggctgttataagaatgtgtgccacacccaggcttaaatatgctggctctttcctcttcctctgtacatttatttatttttttagacaaggtctcactctgttgcccaggctggagtgcagtggcacaatcatggcacactgcagcctcagccccatgggctcaagtgatcctcctgtctcagcctcccaagtagctggaactactggtgagcactaccatactcagctagtttttttttgttttgtgtagagacggggtcttgctatgttacccaggctgttctgaattcctgggcttatgctatcctcccacctcagcctcccaccaagtgctgggattataagcatgagccactgtggcttgccctgattgcactttttttttttttttttttaagacagagtctttctctgtcgcccaggctggagcaccgtggcgtgatctcggctcactgcaagctgcttctcctgggttcacgccattctcctgcctcagcctcgctgagtagctgggactacaggtgcctgcaaccacgcccagctaattttttgtattttcagtaaagacagggtttcaccgtgttagccaggatggtctcgatctcctgaccttatgatccacaagcctcgtcctcccaaagtgctgggattacaggcatgacccactgtgcccagccgctgattgcacatttaattggtcatcaggtctcatccatcttacctctgacattaatgtctctcattttctttccccctcctctccatctcagtccagcttagggctctatcatctgttttctagactgtttcaacacctccaagctcccctcccttcccatcactttcctggcattctgggcccatattctgcccccaacggtgccttttcactctattttccccatgattccccttcatgagaacattgttacatccagtggagctacttaccaagatacagctagctccctgccttttctcaggtggttcccattacctcaaatgccctcacctccttcccaaagcttttccccaaccacccggcctctcctagctccaaatccccttgcacttctatctttccttgtccatttatcacttcatttcttttattttcttaaattttttttttttttttagagacagcattttgctctgtcacccatggtagagtgcagtggcatgaacacgtctcattgcagccccaagctcccaggttcaagggatcctcctgcctcagcctctgcagctgggactgcaggcatgcgccaccatgcctggctaattgtttccttttttttttttttttttttttaatggagtttcactcttttgcccaggatggagtgcagtggcgtgatctcggctcactgcaacttccgcctcccaggttcaagccattctcctgcctcagcctcccaagtagctgagattacaggcacacaccaccatgcccagctaatttttgtatttttagtagagacagggtttcaccatgttggtcaggctggtcccaaattcctgacctcgtgatccacccgcctcggccgcccaaagtgctgggattacaggcgtgagccactgtgcccagcctgttttcattttttaatgttttgtggcgatgggccaccacacccagctcaatcacttactttcttatttgggcatctaatttcttcttgtacacaacagatgctcaataaatattatgaaatgaatgagtgttttactaatttatataaatattttatccttactacaagtgtgagtttgtgatttccttgaaggcaagcaaatcatatctaattcaaatgtaatagctttgcaagagccttgcacatagcgcctacttgttttttgtttttttgtgtttttgttttttttttgtttttttgtcttttttgagacagagtctcgctctattggcaggctggagtacagtggcgtgatctcggctcactgcaatctctgcctcctggattcaagcaattcttctgcctcagcctcccaagtagctgggactacaagtgcatgccaccatgcccggctaatttttgtattttcagtagagacggggtttcagcatgttggccagatggtctcgatctcttgacctcgtgatccgcccaccttggcctcccaaagtgctgggattacaggggtgagccaccgcgcccagccttgttttgtttttaaacaaggtaacagtatgaggtcctcactgttgaatgagtgaataaatgttactgcctaacacagccataggacacagcagatgttcatgagatgtatgctgtgatttaaatggcttcattgccaaacacagtgcctgccacatagtcggtgttcctaactaaaggcttgatggataaattaatgtattacctctagtgcttagcatagagctatgcacataataggcactcttgaaatgtctgttgaaagaataaatgaatgtgtccttagaacttagcacattccccaacacatagcaggtgcttacacaagtgattgtggaatgaattaaaattaattatccaccaggcacagtggctcacacctgtaatcccagcactttgggaggccaaggtgggtggatcacgaggtcaggagtttgagaccagcctggcctaacatagtgaaacccagtctctactaaaagtacaaaaattagccaggcatggtgatgtgcgcctgtagtccctgctacttgggaagctgaggcaggagaatcacttgaacccaggaggcggaggttgtggtgagctgagatcacaccactgcactccagcctgggcaacagagtgagattccatctcaaaaaataaaaaaataataaaaatttaattatccaaggtctcttgtgcttgccatactgctaagacacaatggtaggcactcattaaaagtctgttgaatgggccaggcgcggtggctcacgcttgtaatcccaacactttgggaggctgagacgggtggatcacttgaggtcaggagttcgagaccagcctgatcaatgtggtgaaaccccatctctactaaaaatacaaaaattaaccagttagccggccgttgtggcatgttcctgtaatcgcagctcctcaggagactgagatgggagaatcgcttgaacctgggaggtggaggttgtagtgagccaagattgcaccactgcactccagcctgggcgacagagcgagactctatctcaaaaaaaaaaaaaagtttgttaatgaagatgttgccagtgcccagcattatgtttgctggaagaatagatgtgagcacctccaggttttgtaaaaggcaggaagacccagcaagtgtttgtgaaatacctgctgaatgagtgcatccccactgtccagcagagggccaggcacatgcccatggaggggacctgagcagacccccatttcctttccaggtgtggcctctggaacctgactccgttaggacgaacatctgccccttcagggagggtgagccgaccggcctggggctggggttggggtgttgcgagcgatgggtacctggcctgcggtgactgtgccctttccttgcagacccccgcgcacaccagaacctctggcaagccgcccgactgcaactgctgaccctgcagagctggctgctggacgcaccgtgctcgctgcccgcagaagcggcactgtgctggcgggctccgggtggggacccctgccagccactggtcccaccgctttcctgggagaacgtcactgtggacgtaagtgaagcagagggcacctcccgtggtgaggggagagtggggaaccgggggtccccttttgtgatcccacccattcctctctttccacagaaggttctcgagttcccattgctgaaaggccaccctaacctctgtgttcaggtcagaaaggggtgcatagtgctgggctggaggctggacctgggcagaccccccagccaagggggtcttagttcttgggccgctaaagcatagtggttgccagcttcctctatgggagttccactgcctactttagtagtgcgcgggaccctgggcaactcacttcacctctctgaacgtcagtttcctcatctgtttaatgcagatgataatacagtaactacctcatggagtggttgtgacaatgaaataagagaagtgcttccccttaggaatcggtacagactaaatgctccataaatgtagccacttttattattgctatccttattctatttccatacctgtagaatgggttgctctacagtttcaaagggtgattataagaacattcactcatccggccaggcgcggtggctcacgcctgtaatcccagcactttgggaggccgaggcgggcagatcacgaggtcaggacatcaagaccatcctggctaacatggtgaaaccccatctctactaaaaatacaaaaaattagccggtcgtggtggtgggcacctgtagtcccagctactaggaaggctggggcaggagaatggcgtgaacctgggaggctgagcttgcagtgagctgagagggcgccactgcactccagcctgggtgacagagtgagactgggcgacagagtgaaactccgtctcaaaaaaaaaaaaaattcactcattcaagattttttgagcagcacaagtcactgttttaggcacttgtgatagaccctaacatctctaccctcatagaacttatattgtaatggagaaaggcaggcaacagacattgtaaataaatcatatagtatcttaaaattgcatacaaataccatgggaaagggataaggtgggactggggttgcaatttttagcagggtggtcatgtgagaaaggaatctctttgagaaggttagatgagaggggaaccatgctccgtaagacataaaaacagctttagggtcagaagacgctttatacagatgatctcacaaggctggggcagagaaagatgtagtgattcctaatcacccagccttgaatccacatctgcctcaggtcagattgagtgcagattcccaacccaacaggccttctgttgcctgccccattctggtctttctgcctttggcttttgcttttcttagtggccctaaccatggtctcttcccagcaggtgaacagctcggagaagctgcagctgcaggagtgcttgtgggctggtgagttgggcctgggggcagctggggcagggccacctcctaggggtgaaggtcagggcatgggaggcaggcaagtggccaatcccagcaaggatgggtcttggtcagagtggcctctcaccccttccagactccctggggcctctcaaagacgatgtgctactgttggagacacgaggcccccaggacaacagatccctctgtgccttggaacccagtggctgtacttcactacccagcaaagcctccacggttaggactgggcgaccctcctccacagatctctccaaatgcatctcacatctggcctcaaattttcactccatccaccctgtgccggtctctgggaacatggggggtgactcagaccagggccatattcagcggcatcaccaaagtctcccagtcccctctacctcattctacccagctgtagcctggtaggtgctgccctaagggtgctacctccaggtaacagtgcccccatcctttggcttggcagagggcagctcgccttggagagtacttactacaagacctgcagtcaggccagtgtctgcaggtgagctggtggaagaagggccccacctcaatgcctaggggcaacaggcctaaaactagcactcacctactgtctatttaggcttattttatgttcagccctgggaaagttaagagtagaagaagcacagttcctatccccaaggagcacactgttggctagacacccataaacagataaccacacctacaggtgctaagttttgggttccagggagagcttccgggaagaatttcttcctataagccagatttggtatggaagaagtcataccctagtcagtgggcacagcacaaaggcagagcagctgcaggaaccttagccgggagatatgcatagttgatgctgggaatttggagatcaggccaccagagcttggtgaatattggaacacctggctggtgccctggatttggttctgtttgtatcttacagctatgggacgatgacttgggagcgctatgggcctgccccatggacaaatgtgagtattgtaagaactgcctttcctttctgtaccaggagtggggatcttgacagggaccactcttgggcacagcacatgcaatggccttgtccttccctgagatcagataaacagagggtcattccttcattcactcaaaaaatgatgagagcttgcagggatcgcaggaacaccaaaaatataaatccttgcccccgccccacccctagaagactagcaagacatgagccagtcacttacatttaaagtgggagctactgaagcaccaccaagtgttcagtgctgtaaatgcatacaatgtggacctgacctgggtggggtgaggggtgaggggctcagggggaaggttccagcaaaactctgaagactgagctaggggaagggggtagagatacagggtcttggacaggcaggtttctgtcatgagataaagatgcaggagacatgtaggggatttggatcttatgttgagagcagcaggagctacgatcaaatttttatatatttcacacacacacacacacatatatatatatatatatatatatatatatatacttatttttttatttatttttgaggcagagtctcactctgttgcccaggctggagtgcaatggcgcgatctcggctaactgcaacctctgcctcccgggttcaagcaattctctacctcagcctcccgggtagctgggattaataggcgcctgccaccatgccctgctaatttttgtatttttagtagagatggggtttcaccatcttggccaggctggtcttgaactcctgacctcgtgatccgcccgcgtcggcctcccaaagtgctgggattatagtcgtgagtcaccgcacctggcccaaatttatatttttaaaagatctctgaggctgtcatgaatcaattcaaggcaaatcaattggaggtaaaaaaaaaaaaaaaaagacagggcagggacaccaggtagttgcagacacccaggacagcaagatcaagggcccagcaaccctagcttaggggagaaaaacagctgacattttagcacttaagatgctcggcattgtgttaagtatgtattaacacattgtgttaagctttatatgtattaatatatttagtcctcacaccaaccctatgacacaggtacaactttacagaggagaaaactgaggcagagggtgacattacttattcaaagacccctaaacagatggagctatattcatccactggctctgacactgtgctgtggactctgggcaaatcatttcttcgttttttgttttgttttgttttgttttgagaggagtctcaccctgtcgcccaggctggagtgcaatggcgcgatctcggctcactgcaacctctgcctcccgagttcaagcgattctcttgcctcagcctcccgagtagctgggattacaggcgtgtgccaccacgcccggctaattttttgtatttttagtagagacggggtttcaccgtgttagccaggatggtcttgatgtcctgacctcgtgatctgcccgcctcggcctcccgaagtgctgggattatataaaggcatgagccaccgcacccggcccaattcatttctgttaagtctcagtttttcttctctgtggagggtaagtttctaactcttcttctctgggtctcccagacatccacaagcgctgggccctcgtgtggctggcctgcctactctttgccgctgcgctttccctcatcctccttctcaaaaaggatcacgcgaaaggtgagcgcttcccggctccccattcccctgggggaggaccagagtggctgtgggagttctccgagggaaagcggcggccgagctcactggctgcctccgcccctctcccctaacagggtggctgaggctcttgaaacaggacgtccgctcggggggtgagtgggagcaagcgctgggcggagggccgcccccggggagccaggcctgtgccagctcacctcttccctccccatctgttttctccggcagcggccgccaggggccgcgcggctctgctcctctactcagccgatgactcgggtttcgagcgcctggtgggcgccctggcgtcggccctgtgccagctgccgctgcgcgtggccgtagacctgtggagccgtcgtgaactgagcgcgcaggggcccgtggcttggtttcacgcgcagcggcgccagaccctgcaggagggcggcgtggtggtcttgctcttctctcccggtgcggtggcgctgtgcagcgagtggctacaggatggggtgtccgggcccggggcgcacggcccgcacgacgccttccgcgcctcgctcagctgcgtgctgcccgacttcttgcagggccgggcgcccggcagctacgtgggggcctgcttcgacaggctgctccacccggacgccgtacccgcccttttccgcaccgtgcccgtcttcacactgccctcccaactgccagacttcctgggggccctgcagcagcctcgcgccccgcgttccgggcggctccaagagagagcggagcaagtgtcccgggcccttcagccagccctggatagctacttccatcccccggggactcccgcgccgggacgcggggtgggaccaggcgcgggacctggggcgggggacgggacttaa

SEQ ID NO: 12575 - DNA, 2547 bp, Homo sapiens
aaaacgaaagcactccgtgctggaagtaggaggagagtcaggactcccaggacagagagtgcacaaactacccagcacagccccctccgccccctctggaggctgaagagggattccagcccctgccacccacagacacgggctgactggggtgtctgccccccttgggggggggcagcacagggcctcaggcctgggtgccacctggcacctagaagatgcctgtgccctggttcttgctgtccttggcactgggccgaagcccagtggtcctttctctggagaggcttgtggggcctcaggacgctacccactgctctccgggcctctcctgccgcctctgggacagtgacatactctgcctgcctggggacatcgtgcctgctccgggccccgtgctggcgcctacgcacctgcagacagagctggtgctgaggtgccagaaggagaccgactgtgacctctgtctgcgtgtggctgtccacttggccgtgcatgggcactgggaagagcctgaagatgaggaaaagtttggaggagcagctgactcaggggtggaggagcctaggaatgcctctctccaggcccaagtcgtgctctccttccaggcctaccctactgcccgctgcgtcctgctggaggtgcaagtgcctgctgcccttgtgcagtttggtcagtctgtgggctctgtggtatatgactgcttcgaggctgccctagggagtgaggtacgaatctggtcctatactcagcccaggtacgagaaggaactcaaccacacacagcagctgcctgccctgccctggctcaacgtgtcagcagatggtgacaacgtgcatctggttctgaatgtctctgaggagcagcacttcggcctctccctgtactggaatcaggtccagggccccccaaaaccccggtggcacaaaaacctggtgaggcctcccccttcccaagtccattcccactgtaggccgatgcctgtgcaaaggacgcagtgccatatcagagaggatccttgaagaggactcaccccaagcaagggaaaattggtgggggaacttctgccttcctggtttccttgactttggcctcctcctcttcctccttatcttctccaacctccttcctttatttgttccacagactggaccgcagatcattaccttgaaccacacagacctggttccctgcctctgtattcaggtgtggcctctggaacctgactccgttaggacgaacatctgccccttcagggaggacccccgcgcacaccagaacctctggcaagccgcccgactgcaactgctgaccctgcagagctggctgctggacgcaccgtgctcgctgcccgcagaagcggcactgtgctggcgggctccgggtggggacccctgccagccactggtcccaccgctttcctgggagaacgtcactgtggacaaggttctcgagttcccattgctgaaaggccaccctaacctctgtgttcaggtgaacagctcggagaagctgcagctgcaggagtgcttgtgggctgactccctggggcctctcaaagacgatgtgctactgttggagacacgaggcccccaggacaacagatccctctgtgccttggaacccagtggctgtacttcactacccagcaaagcctccacgagggcagctcgccttggagagtacttactacaagacctgcagtcaggccagtgtctgcagctatgggacgatgacttgggagcgctatgggcctgccccatggacaaatacatccacaagcgctgggccctcgtgtggctggcctgcctactctttgccgctgcgctttccctcatcctccttctcaaaaaggatcacgcgaaagggtggctgaggctcttgaaacaggacgtccgctcgggggcggccgccaggggccgcgcggctctgctcctctactcagccgatgactcgggtttcgagcgcctggtgggcgccctggcgtcggccctgtgccagctgccgctgcgcgtggccgtagacctgtggagccgtcgtgaactgagcgcgcaggggcccgtggcttggtttcacgcgcagcggcgccagaccctgcaggagggcggcgtggtggtcttgctcttctctcccggtgcggtggcgctgtgcagcgagtggctacaggatggggtgtccgggcccggggcgcacggcccgcacgacgccttccgcgcctcgctcagctgcgtgctgcccgacttcttgcagggccgggcgcccggcagctacgtgggggcctgcttcgacaggctgctccacccggacgccgtacccgcccttttccgcaccgtgcccgtcttcacactgccctcccaactgccagacttcctgggggccctgcagcagcctcgcgccccgcgttccgggcggctccaagagagagcggagcaagtgtcccgggcccttcagccagccctggatagctacttccatcccccggggactcccgcgccgggacgcggggtgggaccaggcgcgggacctggggcgggggacgggacttaa

SEQ ID NO: 12576 - DNA, 2122 bp, Homo sapiens
aagcacagttcctatccccaaggagcacactgttggctagacacccataaacagataaccacacctacaggtgctaagttttgggttccagggagagcttccgggaagaatttcttcctataagccagatttggtatggaagaagtcataccctagtcagtgggcacagcacaaaggcagagcagctgcaggaaccttagccgggagatatgcatagttgatgctgggaatttggagatcaggccaccagagcttggtgaatattggaacacctggctggtgccctggatttggttctgtttgtatcttacagctatgggacgatgacttgggagcgctatgggcctgccccatggacaaatgtgagtattgtaagaactgcctttcctttctgtaccaggagtggggatcttgacagggaccactcttgggcacagcacatgcaatggccttgtccttccctgagatcagataaacagagggtcattccttcattcactcaaaaaatgatgagagcttgcagggatcgcaggaacaccaaaaatataaatccttgcccccgccccacccctagaagactagcaagacatgagccagtcacttacatttaaagtgggagctactgaagcaccaccaagtgttcagtgctgtaaatgcatacaatgtggacctgacctgggtggggtgaggggtgaggggctcagggggaaggttccagcaaaactctgaagactgagctaggggaagggggtagagatacagggtcttggacaggcaggtttctgtcatgagataaagatgcaggagacatgtaggggatttggatcttatgttgagagcagcaggagctacgatcaaatttttatatatttcacacacacacacacacatatatatatatatatatatatatatatatatacttatttttttatttatttttgaggcagagtctcactctgttgcccaggctggagtgcaatggcgcgatctcggctaactgcaacctctgcctcccgggttcaagcaattctctacctcagcctcccgggtagctgggattaataggcgcctgccaccatgccctgctaatttttgtatttttagtagagatggggtttcaccatcttggccaggctggtcttgaactcctgacctcgtgatccgcccgcgtcggcctcccaaagtgctgggattatagtcgtgagtcaccgcacctggcccaaatttatatttttaaaagatctctgaggctgtcatgaatcaattcaaggcaaatcaattggaggtaaaaaaaaaaaaaaaaagacagggcagggacaccaggtagttgcagacacccaggacagcaagatcaagggcccagcaaccctagcttaggggagaaaaacagctgacattttagcacttaagatgctcggcattgtgttaagtatgtattaacacattgtgttaagctttatatgtattaatatatttagtcctcacaccaaccctatgacacaggtacaactttacagaggagaaaactgaggcagagggtgacattacttattcaaagacccctaaacagatggagctatattcatccactggctctgacactgtgctgtggactctgggcaaatcatttcttcgttttttgttttgttttgttttgttttgagaggagtctcaccctgtcgcccaggctggagtgcaatggcgcgatctcggctcactgcaacctctgcctcccgagttcaagcgattctcttgcctcagcctcccgagtagctgggattacaggcgtgtgccaccacgcccggctaattttttgtatttttagtagagacggggtttcaccgtgttagccaggatggtcttgatgtcctgacctcgtgatctgcccgcctcggcctcccgaagtgctgggattatataaaggcatgagccaccgcacccggcccaattcatttctgttaagtctcagtttttcttctctgtggagggtaagtttctaactcttcttctctgggtctcccagacatccacaagcgctgggccctcgtgtggctggcctgcctactctttgccgctgcgctttccctcatcctccttctcaaaaaggatcacgcgaaag

SEQ ID NO: 12577 - DNA, 458 bp, Homo sapiens
aagcacagttcctatccccaaggagcacactgttggctagacacccataaacagataaccacacctacaggtgctaagttttgggttccagggagagcttccgggaagaatttcttcctataagccagatttggtatggaagaagtcataccctagtcagtgggcacagcacaaaggcagagcagctgcaggaaccttagccgggagatatgcatagttgatgctgggaatttggagatcaggccaccagagcttggtgaatattggaacacctggctggtgccctggatttggttctgtttgtatcttacagctatgggacgatgacttgggagcgctatgggcctgccccatggacaaatacatccacaagcgctgggccctcgtgtggctggcctgcctactctttgccgctgcgctttccctcatcctccttctcaaaaaggatcacgcgaaag

SEQ ID NO: 12578 - DNA, 868 bp, Homo sapiens
aaaacgaaagcactccgtgctggaagtaggaggagagtcaggactcccaggacagagagtgcacaaactacccagcacagccccctccgccccctctggaggctgaagagggattccagcccctgccacccacagacacgggctgactggggtgtctgccccccttgggggggggcagcacagggcctcaggcctgggtgccacctggcacctagaagatgcctgtgccctggttcttgctgtccttggcactgggccgaagcccagtggtcctttctctggagaggcttgtggggcctcaggacgctacccactgctctccggtgagtctggaaccctggggagacgaggaaaggctcagggttcagtttttggctcagcaaagccttagcctggctcctgtcactgctgccactgccagaactgccctgtctggtctgtctggtgctgatggtagaagagaagaacggggaaggggcaagagctgggtctgtctttctctgggagggtctgggaatacggagccccagaaaaaggtaggtggaggtcttaggcagagaacagtgcctagatggtgggggcacaaattctgactctcctttctttccttcccagggcctctcctgccgcctctggggtaagtatccctacttttaaaaagaatttcccaggttggccgaagggagcagagctgtcccaggcccatgccctccatgcccacctcagcctaggacagccaagttctttggctctctgggtatgtcaggtgccaccaaattctgggcttggaacagcttcagctcccacccgctcctccacacacagacagtgacatactctgcctgcctggggacatcgtgcctgctcc

SEQ ID NO: 12579 - DNA, 576 bp, Homo sapiens
aaaacgaaagcactccgtgctggaagtaggaggagagtcaggactcccaggacagagagtgcacaaactacccagcacagccccctccgccccctctggaggctgaagagggattccagcccctgccacccacagacacgggctgactggggtgtctgccccccttgggggggggcagcacagggcctcaggcctgggtgccacctggcacctagaagatgcctgtgccctggttcttgctgtccttggcactgggccgaagcccagtggtcctttctctggagaggcttgtggggcctcaggacgctacccactgctctccgggcctctcctgccgcctctggggtaagtatccctacttttaaaaagaatttcccaggttggccgaagggagcagagctgtcccaggcccatgccctccatgcccacctcagcctaggacagccaagttctttggctctctgggtatgtcaggtgccaccaaattctgggcttggaacagcttcagctcccacccgctcctccacacacagacagtgacatactctgcctgcctggggacatcgtgcctgctcc

SEQ ID NO: 12580 - DNA, 6921 bp, Homo sapiens
aggaggagagtcaggactcccaggacagagagtgcacaaactacccagcacagccccctccgccccctctggaggctgaagagggattccagcccctgccacccacagacacgggctgactggggtgtctgccccccttgggggggggcagcacagggcctcaggcctgggtgccacctggcacctagaagatgcctgtgccctggttcttgctgtccttggcactgggccgaagcccagtggtcctttctctggagaggcttgtggggcctcaggacgctacccactgctctccggtgagtctggaaccctggggagacgaggaaaggctcagggttcagtttttggctcagcaaagccttagcctggctcctgtcactgctgccactgccagaactgccctgtctggtctgtctggtgctgatggtagaagagaagaacggggaaggggcaagagctgggtctgtctttctctgggagggtctgggaatacggagccccagaaaaaggtaggtggaggtcttaggcagagaacagtgcctagatggtgggggcacaaattctgactctcctttctttccttcccagggcctctcctgccgcctctggggtaagtatccctacttttaaaaagaatttcccaggttggccgaagggagcagagctgtcccaggcccatgccctccatgcccacctcagcctaggacagccaagttctttggctctctgggtatgtcaggtgccaccaaattctgggcttggaacagcttcagctcccacccgctcctccacacacagacagtgacatactctgcctgcctggggacatcgtgcctgctccgggccccgtgctggcgcctacgcacctgcagacagagctggtgctgaggtgccagaaggagaccgactgtgacctctgtctgcgtgtggctgtccacttggccgtgcatggtgagcaagtcatcctgtgacagtgcatgtgtacacgtgagtgtgtctggggtgggcatgagggccaggggatctctcaagcagtgctaggcatcctcagtgttctcctggaggacaccagcagaaggacccccaggccagtgtggtctccccagcccctgcttcccagcactgggctttccagaaggaagccaacgccaaagccagccagcccagagcagggggcctcacccagggccttgctcttgggtccttctagggcactgggaagagcctgaagatgaggaaaagtttggaggagcagctgactcaggggtggaggagcctaggaatggtgaggagaacctggctggcccaactgccccatgccaaggcctggcctgccgctcctgggcctgactgacccctgccctgttgcccacagcctctctccaggcccaagtcgtgctctccttccaggcctaccctactgcccgctgcgtcctgctggaggtgcaagtgcctgctgcccttgtgcagtttggtcagtctgtggtatgcaaaataataataatcaccttctaaacctaaaatctataaaactttttcacatgcattatctctttgaggattacaaaagaattaaatttattgaaacccttcagtaccaggcattacagccagtgttttacaggtatcaacttatttaattctcacaacagccatgtgaggtgggactattcttttgattctgatcagcgctgtgggcaagtcccttcagcctgttatgcctcagcttttatgtctgtaaaatggggatgagaatagttctacttcatatgcttgactgcgagaaatcaccaagcgtttttcagggtgcttctactattttcccctcctaccagcagtgtatgggagtcctagttgcttcccatctttgccaacacttgatggtgtaattttattttatttttaaattaaatatatttgaattttaaatatatgggaccctccatgaatttgcatgtcatcctcaggcacgggccttgctaatcttttctgtattgttccagttgtagtatatgtggtgccaaaacaagcataagtgttgtaattgtcataatttttctgcatatgtagtggtttgccattgtggttttaatttgtatcttccaatgactgatgaagttgagcacttttttcacatgcttattggctatttgtgtaacttccttgtgaaatatctcttaaagtttttttgtttttgtttttgtttttgtttttgccacataaaaaaacaatagttctggccgggcacagtggttcacacctgtaatcccagcactttgggaggctgaggcgggcagatcacgaagtcaggagattgagaccatcctggctaacactgtgaaaccctgcctccactaaaaaaatacaaaaaattagccaggcatggtggtgggcgcctgtagacccagctactcgggaggcagaggcaggagaatggcgtgaacccgggaggtggagcttgcagtgagccgagatcgcgccactgcactccagcctgggcgacagagcgagattccgtctcaaaaaaaaagaatagtcccacctcacatgactgttgtgagaattaaattaagttggtacctgtaaaacactggatgtaatgcctggcactgaataatttcaataaatttaattcttttgtaatcctcaaaactacctgatgaggcattattagtatcctcattttccagatagataaaatgaggcttggagaggggaggtctgtgggctggatgcacttctctgtactcttggaccaaagaaagagtcctaccatacataccatggtatacttaccatggtgtaagtaccatggtgcagggtgttggggcttctccctgccttaggaggccacatgtacctggaaggtctatttccactggggtcaaatcactcaaaccctttgactttccctccaacctccagcccccagccaatatcctatctggagaattgtagactgggagaacatctgcttggtccatgtcacaagcagttgtaaggaacactgaggcactgggttgagtgtgagaaccacttctgtggggaggggtgtgccatattgtgttggggtgtctcatctccttagctttggccaggtgatctagcacagcagggtgggtgcagggatttaaatgtctagggccttttcccgccctggtgacactcttactgaggacatttgctttagaattgaggccccttgaaagaaaggtgaatagtagatttcaggctatacagtataaatacagtcattagttgggggaggagggcagtgagcagagtggtccctgcagatgatcccacagcccttggcctggattctgagccctgcaccgccagccttcctcacccctctcctcacagggctctgtggtatatgactgcttcgaggctgccctagggagtgaggtacgaatctggtcctatactcagcccaggtacgagaaggaactcaaccacacacagcagctgcctggtaagtggacccccaagtcctggccccctagcctctgtcccctctggccattccccctcctgatttcaccctcttctagctccatccactctccggcaggggtctgagctgctatcctccccagagtcagtccctcggaccttctctctctgggtgatatggctttccagcccctggggaaggttctttgagcattggatagatgtgggtggtatgtaggggatggggagccattcctaatgcccccctgggagccaaattgcccccacttctttccttggcccccagccccactggaggctcttctgtgatctctcctcagactgcagggggctcgaagtctggaacagcatcccgagctgctggggtaggggctagggccagtgggccgggggtagggaggggcagggtctggagtataagaaacccttggagtccacttcagatatgggctaccacatctcagaagctcacagaacatattcattcattcattcattcattcatttgttcataacacattaattgcagtatctgtgctaagcactggaaatagaaagatgaatcttgggtcaggctcagtggctcatgcctgtaatcccagaactttgggaggccgaggtagaaggatcacttgagctcaaaagttcaagacgagcctgggcaacatggcaaatccccgtctctaccaaaaatacaaaaattaacaggacatggtggtgtgcatttgtggtcccagctactcaggaggctgaggcaggagaatcacttgagcctgggaggcaggggctacagtaagctgagactgcaccattgcacaccagcctgggtgacagagcaagactccgtctcaaaaaacaaaacaaaacaaaacaaaaacaaaaaacttgaaataaaagctaagaaagtcaagggtctaacttttttcccacgtactatttggattttgttttcgttttgtattttcttttttattgtgtataacatacatacataaaagtatgtaaagggtactgattttcttttttttttttttttttgagacagagtctcgctctgtcgctcaggctggagtgcagtggtgcaatctcggctcactgcaagctccgcctcccaggttcacgccattctcctgcctcagcctcccgagtagctgggactacaggcacccgccaccacgcctggctaatttttttttttttttagtagagacagggtttcaccgtgttagccaggatggtcttgatctcctgaccttgtgatccgcctgcctcagcctcccaaagtgctgggattacaggcgtgagccaccacgcccagccaaagggtactgatttccatgtccagttcttttttttttttttttttttggcggaatcttgctctgtcgcctaggctggactgcagtggtgtgatctcagctcactgcaacctctgccttctgggttcaagcgattctcctgcctcagcctcccaagcagctgggattacagacgtgcaccaccacgcacagctaatttttgtatttttagtagacatggagtttcaccatgctggccaggctggtcttgaactcctgacctcgtgatcctcccacctcggcctcccaaagtgctgggattacaggcatgagccgccacgtccggccaatttgtttttatatatgtatacacttgcataactagcacccagatcaatacataaatactgtgaatacatcacatactgtgatgttttctgaactactaaatgttttcaacttcattttctttttgccttcttaaaattaaagttggcctgcctctttggcaactcattaaagactattcaacaccagagttttgaaaacacagatgtgtatatcatggatttcatttcttccttcattaagtagacattgattcatttattcaacagatatttattaatttctgtgtaccaggcaaatccctggacactggaaatattaataaatcaataaatgaagatgacaaaaaacccgaccccacggagctggtgtcagggtcagggtgggggtgaggaaggacacaacaaacacatggagatgtgaagaatgcagtaagttagacagtgattagcactaaggagaacatttgtggaagggctggggaaggttgggagttgtagaggtcagggatggtctcattctggtgagcagagacctgaaagaggtgagggaggagccatatatttgagggaagagagaatagccagcaaaaagggcctggggtgggagtatgtcaggggtgtttaagaaatagtaaggagggggccgggcgcggtggctcacgcctgtaatcccagcactttgggaggccgaggctggcggatcacgaggtcaggagatcgagaccatcctggctaacacggtgaaaccccatctctacaaaaaatacaaaaaaatcagctgggcatggtggcaggcgcctgtagtcccagctactcgggagcctgaggcaggagaatggcttgaaccccaggaggcagagcttgcagtgagccgagatcacaccactgcactccagcctgggcgacagagccagactccatctcaaaaaaaaaaaaaggaaaaaaaaaagagagagaaacagtaaggaggtccttaataactctgcagcagagttattaaggacacaaatgccataggctgtgcgcgatggctcacgtctgcaatcccagcactttggggaagctgaggcaggaggattgcttgaggttaggagctcaagaccagcctggccaacatgagcgaaatcccatctctactaaaaatacaaaaactagccgggggtggtgacacacgcctgtaatcccagctactcgggtggctgaggcaagagaatcgcttgaacccaggaggtggaggttgcagtgagctatcgtgccaatgcactccagcctgggcaacagagcaagactccctctcaaaaaaaaaaaaggacacaagtatcaagaggtaaggtcagaaaggtcacagttctgaacagaggaaaatgacttgttttaaagaggttacaagatctttctgcagagggagaagcagggagaatagctcttctccgaccacacactagggtctccacgggcttggctttgggcagctgctaggagcaaagtctggtctgaaatgatgacacacgctctgccctccgagagcctcccagtctagggggtttgaaggaaactccaaagggtcagtcggggatgcagaagaggtgaggaagtctaagctgcgctctctttgcctctcccaccagccctgccctggctcaacgtgtcagcagatggtgacaacgtgcatctggttctgaatgtctctgaggagcagcacttcggcctctccctgtactggaatcaggtccagggccccccaaaaccccggtggcacaaaaacctggtgaggcctcccccttcccaagtcc

SEQ ID NO: 12581 - DNA, 1044 bp, Homo sapiens
aggaggagagtcaggactcccaggacagagagtgcacaaactacccagcacagccccctccgccccctctggaggctgaagagggattccagcccctgccacccacagacacgggctgactggggtgtctgccccccttgggggggggcagcacagggcctcaggcctgggtgccacctggcacctagaagatgcctgtgccctggttcttgctgtccttggcactgggccgaagcccagtggtcctttctctggagaggcttgtggggcctcaggacgctacccactgctctccgaactgccctgtctggtctgtctggtgctgatggtagaagagaagaacggggaaggggcaagagctgggtctgtctttctctgggagggtctgggaatacggagccccagaaaaagggcctctcctgccgcctctgggtgacatactctgcctgcctggggacatcgtgcctgctccgggccccgtgctggcgcctacgcacctgcagacagagctggtgctgaggtgccagaaggagaccgactgtgacctctgtctgcgtgtggctgtccacttggccgtgcatgggcactgggaagagcctgaagatgaggaaaagtttggaggagcagctgactcaggggtggaggagcctaggaatgcctctctccaggcccaagtcgtgctctccttccaggcctaccctactgcccgctgcgtcctgctggaggtgcaagtgcctgctgcccttgtgcagtttggtcagtctgtgggctctgtggtatatgactgcttcgaggctgccctagggagtgaggtacgaatctggtcctatactcagcccaggtacgagaaggaactcaaccacacacagcagctgcctgccctgccctggctcaacgtgtcagcagatggtgacaacgtgcatctggttctgaatgtctctgaggagcagcacttcggcctctccctgtactggaatcaggtccagggccccccaaaaccccggtggcacaaaaacctggtgaggcctcccccttcccaagtcc

SEQ ID NO: 12582 - DNA, 3875 bp, Homo sapiens
gggcagtgagcagagtggtccctgcagatgatcccacagcccttggcctggattctgagccctgcaccgccagccttcctcacccctctcctcacagggctctgtggtatatgactgcttcgaggctgccctagggagtgaggtacgaatctggtcctatactcagcccaggtacgagaaggaactcaaccacacacagcagctgcctggtaagtggacccccaagtcctggccccctagcctctgtcccctctggccattccccctcctgatttcaccctcttctagctccatccactctccggcaggggtctgagctgctatcctccccagagtcagtccctcggaccttctctctctgggtgatatggctttccagcccctggggaaggttctttgagcattggatagatgtgggtggtatgtaggggatggggagccattcctaatgcccccctgggagccaaattgcccccacttctttccttggcccccagccccactggaggctcttctgtgatctctcctcagactgcagggggctcgaagtctggaacagcatcccgagctgctggggtaggggctagggccagtgggccgggggtagggaggggcagggtctggagtataagaaacccttggagtccacttcagatatgggctaccacatctcagaagctcacagaacatattcattcattcattcattcattcatttgttcataacacattaattgcagtatctgtgctaagcactggaaatagaaagatgaatcttgggtcaggctcagtggctcatgcctgtaatcccagaactttgggaggccgaggtagaaggatcacttgagctcaaaagttcaagacgagcctgggcaacatggcaaatccccgtctctaccaaaaatacaaaaattaacaggacatggtggtgtgcatttgtggtcccagctactcaggaggctgaggcaggagaatcacttgagcctgggaggcaggggctacagtaagctgagactgcaccattgcacaccagcctgggtgacagagcaagactccgtctcaaaaaacaaaacaaaacaaaacaaaaacaaaaaacttgaaataaaagctaagaaagtcaagggtctaacttttttcccacgtactatttggattttgttttcgttttgtattttcttttttattgtgtataacatacatacataaaagtatgtaaagggtactgattttcttttttttttttttttttgagacagagtctcgctctgtcgctcaggctggagtgcagtggtgcaatctcggctcactgcaagctccgcctcccaggttcacgccattctcctgcctcagcctcccgagtagctgggactacaggcacccgccaccacgcctggctaatttttttttttttttagtagagacagggtttcaccgtgttagccaggatggtcttgatctcctgaccttgtgatccgcctgcctcagcctcccaaagtgctgggattacaggcgtgagccaccacgcccagccaaagggtactgatttccatgtccagttcttttttttttttttttttttggcggaatcttgctctgtcgcctaggctggactgcagtggtgtgatctcagctcactgcaacctctgccttctgggttcaagcgattctcctgcctcagcctcccaagcagctgggattacagacgtgcaccaccacgcacagctaatttttgtatttttagtagacatggagtttcaccatgctggccaggctggtcttgaactcctgacctcgtgatcctcccacctcggcctcccaaagtgctgggattacaggcatgagccgccacgtccggccaatttgtttttatatatgtatacacttgcataactagcacccagatcaatacataaatactgtgaatacatcacatactgtgatgttttctgaactactaaatgttttcaacttcattttctttttgccttcttaaaattaaagttggcctgcctctttggcaactcattaaagactattcaacaccagagttttgaaaacacagatgtgtatatcatggatttcatttcttccttcattaagtagacattgattcatttattcaacagatatttattaatttctgtgtaccaggcaaatccctggacactggaaatattaataaatcaataaatgaagatgacaaaaaacccgaccccacggagctggtgtcagggtcagggtgggggtgaggaaggacacaacaaacacatggagatgtgaagaatgcagtaagttagacagtgattagcactaaggagaacatttgtggaagggctggggaaggttgggagttgtagaggtcagggatggtctcattctggtgagcagagacctgaaagaggtgagggaggagccatatatttgagggaagagagaatagccagcaaaaagggcctggggtgggagtatgtcaggggtgtttaagaaatagtaaggagggggccgggcgcggtggctcacgcctgtaatcccagcactttgggaggccgaggctggcggatcacgaggtcaggagatcgagaccatcctggctaacacggtgaaaccccatctctacaaaaaatacaaaaaaatcagctgggcatggtggcaggcgcctgtagtcccagctactcgggagcctgaggcaggagaatggcttgaaccccaggaggcagagcttgcagtgagccgagatcacaccactgcactccagcctgggcgacagagccagactccatctcaaaaaaaaaaaaaggaaaaaaaaaagagagagaaacagtaaggaggtccttaataactctgcagcagagttattaaggacacaaatgccataggctgtgcgcgatggctcacgtctgcaatcccagcactttggggaagctgaggcaggaggattgcttgaggttaggagctcaagaccagcctggccaacatgagcgaaatcccatctctactaaaaatacaaaaactagccgggggtggtgacacacgcctgtaatcccagctactcgggtggctgaggcaagagaatcgcttgaacccaggaggtggaggttgcagtgagctatcgtgccaatgcactccagcctgggcaacagagcaagactccctctcaaaaaaaaaaaaggacacaagtatcaagaggtaaggtcagaaaggtcacagttctgaacagaggaaaatgacttgttttaaagaggttacaagatctttctgcagagggagaagcagggagaatagctcttctccgaccacacactagggtctccacgggcttggctttgggcagctgctaggagcaaagtctggtctgaaatgatgacacacgctctgccctccgagagcctcccagtctagggggtttgaaggaaactccaaagggtcagtcggggatgcagaagaggtgaggaagtctaagctgcgctctctttgcctctcccaccagccctgccctggctcaacgtgtcagcagatggtgacaacgtgcatctggttctgaatgtctctgaggagcagcacttcggcctctccctgtactggaatcaggtccagggccccccaaaaccccggtggcacaaaaacctggtgaggcctcccccttcccaagtccattcccactgtaggccgatgcctgtgcaaaggacgcagtgccatatcagagaggatccttgaagaggactcaccccaagcaagggaaaattggtgggggaacttctgccttcctggtttccttgactttggcctcctcctcttcctccttatcttctccaacctccttcctttatttgttccacagactggaccgcagatcattaccttgaaccacacagacc

SEQ ID NO: 12583 - DNA, 597 bp, Homo sapiens
gggcagtgagcagagtggtccctgcagatgatcccacagcccttggcctggattctgagccctgcaccgccagccttcctcacccctctcctcacagggctctgtggtatatgactgcttcgaggctgccctagggagtgaggtacgaatctggtcctatactcagcccaggtacgagaaggaactcaaccacacacagcagctgcctgccctgccctggctcaacgtgtcagcagatggtgacaacgtgcatctggttctgaatgtctctgaggagcagcacttcggcctctccctgtactggaatcaggtccagggccccccaaaaccccggtggcacaaaaacctggtgaggcctcccccttcccaagtccattcccactgtaggccgatgcctgtgcaaaggacgcagtgccatatcagagaggatccttgaagaggactcaccccaagcaagggaaaattggtgggggaacttctgccttcctggtttccttgactttggcctcctcctcttcctccttatcttctccaacctccttcctttatttgttccacagactggaccgcagatcattaccttgaaccacacagacc

SEQ ID NO: 12584 - DNA, 856 bp, Homo sapiens
cgaaagcactccgtgctggaagtaggaggagagtcaggactcccaggacagagagtgcacaaactacccagcacagccccctccgccccctctggaggctgaagagggattccagcccctgccacccacagacacgggctgactggggtgtctgccccccttgggggggggcagcacagggcctcaggcctgggtgccacctggcacctagaagatgcctgtgccctggttcttgctgtccttggcactgggccgaagcccagtggtcctttctctggagaggcttgtggggcctcaggacgctacccactgctctccggtgagtctggaaccctggggagacgaggaaaggctcagggttcagtttttggctcagcaaagccttagcctggctcctgtcactgctgccactgccagaactgccctgtctggtctgtctggtgctgatggtagaagagaagaacggggaaggggcaagagctgggtctgtctttctctgggagggtctgggaatacggagccccagaaaaaggtaggtggaggtcttaggcagagaacagtgcctagatggtgggggcacaaattctgactctcctttctttccttcccagggcctctcctgccgcctctggggtaagtatccctacttttaaaaagaatttcccaggttggccgaagggagcagagctgtcccaggcccatgccctccatgcccacctcagcctaggacagccaagttctttggctctctgggtatgtcaggtgccaccaaattctgggcttggaacagcttcagctcccacccgctcctccacacacagacagtgacatactctgcctgcctggggacatcgtg

SEQ ID NO: 12585 - DNA, 564 bp, Homo sapiens
cgaaagcactccgtgctggaagtaggaggagagtcaggactcccaggacagagagtgcacaaactacccagcacagccccctccgccccctctggaggctgaagagggattccagcccctgccacccacagacacgggctgactggggtgtctgccccccttgggggggggcagcacagggcctcaggcctgggtgccacctggcacctagaagatgcctgtgccctggttcttgctgtccttggcactgggccgaagcccagtggtcctttctctggagaggcttgtggggcctcaggacgctacccactgctctccgggcctctcctgccgcctctggggtaagtatccctacttttaaaaagaatttcccaggttggccgaagggagcagagctgtcccaggcccatgccctccatgcccacctcagcctaggacagccaagttctttggctctctgggtatgtcaggtgccaccaaattctgggcttggaacagcttcagctcccacccgctcctccacacacagacagtgacatactctgcctgcctggggacatcgtg

SEQ ID NO: 12586 - DNA, 16533 bp, Homo sapiens
aaaacgaaagcactccgtgctggaagtaggaggagagtcaggactcccaggacagagagtgcacaaactacccagcacagccccctccgccccctctggaggctgaagagggattccagcccctgccacccacagacacgggctgactggggtgtctgccccccttgggggggggcagcacagggcctcaggcctgggtgccacctggcacctagaagatgcctgtgccctggttcttgctgtccttggcactgggccgaagcccagtggtcctttctctggagaggcttgtggggcctcaggacgctacccactgctctccggtgagtctggaaccctggggagacgaggaaaggctcagggttcagtttttggctcagcaaagccttagcctggctcctgtcactgctgccactgccagaactgccctgtctggtctgtctggtgctgatggtagaagagaagaacggggaaggggcaagagctgggtctgtctttctctgggagggtctgggaatacggagccccagaaaaaggtaggtggaggtcttaggcagagaacagtgcctagatggtgggggcacaaattctgactctcctttctttccttcccagggcctctcctgccgcctctggggtaagtatccctacttttaaaaagaatttcccaggttggccgaagggagcagagctgtcccaggcccatgccctccatgcccacctcagcctaggacagccaagttctttggctctctgggtatgtcaggtgccaccaaattctgggcttggaacagcttcagctcccacccgctcctccacacacagacagtgacatactctgcctgcctggggacatcgtgcctgctccgggccccgtgctggcgcctacgcacctgcagacagagctggtgctgaggtgccagaaggagaccgactgtgacctctgtctgcgtgtggctgtccacttggccgtgcatggtgagcaagtcatcctgtgacagtgcatgtgtacacgtgagtgtgtctggggtgggcatgagggccaggggatctctcaagcagtgctaggcatcctcagtgttctcctggaggacaccagcagaaggacccccaggccagtgtggtctccccagcccctgcttcccagcactgggctttccagaaggaagccaacgccaaagccagccagcccagagcagggggcctcacccagggccttgctcttgggtccttctagggcactgggaagagcctgaagatgaggaaaagtttggaggagcagctgactcaggggtggaggagcctaggaatggtgaggagaacctggctggcccaactgccccatgccaaggcctggcctgccgctcctgggcctgactgacccctgccctgttgcccacagcctctctccaggcccaagtcgtgctctccttccaggcctaccctactgcccgctgcgtcctgctggaggtgcaagtgcctgctgcccttgtgcagtttggtcagtctgtggtatgcaaaataataataatcaccttctaaacctaaaatctataaaactttttcacatgcattatctctttgaggattacaaaagaattaaatttattgaaacccttcagtaccaggcattacagccagtgttttacaggtatcaacttatttaattctcacaacagccatgtgaggtgggactattcttttgattctgatcagcgctgtgggcaagtcccttcagcctgttatgcctcagcttttatgtctgtaaaatggggatgagaatagttctacttcatatgcttgactgcgagaaatcaccaagcgtttttcagggtgcttctactattttcccctcctaccagcagtgtatgggagtcctagttgcttcccatctttgccaacacttgatggtgtaattttattttatttttaaattaaatatatttgaattttaaatatatgggaccctccatgaatttgcatgtcatcctcaggcacgggccttgctaatcttttctgtattgttccagttgtagtatatgtggtgccaaaacaagcataagtgttgtaattgtcataatttttctgcatatgtagtggtttgccattgtggttttaatttgtatcttccaatgactgatgaagttgagcacttttttcacatgcttattggctatttgtgtaacttccttgtgaaatatctcttaaagtttttttgtttttgtttttgtttttgtttttgccacataaaaaaacaatagttctggccgggcacagtggttcacacctgtaatcccagcactttgggaggctgaggcgggcagatcacgaagtcaggagattgagaccatcctggctaacactgtgaaaccctgcctccactaaaaaaatacaaaaaattagccaggcatggtggtgggcgcctgtagacccagctactcgggaggcagaggcaggagaatggcgtgaacccgggaggtggagcttgcagtgagccgagatcgcgccactgcactccagcctgggcgacagagcgagattccgtctcaaaaaaaaagaatagtcccacctcacatgactgttgtgagaattaaattaagttggtacctgtaaaacactggatgtaatgcctggcactgaataatttcaataaatttaattcttttgtaatcctcaaaactacctgatgaggcattattagtatcctcattttccagatagataaaatgaggcttggagaggggaggtctgtgggctggatgcacttctctgtactcttggaccaaagaaagagtcctaccatacataccatggtatacttaccatggtgtaagtaccatggtgcagggtgttggggcttctccctgccttaggaggccacatgtacctggaaggtctatttccactggggtcaaatcactcaaaccctttgactttccctccaacctccagcccccagccaatatcctatctggagaattgtagactgggagaacatctgcttggtccatgtcacaagcagttgtaaggaacactgaggcactgggttgagtgtgagaaccacttctgtggggaggggtgtgccatattgtgttggggtgtctcatctccttagctttggccaggtgatctagcacagcagggtgggtgcagggatttaaatgtctagggccttttcccgccctggtgacactcttactgaggacatttgctttagaattgaggccccttgaaagaaaggtgaatagtagatttcaggctatacagtataaatacagtcattagttgggggaggagggcagtgagcagagtggtccctgcagatgatcccacagcccttggcctggattctgagccctgcaccgccagccttcctcacccctctcctcacagggctctgtggtatatgactgcttcgaggctgccctagggagtgaggtacgaatctggtcctatactcagcccaggtacgagaaggaactcaaccacacacagcagctgcctggtaagtggacccccaagtcctggccccctagcctctgtcccctctggccattccccctcctgatttcaccctcttctagctccatccactctccggcaggggtctgagctgctatcctccccagagtcagtccctcggaccttctctctctgggtgatatggctttccagcccctggggaaggttctttgagcattggatagatgtgggtggtatgtaggggatggggagccattcctaatgcccccctgggagccaaattgcccccacttctttccttggcccccagccccactggaggctcttctgtgatctctcctcagactgcagggggctcgaagtctggaacagcatcccgagctgctggggtaggggctagggccagtgggccgggggtagggaggggcagggtctggagtataagaaacccttggagtccacttcagatatgggctaccacatctcagaagctcacagaacatattcattcattcattcattcattcatttgttcataacacattaattgcagtatctgtgctaagcactggaaatagaaagatgaatcttgggtcaggctcagtggctcatgcctgtaatcccagaactttgggaggccgaggtagaaggatcacttgagctcaaaagttcaagacgagcctgggcaacatggcaaatccccgtctctaccaaaaatacaaaaattaacaggacatggtggtgtgcatttgtggtcccagctactcaggaggctgaggcaggagaatcacttgagcctgggaggcaggggctacagtaagctgagactgcaccattgcacaccagcctgggtgacagagcaagactccgtctcaaaaaacaaaacaaaacaaaacaaaaacaaaaaacttgaaataaaagctaagaaagtcaagggtctaacttttttcccacgtactatttggattttgttttcgttttgtattttcttttttattgtgtataacatacatacataaaagtatgtaaagggtactgattttcttttttttttttttttttgagacagagtctcgctctgtcgctcaggctggagtgcagtggtgcaatctcggctcactgcaagctccgcctcccaggttcacgccattctcctgcctcagcctcccgagtagctgggactacaggcacccgccaccacgcctggctaatttttttttttttttagtagagacagggtttcaccgtgttagccaggatggtcttgatctcctgaccttgtgatccgcctgcctcagcctcccaaagtgctgggattacaggcgtgagccaccacgcccagccaaagggtactgatttccatgtccagttcttttttttttttttttttttggcggaatcttgctctgtcgcctaggctggactgcagtggtgtgatctcagctcactgcaacctctgccttctgggttcaagcgattctcctgcctcagcctcccaagcagctgggattacagacgtgcaccaccacgcacagctaatttttgtatttttagtagacatggagtttcaccatgctggccaggctggtcttgaactcctgacctcgtgatcctcccacctcggcctcccaaagtgctgggattacaggcatgagccgccacgtccggccaatttgtttttatatatgtatacacttgcataactagcacccagatcaatacataaatactgtgaatacatcacatactgtgatgttttctgaactactaaatgttttcaacttcattttctttttgccttcttaaaattaaagttggcctgcctctttggcaactcattaaagactattcaacaccagagttttgaaaacacagatgtgtatatcatggatttcatttcttccttcattaagtagacattgattcatttattcaacagatatttattaatttctgtgtaccaggcaaatccctggacactggaaatattaataaatcaataaatgaagatgacaaaaaacccgaccccacggagctggtgtcagggtcagggtgggggtgaggaaggacacaacaaacacatggagatgtgaagaatgcagtaagttagacagtgattagcactaaggagaacatttgtggaagggctggggaaggttgggagttgtagaggtcagggatggtctcattctggtgagcagagacctgaaagaggtgagggaggagccatatatttgagggaagagagaatagccagcaaaaagggcctggggtgggagtatgtcaggggtgtttaagaaatagtaaggagggggccgggcgcggtggctcacgcctgtaatcccagcactttgggaggccgaggctggcggatcacgaggtcaggagatcgagaccatcctggctaacacggtgaaaccccatctctacaaaaaatacaaaaaaatcagctgggcatggtggcaggcgcctgtagtcccagctactcgggagcctgaggcaggagaatggcttgaaccccaggaggcagagcttgcagtgagccgagatcacaccactgcactccagcctgggcgacagagccagactccatctcaaaaaaaaaaaaaggaaaaaaaaaagagagagaaacagtaaggaggtccttaataactctgcagcagagttattaaggacacaaatgccataggctgtgcgcgatggctcacgtctgcaatcccagcactttggggaagctgaggcaggaggattgcttgaggttaggagctcaagaccagcctggccaacatgagcgaaatcccatctctactaaaaatacaaaaactagccgggggtggtgacacacgcctgtaatcccagctactcgggtggctgaggcaagagaatcgcttgaacccaggaggtggaggttgcagtgagctatcgtgccaatgcactccagcctgggcaacagagcaagactccctctcaaaaaaaaaaaaggacacaagtatcaagaggtaaggtcagaaaggtcacagttctgaacagaggaaaatgacttgttttaaagaggttacaagatctttctgcagagggagaagcagggagaatagctcttctccgaccacacactagggtctccacgggcttggctttgggcagctgctaggagcaaagtctggtctgaaatgatgacacacgctctgccctccgagagcctcccagtctagggggtttgaaggaaactccaaagggtcagtcggggatgcagaagaggtgaggaagtctaagctgcgctctctttgcctctcccaccagccctgccctggctcaacgtgtcagcagatggtgacaacgtgcatctggttctgaatgtctctgaggagcagcacttcggcctctccctgtactggaatcaggtccagggccccccaaaaccccggtggcacaaaaacctggtgaggcctcccccttcccaagtccattcccactgtaggccgatgcctgtgcaaaggacgcagtgccatatcagagaggatccttgaagaggactcaccccaagcaagggaaaattggtgggggaacttctgccttcctggtttccttgactttggcctcctcctcttcctccttatcttctccaacctccttcctttatttgttccacagactggaccgcagatcattaccttgaaccacacagacctggttccctgcctctgtattcaggtaggagcagagtctagctgggtgccagaagaggagtgggaagatgatgatgggggtgatccctgccttcctggtctcaccattcttcaaacccttcattgaggtggagactgtggctccctggggtggctggccctcccttgacccttgctgtcctatgccttctgtctattacattccctgaatgctctccctgatcctccacagaactcctgcttattcttcatggccccattcaaatgtcaccttctccttgaaacctttccctactcctccagttctgtctttgtgttcccctggcgggcagagcatgtgctacgaacttggactggtttgaatcttggctcttgccatttgctagctgtgtaaccttgggcaagtcacttcacctctgtgagcctgtttctcatctgtaaaatgggaataataatagtaacagcctcatggggctgttataagaatgtgtgccacacccaggcttaaatatgctggctctttcctcttcctctgtacatttatttatttttttagacaaggtctcactctgttgcccaggctggagtgcagtggcacaatcatggcacactgcagcctcagccccatgggctcaagtgatcctcctgtctcagcctcccaagtagctggaactactggtgagcactaccatactcagctagtttttttttgttttgtgtagagacggggtcttgctatgttacccaggctgttctgaattcctgggcttatgctatcctcccacctcagcctcccaccaagtgctgggattataagcatgagccactgtggcttgccctgattgcactttttttttttttttttttaagacagagtctttctctgtcgcccaggctggagcaccgtggcgtgatctcggctcactgcaagctgcttctcctgggttcacgccattctcctgcctcagcctcgctgagtagctgggactacaggtgcctgcaaccacgcccagctaattttttgtattttcagtaaagacagggtttcaccgtgttagccaggatggtctcgatctcctgaccttatgatccacaagcctcgtcctcccaaagtgctgggattacaggcatgacccactgtgcccagccgctgattgcacatttaattggtcatcaggtctcatccatcttacctctgacattaatgtctctcattttctttccccctcctctccatctcagtccagcttagggctctatcatctgttttctagactgtttcaacacctccaagctcccctcccttcccatcactttcctggcattctgggcccatattctgcccccaacggtgccttttcactctattttccccatgattccccttcatgagaacattgttacatccagtggagctacttaccaagatacagctagctccctgccttttctcaggtggttcccattacctcaaatgccctcacctccttcccaaagcttttccccaaccacccggcctctcctagctccaaatccccttgcacttctatctttccttgtccatttatcacttcatttcttttattttcttaaattttttttttttttttagagacagcattttgctctgtcacccatggtagagtgcagtggcatgaacacgtctcattgcagccccaagctcccaggttcaagggatcctcctgcctcagcctctgcagctgggactgcaggcatgcgccaccatgcctggctaattgtttccttttttttttttttttttttttaatggagtttcactcttttgcccaggatggagtgcagtggcgtgatctcggctcactgcaacttccgcctcccaggttcaagccattctcctgcctcagcctcccaagtagctgagattacaggcacacaccaccatgcccagctaatttttgtatttttagtagagacagggtttcaccatgttggtcaggctggtcccaaattcctgacctcgtgatccacccgcctcggccgcccaaagtgctgggattacaggcgtgagccactgtgcccagcctgttttcattttttaatgttttgtggcgatgggccaccacacccagctcaatcacttactttcttatttgggcatctaatttcttcttgtacacaacagatgctcaataaatattatgaaatgaatgagtgttttactaatttatataaatattttatccttactacaagtgtgagtttgtgatttccttgaaggcaagcaaatcatatctaattcaaatgtaatagctttgcaagagccttgcacatagcgcctacttgttttttgtttttttgtgtttttgttttttttttgtttttttgtcttttttgagacagagtctcgctctattggcaggctggagtacagtggcgtgatctcggctcactgcaatctctgcctcctggattcaagcaattcttctgcctcagcctcccaagtagctgggactacaagtgcatgccaccatgcccggctaatttttgtattttcagtagagacggggtttcagcatgttggccagatggtctcgatctcttgacctcgtgatccgcccaccttggcctcccaaagtgctgggattacaggggtgagccaccgcgcccagccttgttttgtttttaaacaaggtaacagtatgaggtcctcactgttgaatgagtgaataaatgttactgcctaacacagccataggacacagcagatgttcatgagatgtatgctgtgatttaaatggcttcattgccaaacacagtgcctgccacatagtcggtgttcctaactaaaggcttgatggataaattaatgtattacctctagtgcttagcatagagctatgcacataataggcactcttgaaatgtctgttgaaagaataaatgaatgtgtccttagaacttagcacattccccaacacatagcaggtgcttacacaagtgattgtggaatgaattaaaattaattatccaccaggcacagtggctcacacctgtaatcccagcactttgggaggccaaggtgggtggatcacgaggtcaggagtttgagaccagcctggcctaacatagtgaaacccagtctctactaaaagtacaaaaattagccaggcatggtgatgtgcgcctgtagtccctgctacttgggaagctgaggcaggagaatcacttgaacccaggaggcggaggttgtggtgagctgagatcacaccactgcactccagcctgggcaacagagtgagattccatctcaaaaaataaaaaaataataaaaatttaattatccaaggtctcttgtgcttgccatactgctaagacacaatggtaggcactcattaaaagtctgttgaatgggccaggcgcggtggctcacgcttgtaatcccaacactttgggaggctgagacgggtggatcacttgaggtcaggagttcgagaccagcctgatcaatgtggtgaaaccccatctctactaaaaatacaaaaattaaccagttagccggccgttgtggcatgttcctgtaatcgcagctcctcaggagactgagatgggagaatcgcttgaacctgggaggtggaggttgtagtgagccaagattgcaccactgcactccagcctgggcgacagagcgagactctatctcaaaaaaaaaaaaaagtttgttaatgaagatgttgccagtgcccagcattatgtttgctggaagaatagatgtgagcacctccaggttttgtaaaaggcaggaagacccagcaagtgtttgtgaaatacctgctgaatgagtgcatccccactgtccagcagagggccaggcacatgcccatggaggggacctgagcagacccccatttcctttccaggtgtggcctctggaacctgactccgttaggacgaacatctgccccttcagggagggtgagccgaccggcctggggctggggttggggtgttgcgagcgatgggtacctggcctgcggtgactgtgccctttccttgcagacccccgcgcacaccagaacctctggcaagccgcccgactgcaactgctgaccctgcagagctggctgctggacgcaccgtgctcgctgcccgcagaagcggcactgtgctggcgggctccgggtggggacccctgccagccactggtcccaccgctttcctgggagaacgtcactgtggacgtaagtgaagcagagggcacctcccgtggtgaggggagagtggggaaccgggggtccccttttgtgatcccacccattcctctctttccacagaaggttctcgagttcccattgctgaaaggccaccctaacctctgtgttcaggtcagaaaggggtgcatagtgctgggctggaggctggacctgggcagaccccccagccaagggggtcttagttcttgggccgctaaagcatagtggttgccagcttcctctatgggagttccactgcctactttagtagtgcgcgggaccctgggcaactcacttcacctctctgaacgtcagtttcctcatctgtttaatgcagatgataatacagtaactacctcatggagtggttgtgacaatgaaataagagaagtgcttccccttaggaatcggtacagactaaatgctccataaatgtagccacttttattattgctatccttattctatttccatacctgtagaatgggttgctctacagtttcaaagggtgattataagaacattcactcatccggccaggcgcggtggctcacgcctgtaatcccagcactttgggaggccgaggcgggcagatcacgaggtcaggacatcaagaccatcctggctaacatggtgaaaccccatctctactaaaaatacaaaaaattagccggtcgtggtggtgggcacctgtagtcccagctactaggaaggctggggcaggagaatggcgtgaacctgggaggctgagcttgcagtgagctgagagggcgccactgcactccagcctgggtgacagagtgagactgggcgacagagtgaaactccgtctcaaaaaaaaaaaaaattcactcattcaagattttttgagcagcacaagtcactgttttaggcacttgtgatagaccctaacatctctaccctcatagaacttatattgtaatggagaaaggcaggcaacagacattgtaaataaatcatatagtatcttaaaattgcatacaaataccatgggaaagggataaggtgggactggggttgcaatttttagcagggtggtcatgtgagaaaggaatctctttgagaaggttagatgagaggggaaccatgctccgtaagacataaaaacagctttagggtcagaagacgctttatacagatgatctcacaaggctggggcagagaaagatgtagtgattcctaatcacccagccttgaatccacatctgcctcaggtcagattgagtgcagattcccaacccaacaggccttctgttgcctgccccattctggtctttctgcctttggcttttgcttttcttagtggccctaaccatggtctcttcccagcaggtgaacagctcggagaagctgcagctgcaggagtgcttgtgggctggtgagttgggcctgggggcagctggggcagggccacctcctaggggtgaaggtcagggcatgggaggcaggcaagtggccaatcccagcaaggatgggtcttggtcagagtggcctctcaccccttccagactccctggggcctctcaaagacgatgtgctactgttggagacacgaggcccccaggacaacagatccctctgtgccttggaacccagtggctgtacttcactacccagcaaagcctccacggttaggactgggcgaccctcctccacagatctctccaaatgcatctcacatctggcctcaaattttcactccatccaccctgtgccggtctctgggaacatggggggtgactcagaccagggccatattcagcggcatcaccaaagtctcccagtcccctctacctcattctacccagctgtagcctggtaggtgctgccctaagggtgctacctccaggtaacagtgcccccatcctttggcttggcagagggcagctcgccttggagagtacttactacaagacctgcagtcaggccagtgtctgcaggtgagctggtggaagaagggccccacctcaatgcctaggggcaacaggcctaaaactagcactcacctactgtctatttaggcttattttatgttcagccctgggaaagttaagagtagaagaagcacagttcctatccccaaggagcacactgttggctagacacccataaacagataaccacacctacaggtgctaagttttgggttccagggagagcttccgggaagaatttcttcctataagccagatttggtatggaagaagtcataccctagtcagtgggcacagcacaaaggcagagcagctgcaggaaccttagccgggagatatgcatagttgatgctgggaatttggagatcaggccaccagagcttggtgaatattggaacacctggctggtgccctggatttggttctgtttgtatcttacagctatgggacgatgacttgggagcgctatgggcctgccccatggacaaatgtgagtattgtaagaactgcctttcctttctgtaccaggagtggggatcttgacagggaccactcttgggcacagcacatgcaatggccttgtccttccctgagatcagataaacagagggtcattccttcattcactcaaaaaatgatgagagcttgcagggatcgcaggaacaccaaaaatataaatccttgcccccgccccacccctagaagactagcaagacatgagccagtcacttacatttaaagtgggagctactgaagcaccaccaagtgttcagtgctgtaaatgcatacaatgtggacctgacctgggtggggtgaggggtgaggggctcagggggaaggttccagcaaaactctgaagactgagctaggggaagggggtagagatacagggtcttggacaggcaggtttctgtcatgagataaagatgcaggagacatgtaggggatttggatcttatgttgagagcagcaggagctacgatcaaatttttatatatttcacacacacacacacacatatatatatatatatatatatatatatatatacttatttttttatttatttttgaggcagagtctcactctgttgcccaggctggagtgcaatggcgcgatctcggctaactgcaacctctgcctcccgggttcaagcaattctctacctcagcctcccgggtagctgggattaataggcgcctgccaccatgccctgctaatttttgtatttttagtagagatggggtttcaccatcttggccaggctggtcttgaactcctgacctcgtgatccgcccgcgtcggcctcccaaagtgctgggattatagtcgtgagtcaccgcacctggcccaaatttatatttttaaaagatctctgaggctgtcatgaatcaattcaaggcaaatcaattggaggtaaaaaaaaaaaaaaaaagacagggcagggacaccaggtagttgcagacacccaggacagcaagatcaagggcccagcaaccctagcttaggggagaaaaacagctgacattttagcacttaagatgctcggcattgtgttaagtatgtattaacacattgtgttaagctttatatgtattaatatatttagtcctcacaccaaccctatgacacaggtacaactttacagaggagaaaactgaggcagagggtgacattacttattcaaagacccctaaacagatggagctatattcatccactggctctgacactgtgctgtggactctgggcaaatcatttcttcgttttttgttttgttttgttttgttttgagaggagtctcaccctgtcgcccaggctggagtgcaatggcgcgatctcggctcactgcaacctctgcctcccgagttcaagcgattctcttgcctcagcctcccgagtagctgggattacaggcgtgtgccaccacgcccggctaattttttgtatttttagtagagacggggtttcaccgtgttagccaggatggtcttgatgtcctgacctcgtgatctgcccgcctcggcctcccgaagtgctgggattatataaaggcatgagccaccgcacccggcccaattcatttctgttaagtctcagtttttcttctctgtggagggtaagtttctaactcttcttctctgggtctcccagacatccacaagcgctgggccctcgtgtggctggcctgcctactctttgccgctgcgctttccctcatcctccttctcaaaaaggatcacgcgaaaggtgagcgcttcccggctccccattcccctgggggaggaccagagtggctgtgggagttctccgagggaaagcggcggccgagctcactggctgcctccgcccctctcccctaacagggtggctgaggctcttgaaacaggacgtccgctcggggggtgagtgggagcaagcgctgggcggagggccgcccccggggagccaggcctgtgccagctcacctcttccctccccatctgttttctccggcagcggccgccaggggccgcgcggctctgctcctctactcagccgatgactcgggtttcgagcgcctggtgggcgccctggcgtcggccctgtgccagctgccgctgcgcgtggccgtagacctgtggagccgtcgtgaactgagcgcgcaggggcccgtggcttggtttcacgcgcagcggcgccagaccctgcaggagggcggcgtggtggtcttgctcttctctcccggtgcggtggcgctgtgcagcgagtggctacaggatggggtgtccgggcccggggcgcacggcccgcacgacgccttccgcgcctcgctcagctgcgtgctgcccgacttcttgcagggccgggcgcccggcagctacgtgggggcctgcttcgacaggctgctccacccggacgccgtacccgcccttttccgcaccgtgcccgtcttcacactgccctcccaactgccagacttcctgggggccctgcagcagcctcgcgccccgcgttccgggcggctccaagagagagcggagcaagtgtcccgggcccttcagccagccctggatagctacttccatcccccggggactcccgcgccgggacgcggggtgggaccaggcgcgggacctggggcgggggacgggacttaaataaaggcagacgctgtttttctacccatgtggccca

SEQ ID NO: 12587 - DNA, 2467 bp, Homo sapiens
aaaacgaaagcactccgtgctggaagtaggaggagagtcaggactcccaggacagagagtgcacaaactacccagcacagccccctccgccccctctggaggctgaagagggattccagcccctgccacccacagacacgggctgactggggtgtctgccccccttgggggggggcagcacagggcctcaggcctgggtgccacctggcacctagaagatgcctgtgccctggttcttgctgtccttggcactgggccgaagcccagtggtcctttctctggagaggcttgtggggcctcaggacgctacccactgctctccgggcctctcctgccgcctctgggacagtgacatactctgcctgcctggggacatcgtgcctgctccgggccccgtgctggcgcctacgcacctgcagacagagctggtgctgaggtgccagaaggagaccgactgtgacctctgtctgcgtgtggctgtccacttggccgtgcatgggcactgggaagagcctgaagatgaggaaaagtttggaggagcagctgactcaggggtggaggagcctaggaatgcctctctccaggcccaagtcgtgctctccttccaggcctaccctactgcccgctgcgtcctgctggaggtgcaagtgcctgctgcccttgtgcagtttggtcagtctgtgggctctgtggtatatgactgcttcgaggctgccctagggagtgaggtacgaatctggtcctatactcagcccaggtacgagaaggaactcaaccacacacagcagctgcctgccctgccctggctcaacgtgtcagcagatggtgacaacgtgcatctggttctgaatgtctctgaggagcagcacttcggcctctccctgtactggaatcaggtccagggccccccaaaaccccggtggcacaaaaacctgactggaccgcagatcattaccttgaaccacacagacctggttccctgcctctgtattcaggtgtggcctctggaacctgactccgttaggacgaacatctgccccttcagggaggacccccgcgcacaccagaacctctggcaagccgcccgactgcaactgctgaccctgcagagctggctgctggacgcaccgtgctcgctgcccgcagaagcggcactgtgctggcgggctccgggtggggacccctgccagccactggtcccaccgctttcctgggagaacgtcactgtggacaaggttctcgagttcccattgctgaaaggccaccctaacctctgtgttcaggtgaacagctcggagaagctgcagctgcaggagtgcttgtgggctgactccctggggcctctcaaagacgatgtgctactgttggagacacgaggcccccaggacaacagatccctctgtgccttggaacccagtggctgtacttcactacccagcaaagcctccacgagggcagctcgccttggagagtacttactacaagacctgcagtcaggccagtgtctgcagctatgggacgatgacttgggagcgctatgggcctgccccatggacaaatacatccacaagcgctgggccctcgtgtggctggcctgcctactctttgccgctgcgctttccctcatcctccttctcaaaaaggatcacgcgaaagggtggctgaggctcttgaaacaggacgtccgctcggggggtgagtgggagcaagcgctgggcggagggccgcccccggggagccaggcctgtgccagctcacctcttccctccccatctgttttctccggcagcggccgccaggggccgcgcggctctgctcctctactcagccgatgactcgggtttcgagcgcctggtgggcgccctggcgtcggccctgtgccagctgccgctgcgcgtggccgtagacctgtggagccgtcgtgaactgagcgcgcaggggcccgtggcttggtttcacgcgcagcggcgccagaccctgcaggagggcggcgtggtggtcttgctcttctctcccggtgcggtggcgctgtgcagcgagtggctacaggatggggtgtccgggcccggggcgcacggcccgcacgacgccttccgcgcctcgctcagctgcgtgctgcccgacttcttgcagggccgggcgcccggcagctacgtgggggcctgcttcgacaggctgctccacccggacgccgtacccgcccttttccgcaccgtgcccgtcttcacactgccctcccaactgccagacttcctgggggccctgcagcagcctcgcgccccgcgttccgggcggctccaagagagagcggagcaagtgtcccgggcccttcagccagccctggatagctacttccatcccccggggactcccgcgccgggacgcggggtgggaccaggcgcgggacctggggcgggggacgggacttaaataaaggcagacgctgtttttctacccatgtggccca

SEQ ID NO: 12588 - DNA, 7122 bp, Homo sapiens
tcccaggacagagagtgcacaaactacccagcacagccccctccgccccctctggaggctgaagagggattccagcccctgccacccacagacacgggctgactggggtgtctgccccccttgggggggggcagcacagggcctcaggcctgggtgccacctggcacctagaagatgcctgtgccctggttcttgctgtccttggcactgggccgaagcccagtggtcctttctctggagaggcttgtggggcctcaggacgctacccactgctctccggtgagtctggaaccctggggagacgaggaaaggctcagggttcagtttttggctcagcaaagccttagcctggctcctgtcactgctgccactgccagaactgccctgtctggtctgtctggtgctgatggtagaagagaagaacggggaaggggcaagagctgggtctgtctttctctgggagggtctgggaatacggagccccagaaaaaggtaggtggaggtcttaggcagagaacagtgcctagatggtgggggcacaaattctgactctcctttctttccttcccagggcctctcctgccgcctctggggtaagtatccctacttttaaaaagaatttcccaggttggccgaagggagcagagctgtcccaggcccatgccctccatgcccacctcagcctaggacagccaagttctttggctctctgggtatgtcaggtgccaccaaattctgggcttggaacagcttcagctcccacccgctcctccacacacagacagtgacatactctgcctgcctggggacatcgtgcctgctccgggccccgtgctggcgcctacgcacctgcagacagagctggtgctgaggtgccagaaggagaccgactgtgacctctgtctgcgtgtggctgtccacttggccgtgcatggtgagcaagtcatcctgtgacagtgcatgtgtacacgtgagtgtgtctggggtgggcatgagggccaggggatctctcaagcagtgctaggcatcctcagtgttctcctggaggacaccagcagaaggacccccaggccagtgtggtctccccagcccctgcttcccagcactgggctttccagaaggaagccaacgccaaagccagccagcccagagcagggggcctcacccagggccttgctcttgggtccttctagggcactgggaagagcctgaagatgaggaaaagtttggaggagcagctgactcaggggtggaggagcctaggaatggtgaggagaacctggctggcccaactgccccatgccaaggcctggcctgccgctcctgggcctgactgacccctgccctgttgcccacagcctctctccaggcccaagtcgtgctctccttccaggcctaccctactgcccgctgcgtcctgctggaggtgcaagtgcctgctgcccttgtgcagtttggtcagtctgtggtatgcaaaataataataatcaccttctaaacctaaaatctataaaactttttcacatgcattatctctttgaggattacaaaagaattaaatttattgaaacccttcagtaccaggcattacagccagtgttttacaggtatcaacttatttaattctcacaacagccatgtgaggtgggactattcttttgattctgatcagcgctgtgggcaagtcccttcagcctgttatgcctcagcttttatgtctgtaaaatggggatgagaatagttctacttcatatgcttgactgcgagaaatcaccaagcgtttttcagggtgcttctactattttcccctcctaccagcagtgtatgggagtcctagttgcttcccatctttgccaacacttgatggtgtaattttattttatttttaaattaaatatatttgaattttaaatatatgggaccctccatgaatttgcatgtcatcctcaggcacgggccttgctaatcttttctgtattgttccagttgtagtatatgtggtgccaaaacaagcataagtgttgtaattgtcataatttttctgcatatgtagtggtttgccattgtggttttaatttgtatcttccaatgactgatgaagttgagcacttttttcacatgcttattggctatttgtgtaacttccttgtgaaatatctcttaaagtttttttgtttttgtttttgtttttgtttttgccacataaaaaaacaatagttctggccgggcacagtggttcacacctgtaatcccagcactttgggaggctgaggcgggcagatcacgaagtcaggagattgagaccatcctggctaacactgtgaaaccctgcctccactaaaaaaatacaaaaaattagccaggcatggtggtgggcgcctgtagacccagctactcgggaggcagaggcaggagaatggcgtgaacccgggaggtggagcttgcagtgagccgagatcgcgccactgcactccagcctgggcgacagagcgagattccgtctcaaaaaaaaagaatagtcccacctcacatgactgttgtgagaattaaattaagttggtacctgtaaaacactggatgtaatgcctggcactgaataatttcaataaatttaattcttttgtaatcctcaaaactacctgatgaggcattattagtatcctcattttccagatagataaaatgaggcttggagaggggaggtctgtgggctggatgcacttctctgtactcttggaccaaagaaagagtcctaccatacataccatggtatacttaccatggtgtaagtaccatggtgcagggtgttggggcttctccctgccttaggaggccacatgtacctggaaggtctatttccactggggtcaaatcactcaaaccctttgactttccctccaacctccagcccccagccaatatcctatctggagaattgtagactgggagaacatctgcttggtccatgtcacaagcagttgtaaggaacactgaggcactgggttgagtgtgagaaccacttctgtggggaggggtgtgccatattgtgttggggtgtctcatctccttagctttggccaggtgatctagcacagcagggtgggtgcagggatttaaatgtctagggccttttcccgccctggtgacactcttactgaggacatttgctttagaattgaggccccttgaaagaaaggtgaatagtagatttcaggctatacagtataaatacagtcattagttgggggaggagggcagtgagcagagtggtccctgcagatgatcccacagcccttggcctggattctgagccctgcaccgccagccttcctcacccctctcctcacagggctctgtggtatatgactgcttcgaggctgccctagggagtgaggtacgaatctggtcctatactcagcccaggtacgagaaggaactcaaccacacacagcagctgcctggtaagtggacccccaagtcctggccccctagcctctgtcccctctggccattccccctcctgatttcaccctcttctagctccatccactctccggcaggggtctgagctgctatcctccccagagtcagtccctcggaccttctctctctgggtgatatggctttccagcccctggggaaggttctttgagcattggatagatgtgggtggtatgtaggggatggggagccattcctaatgcccccctgggagccaaattgcccccacttctttccttggcccccagccccactggaggctcttctgtgatctctcctcagactgcagggggctcgaagtctggaacagcatcccgagctgctggggtaggggctagggccagtgggccgggggtagggaggggcagggtctggagtataagaaacccttggagtccacttcagatatgggctaccacatctcagaagctcacagaacatattcattcattcattcattcattcatttgttcataacacattaattgcagtatctgtgctaagcactggaaatagaaagatgaatcttgggtcaggctcagtggctcatgcctgtaatcccagaactttgggaggccgaggtagaaggatcacttgagctcaaaagttcaagacgagcctgggcaacatggcaaatccccgtctctaccaaaaatacaaaaattaacaggacatggtggtgtgcatttgtggtcccagctactcaggaggctgaggcaggagaatcacttgagcctgggaggcaggggctacagtaagctgagactgcaccattgcacaccagcctgggtgacagagcaagactccgtctcaaaaaacaaaacaaaacaaaacaaaaacaaaaaacttgaaataaaagctaagaaagtcaagggtctaacttttttcccacgtactatttggattttgttttcgttttgtattttcttttttattgtgtataacatacatacataaaagtatgtaaagggtactgattttcttttttttttttttttttgagacagagtctcgctctgtcgctcaggctggagtgcagtggtgcaatctcggctcactgcaagctccgcctcccaggttcacgccattctcctgcctcagcctcccgagtagctgggactacaggcacccgccaccacgcctggctaatttttttttttttttagtagagacagggtttcaccgtgttagccaggatggtcttgatctcctgaccttgtgatccgcctgcctcagcctcccaaagtgctgggattacaggcgtgagccaccacgcccagccaaagggtactgatttccatgtccagttcttttttttttttttttttttggcggaatcttgctctgtcgcctaggctggactgcagtggtgtgatctcagctcactgcaacctctgccttctgggttcaagcgattctcctgcctcagcctcccaagcagctgggattacagacgtgcaccaccacgcacagctaatttttgtatttttagtagacatggagtttcaccatgctggccaggctggtcttgaactcctgacctcgtgatcctcccacctcggcctcccaaagtgctgggattacaggcatgagccgccacgtccggccaatttgtttttatatatgtatacacttgcataactagcacccagatcaatacataaatactgtgaatacatcacatactgtgatgttttctgaactactaaatgttttcaacttcattttctttttgccttcttaaaattaaagttggcctgcctctttggcaactcattaaagactattcaacaccagagttttgaaaacacagatgtgtatatcatggatttcatttcttccttcattaagtagacattgattcatttattcaacagatatttattaatttctgtgtaccaggcaaatccctggacactggaaatattaataaatcaataaatgaagatgacaaaaaacccgaccccacggagctggtgtcagggtcagggtgggggtgaggaaggacacaacaaacacatggagatgtgaagaatgcagtaagttagacagtgattagcactaaggagaacatttgtggaagggctggggaaggttgggagttgtagaggtcagggatggtctcattctggtgagcagagacctgaaagaggtgagggaggagccatatatttgagggaagagagaatagccagcaaaaagggcctggggtgggagtatgtcaggggtgtttaagaaatagtaaggagggggccgggcgcggtggctcacgcctgtaatcccagcactttgggaggccgaggctggcggatcacgaggtcaggagatcgagaccatcctggctaacacggtgaaaccccatctctacaaaaaatacaaaaaaatcagctgggcatggtggcaggcgcctgtagtcccagctactcgggagcctgaggcaggagaatggcttgaaccccaggaggcagagcttgcagtgagccgagatcacaccactgcactccagcctgggcgacagagccagactccatctcaaaaaaaaaaaaaggaaaaaaaaaagagagagaaacagtaaggaggtccttaataactctgcagcagagttattaaggacacaaatgccataggctgtgcgcgatggctcacgtctgcaatcccagcactttggggaagctgaggcaggaggattgcttgaggttaggagctcaagaccagcctggccaacatgagcgaaatcccatctctactaaaaatacaaaaactagccgggggtggtgacacacgcctgtaatcccagctactcgggtggctgaggcaagagaatcgcttgaacccaggaggtggaggttgcagtgagctatcgtgccaatgcactccagcctgggcaacagagcaagactccctctcaaaaaaaaaaaaggacacaagtatcaagaggtaaggtcagaaaggtcacagttctgaacagaggaaaatgacttgttttaaagaggttacaagatctttctgcagagggagaagcagggagaatagctcttctccgaccacacactagggtctccacgggcttggctttgggcagctgctaggagcaaagtctggtctgaaatgatgacacacgctctgccctccgagagcctcccagtctagggggtttgaaggaaactccaaagggtcagtcggggatgcagaagaggtgaggaagtctaagctgcgctctctttgcctctcccaccagccctgccctggctcaacgtgtcagcagatggtgacaacgtgcatctggttctgaatgtctctgaggagcagcacttcggcctctccctgtactggaatcaggtccagggccccccaaaaccccggtggcacaaaaacctggtgaggcctcccccttcccaagtccattcccactgtaggccgatgcctgtgcaaaggacgcagtgccatatcagagaggatccttgaagaggactcaccccaagcaagggaaaattggtgggggaacttctgccttcctggtttccttgactttggcctcctcctcttcctccttatcttctccaacctccttcctttatttgttccacagactggaccgcagatcattaccttgaaccacac

SEQ ID NO: 12589 - DNA, 1059 bp, Homo sapiens
tcccaggacagagagtgcacaaactacccagcacagccccctccgccccctctggaggctgaagagggattccagcccctgccacccacagacacgggctgactggggtgtctgccccccttgggggggggcagcacagggcctcaggcctgggtgccacctggcacctagaagatgcctgtgccctggttcttgctgtccttggcactgggccgaagcccagtggtcctttctctggagaggcttgtggggcctcaggacgctacccactgctctccgggcctctcctgccgcctctgggacagtgacatactctgcctgcctggggacatcgtgcctgctccgggccccgtgctggcgcctacgcacctgcagacagagctggtgctgaggtgccagaaggagaccgactgtgacctctgtctgcgtgtggctgtccacttggccgtgcatgcctctctccaggcccaagtcgtgctctccttccaggcctaccctactgcccgctgcgtcctgctggaggtgcaagtgcctgctgcccttgtgcagtttggtcagtctgtgggctctgtggtatatgactgcttcgaggctgccctagggagtgaggtacgaatctggtcctatactcagcccaggtacgagaaggaactcaaccacacacagcagctgcctgccctgccctggctcaacgtgtcagcagatggtgacaacgtgcatctggttctgaatgtctctgaggagcagcacttcggcctctccctgtactggaatcaggtccagggccccccaaaaccccggtggcacaaaaacctggtgaggcctcccccttcccaagtccattcccactgtaggccgatgcctgtgcaaaggacgcagtgccatatcagagaggatccttgaagaggactcaccccaagcaagggaaaattggtgggggaacttctgccttcctggtttccttgactttggcctcctcctcttcctccttatcttctccaacctccttcctttatttgttccacagactggaccgcagatcattaccttgaaccacac

SEQ ID NO: 12590 - DNA, 16508 bp, Homo sapiens
actccgtgctggaagtaggaggagagtcaggactcccaggacagagagtgcacaaactacccagcacagccccctccgccccctctggaggctgaagagggattccagcccctgccacccacagacacgggctgactggggtgtctgccccccttgggggggggcagcacagggcctcaggcctgggtgccacctggcacctagaagatgcctgtgccctggttcttgctgtccttggcactgggccgaagcccagtggtcctttctctggagaggcttgtggggcctcaggacgctacccactgctctccggtgagtctggaaccctggggagacgaggaaaggctcagggttcagtttttggctcagcaaagccttagcctggctcctgtcactgctgccactgccagaactgccctgtctggtctgtctggtgctgatggtagaagagaagaacggggaaggggcaagagctgggtctgtctttctctgggagggtctgggaatacggagccccagaaaaaggtaggtggaggtcttaggcagagaacagtgcctagatggtgggggcacaaattctgactctcctttctttccttcccagggcctctcctgccgcctctggggtaagtatccctacttttaaaaagaatttcccaggttggccgaagggagcagagctgtcccaggcccatgccctccatgcccacctcagcctaggacagccaagttctttggctctctgggtatgtcaggtgccaccaaattctgggcttggaacagcttcagctcccacccgctcctccacacacagacagtgacatactctgcctgcctggggacatcgtgcctgctccgggccccgtgctggcgcctacgcacctgcagacagagctggtgctgaggtgccagaaggagaccgactgtgacctctgtctgcgtgtggctgtccacttggccgtgcatggtgagcaagtcatcctgtgacagtgcatgtgtacacgtgagtgtgtctggggtgggcatgagggccaggggatctctcaagcagtgctaggcatcctcagtgttctcctggaggacaccagcagaaggacccccaggccagtgtggtctccccagcccctgcttcccagcactgggctttccagaaggaagccaacgccaaagccagccagcccagagcagggggcctcacccagggccttgctcttgggtccttctagggcactgggaagagcctgaagatgaggaaaagtttggaggagcagctgactcaggggtggaggagcctaggaatggtgaggagaacctggctggcccaactgccccatgccaaggcctggcctgccgctcctgggcctgactgacccctgccctgttgcccacagcctctctccaggcccaagtcgtgctctccttccaggcctaccctactgcccgctgcgtcctgctggaggtgcaagtgcctgctgcccttgtgcagtttggtcagtctgtggtatgcaaaataataataatcaccttctaaacctaaaatctataaaactttttcacatgcattatctctttgaggattacaaaagaattaaatttattgaaacccttcagtaccaggcattacagccagtgttttacaggtatcaacttatttaattctcacaacagccatgtgaggtgggactattcttttgattctgatcagcgctgtgggcaagtcccttcagcctgttatgcctcagcttttatgtctgtaaaatggggatgagaatagttctacttcatatgcttgactgcgagaaatcaccaagcgtttttcagggtgcttctactattttcccctcctaccagcagtgtatgggagtcctagttgcttcccatctttgccaacacttgatggtgtaattttattttatttttaaattaaatatatttgaattttaaatatatgggaccctccatgaatttgcatgtcatcctcaggcacgggccttgctaatcttttctgtattgttccagttgtagtatatgtggtgccaaaacaagcataagtgttgtaattgtcataatttttctgcatatgtagtggtttgccattgtggttttaatttgtatcttccaatgactgatgaagttgagcacttttttcacatgcttattggctatttgtgtaacttccttgtgaaatatctcttaaagtttttttgtttttgtttttgtttttgtttttgccacataaaaaaacaatagttctggccgggcacagtggttcacacctgtaatcccagcactttgggaggctgaggcgggcagatcacgaagtcaggagattgagaccatcctggctaacactgtgaaaccctgcctccactaaaaaaatacaaaaaattagccaggcatggtggtgggcgcctgtagacccagctactcgggaggcagaggcaggagaatggcgtgaacccgggaggtggagcttgcagtgagccgagatcgcgccactgcactccagcctgggcgacagagcgagattccgtctcaaaaaaaaagaatagtcccacctcacatgactgttgtgagaattaaattaagttggtacctgtaaaacactggatgtaatgcctggcactgaataatttcaataaatttaattcttttgtaatcctcaaaactacctgatgaggcattattagtatcctcattttccagatagataaaatgaggcttggagaggggaggtctgtgggctggatgcacttctctgtactcttggaccaaagaaagagtcctaccatacataccatggtatacttaccatggtgtaagtaccatggtgcagggtgttggggcttctccctgccttaggaggccacatgtacctggaaggtctatttccactggggtcaaatcactcaaaccctttgactttccctccaacctccagcccccagccaatatcctatctggagaattgtagactgggagaacatctgcttggtccatgtcacaagcagttgtaaggaacactgaggcactgggttgagtgtgagaaccacttctgtggggaggggtgtgccatattgtgttggggtgtctcatctccttagctttggccaggtgatctagcacagcagggtgggtgcagggatttaaatgtctagggccttttcccgccctggtgacactcttactgaggacatttgctttagaattgaggccccttgaaagaaaggtgaatagtagatttcaggctatacagtataaatacagtcattagttgggggaggagggcagtgagcagagtggtccctgcagatgatcccacagcccttggcctggattctgagccctgcaccgccagccttcctcacccctctcctcacagggctctgtggtatatgactgcttcgaggctgccctagggagtgaggtacgaatctggtcctatactcagcccaggtacgagaaggaactcaaccacacacagcagctgcctggtaagtggacccccaagtcctggccccctagcctctgtcccctctggccattccccctcctgatttcaccctcttctagctccatccactctccggcaggggtctgagctgctatcctccccagagtcagtccctcggaccttctctctctgggtgatatggctttccagcccctggggaaggttctttgagcattggatagatgtgggtggtatgtaggggatggggagccattcctaatgcccccctgggagccaaattgcccccacttctttccttggcccccagccccactggaggctcttctgtgatctctcctcagactgcagggggctcgaagtctggaacagcatcccgagctgctggggtaggggctagggccagtgggccgggggtagggaggggcagggtctggagtataagaaacccttggagtccacttcagatatgggctaccacatctcagaagctcacagaacatattcattcattcattcattcattcatttgttcataacacattaattgcagtatctgtgctaagcactggaaatagaaagatgaatcttgggtcaggctcagtggctcatgcctgtaatcccagaactttgggaggccgaggtagaaggatcacttgagctcaaaagttcaagacgagcctgggcaacatggcaaatccccgtctctaccaaaaatacaaaaattaacaggacatggtggtgtgcatttgtggtcccagctactcaggaggctgaggcaggagaatcacttgagcctgggaggcaggggctacagtaagctgagactgcaccattgcacaccagcctgggtgacagagcaagactccgtctcaaaaaacaaaacaaaacaaaacaaaaacaaaaaacttgaaataaaagctaagaaagtcaagggtctaacttttttcccacgtactatttggattttgttttcgttttgtattttcttttttattgtgtataacatacatacataaaagtatgtaaagggtactgattttcttttttttttttttttttgagacagagtctcgctctgtcgctcaggctggagtgcagtggtgcaatctcggctcactgcaagctccgcctcccaggttcacgccattctcctgcctcagcctcccgagtagctgggactacaggcacccgccaccacgcctggctaatttttttttttttttagtagagacagggtttcaccgtgttagccaggatggtcttgatctcctgaccttgtgatccgcctgcctcagcctcccaaagtgctgggattacaggcgtgagccaccacgcccagccaaagggtactgatttccatgtccagttcttttttttttttttttttttggcggaatcttgctctgtcgcctaggctggactgcagtggtgtgatctcagctcactgcaacctctgccttctgggttcaagcgattctcctgcctcagcctcccaagcagctgggattacagacgtgcaccaccacgcacagctaatttttgtatttttagtagacatggagtttcaccatgctggccaggctggtcttgaactcctgacctcgtgatcctcccacctcggcctcccaaagtgctgggattacaggcatgagccgccacgtccggccaatttgtttttatatatgtatacacttgcataactagcacccagatcaatacataaatactgtgaatacatcacatactgtgatgttttctgaactactaaatgttttcaacttcattttctttttgccttcttaaaattaaagttggcctgcctctttggcaactcattaaagactattcaacaccagagttttgaaaacacagatgtgtatatcatggatttcatttcttccttcattaagtagacattgattcatttattcaacagatatttattaatttctgtgtaccaggcaaatccctggacactggaaatattaataaatcaataaatgaagatgacaaaaaacccgaccccacggagctggtgtcagggtcagggtgggggtgaggaaggacacaacaaacacatggagatgtgaagaatgcagtaagttagacagtgattagcactaaggagaacatttgtggaagggctggggaaggttgggagttgtagaggtcagggatggtctcattctggtgagcagagacctgaaagaggtgagggaggagccatatatttgagggaagagagaatagccagcaaaaagggcctggggtgggagtatgtcaggggtgtttaagaaatagtaaggagggggccgggcgcggtggctcacgcctgtaatcccagcactttgggaggccgaggctggcggatcacgaggtcaggagatcgagaccatcctggctaacacggtgaaaccccatctctacaaaaaatacaaaaaaatcagctgggcatggtggcaggcgcctgtagtcccagctactcgggagcctgaggcaggagaatggcttgaaccccaggaggcagagcttgcagtgagccgagatcacaccactgcactccagcctgggcgacagagccagactccatctcaaaaaaaaaaaaaggaaaaaaaaaagagagagaaacagtaaggaggtccttaataactctgcagcagagttattaaggacacaaatgccataggctgtgcgcgatggctcacgtctgcaatcccagcactttggggaagctgaggcaggaggattgcttgaggttaggagctcaagaccagcctggccaacatgagcgaaatcccatctctactaaaaatacaaaaactagccgggggtggtgacacacgcctgtaatcccagctactcgggtggctgaggcaagagaatcgcttgaacccaggaggtggaggttgcagtgagctatcgtgccaatgcactccagcctgggcaacagagcaagactccctctcaaaaaaaaaaaaggacacaagtatcaagaggtaaggtcagaaaggtcacagttctgaacagaggaaaatgacttgttttaaagaggttacaagatctttctgcagagggagaagcagggagaatagctcttctccgaccacacactagggtctccacgggcttggctttgggcagctgctaggagcaaagtctggtctgaaatgatgacacacgctctgccctccgagagcctcccagtctagggggtttgaaggaaactccaaagggtcagtcggggatgcagaagaggtgaggaagtctaagctgcgctctctttgcctctcccaccagccctgccctggctcaacgtgtcagcagatggtgacaacgtgcatctggttctgaatgtctctgaggagcagcacttcggcctctccctgtactggaatcaggtccagggccccccaaaaccccggtggcacaaaaacctggtgaggcctcccccttcccaagtccattcccactgtaggccgatgcctgtgcaaaggacgcagtgccatatcagagaggatccttgaagaggactcaccccaagcaagggaaaattggtgggggaacttctgccttcctggtttccttgactttggcctcctcctcttcctccttatcttctccaacctccttcctttatttgttccacagactggaccgcagatcattaccttgaaccacacagacctggttccctgcctctgtattcaggtaggagcagagtctagctgggtgccagaagaggagtgggaagatgatgatgggggtgatccctgccttcctggtctcaccattcttcaaacccttcattgaggtggagactgtggctccctggggtggctggccctcccttgacccttgctgtcctatgccttctgtctattacattccctgaatgctctccctgatcctccacagaactcctgcttattcttcatggccccattcaaatgtcaccttctccttgaaacctttccctactcctccagttctgtctttgtgttcccctggcgggcagagcatgtgctacgaacttggactggtttgaatcttggctcttgccatttgctagctgtgtaaccttgggcaagtcacttcacctctgtgagcctgtttctcatctgtaaaatgggaataataatagtaacagcctcatggggctgttataagaatgtgtgccacacccaggcttaaatatgctggctctttcctcttcctctgtacatttatttatttttttagacaaggtctcactctgttgcccaggctggagtgcagtggcacaatcatggcacactgcagcctcagccccatgggctcaagtgatcctcctgtctcagcctcccaagtagctggaactactggtgagcactaccatactcagctagtttttttttgttttgtgtagagacggggtcttgctatgttacccaggctgttctgaattcctgggcttatgctatcctcccacctcagcctcccaccaagtgctgggattataagcatgagccactgtggcttgccctgattgcactttttttttttttttttttaagacagagtctttctctgtcgcccaggctggagcaccgtggcgtgatctcggctcactgcaagctgcttctcctgggttcacgccattctcctgcctcagcctcgctgagtagctgggactacaggtgcctgcaaccacgcccagctaattttttgtattttcagtaaagacagggtttcaccgtgttagccaggatggtctcgatctcctgaccttatgatccacaagcctcgtcctcccaaagtgctgggattacaggcatgacccactgtgcccagccgctgattgcacatttaattggtcatcaggtctcatccatcttacctctgacattaatgtctctcattttctttccccctcctctccatctcagtccagcttagggctctatcatctgttttctagactgtttcaacacctccaagctcccctcccttcccatcactttcctggcattctgggcccatattctgcccccaacggtgccttttcactctattttccccatgattccccttcatgagaacattgttacatccagtggagctacttaccaagatacagctagctccctgccttttctcaggtggttcccattacctcaaatgccctcacctccttcccaaagcttttccccaaccacccggcctctcctagctccaaatccccttgcacttctatctttccttgtccatttatcacttcatttcttttattttcttaaattttttttttttttttagagacagcattttgctctgtcacccatggtagagtgcagtggcatgaacacgtctcattgcagccccaagctcccaggttcaagggatcctcctgcctcagcctctgcagctgggactgcaggcatgcgccaccatgcctggctaattgtttccttttttttttttttttttttttaatggagtttcactcttttgcccaggatggagtgcagtggcgtgatctcggctcactgcaacttccgcctcccaggttcaagccattctcctgcctcagcctcccaagtagctgagattacaggcacacaccaccatgcccagctaatttttgtatttttagtagagacagggtttcaccatgttggtcaggctggtcccaaattcctgacctcgtgatccacccgcctcggccgcccaaagtgctgggattacaggcgtgagccactgtgcccagcctgttttcattttttaatgttttgtggcgatgggccaccacacccagctcaatcacttactttcttatttgggcatctaatttcttcttgtacacaacagatgctcaataaatattatgaaatgaatgagtgttttactaatttatataaatattttatccttactacaagtgtgagtttgtgatttccttgaaggcaagcaaatcatatctaattcaaatgtaatagctttgcaagagccttgcacatagcgcctacttgttttttgtttttttgtgtttttgttttttttttgtttttttgtcttttttgagacagagtctcgctctattggcaggctggagtacagtggcgtgatctcggctcactgcaatctctgcctcctggattcaagcaattcttctgcctcagcctcccaagtagctgggactacaagtgcatgccaccatgcccggctaatttttgtattttcagtagagacggggtttcagcatgttggccagatggtctcgatctcttgacctcgtgatccgcccaccttggcctcccaaagtgctgggattacaggggtgagccaccgcgcccagccttgttttgtttttaaacaaggtaacagtatgaggtcctcactgttgaatgagtgaataaatgttactgcctaacacagccataggacacagcagatgttcatgagatgtatgctgtgatttaaatggcttcattgccaaacacagtgcctgccacatagtcggtgttcctaactaaaggcttgatggataaattaatgtattacctctagtgcttagcatagagctatgcacataataggcactcttgaaatgtctgttgaaagaataaatgaatgtgtccttagaacttagcacattccccaacacatagcaggtgcttacacaagtgattgtggaatgaattaaaattaattatccaccaggcacagtggctcacacctgtaatcccagcactttgggaggccaaggtgggtggatcacgaggtcaggagtttgagaccagcctggcctaacatagtgaaacccagtctctactaaaagtacaaaaattagccaggcatggtgatgtgcgcctgtagtccctgctacttgggaagctgaggcaggagaatcacttgaacccaggaggcggaggttgtggtgagctgagatcacaccactgcactccagcctgggcaacagagtgagattccatctcaaaaaataaaaaaataataaaaatttaattatccaaggtctcttgtgcttgccatactgctaagacacaatggtaggcactcattaaaagtctgttgaatgggccaggcgcggtggctcacgcttgtaatcccaacactttgggaggctgagacgggtggatcacttgaggtcaggagttcgagaccagcctgatcaatgtggtgaaaccccatctctactaaaaatacaaaaattaaccagttagccggccgttgtggcatgttcctgtaatcgcagctcctcaggagactgagatgggagaatcgcttgaacctgggaggtggaggttgtagtgagccaagattgcaccactgcactccagcctgggcgacagagcgagactctatctcaaaaaaaaaaaaaagtttgttaatgaagatgttgccagtgcccagcattatgtttgctggaagaatagatgtgagcacctccaggttttgtaaaaggcaggaagacccagcaagtgtttgtgaaatacctgctgaatgagtgcatccccactgtccagcagagggccaggcacatgcccatggaggggacctgagcagacccccatttcctttccaggtgtggcctctggaacctgactccgttaggacgaacatctgccccttcagggagggtgagccgaccggcctggggctggggttggggtgttgcgagcgatgggtacctggcctgcggtgactgtgccctttccttgcagacccccgcgcacaccagaacctctggcaagccgcccgactgcaactgctgaccctgcagagctggctgctggacgcaccgtgctcgctgcccgcagaagcggcactgtgctggcgggctccgggtggggacccctgccagccactggtcccaccgctttcctgggagaacgtcactgtggacgtaagtgaagcagagggcacctcccgtggtgaggggagagtggggaaccgggggtccccttttgtgatcccacccattcctctctttccacagaaggttctcgagttcccattgctgaaaggccaccctaacctctgtgttcaggtcagaaaggggtgcatagtgctgggctggaggctggacctgggcagaccccccagccaagggggtcttagttcttgggccgctaaagcatagtggttgccagcttcctctatgggagttccactgcctactttagtagtgcgcgggaccctgggcaactcacttcacctctctgaacgtcagtttcctcatctgtttaatgcagatgataatacagtaactacctcatggagtggttgtgacaatgaaataagagaagtgcttccccttaggaatcggtacagactaaatgctccataaatgtagccacttttattattgctatccttattctatttccatacctgtagaatgggttgctctacagtttcaaagggtgattataagaacattcactcatccggccaggcgcggtggctcacgcctgtaatcccagcactttgggaggccgaggcgggcagatcacgaggtcaggacatcaagaccatcctggctaacatggtgaaaccccatctctactaaaaatacaaaaaattagccggtcgtggtggtgggcacctgtagtcccagctactaggaaggctggggcaggagaatggcgtgaacctgggaggctgagcttgcagtgagctgagagggcgccactgcactccagcctgggtgacagagtgagactgggcgacagagtgaaactccgtctcaaaaaaaaaaaaaattcactcattcaagattttttgagcagcacaagtcactgttttaggcacttgtgatagaccctaacatctctaccctcatagaacttatattgtaatggagaaaggcaggcaacagacattgtaaataaatcatatagtatcttaaaattgcatacaaataccatgggaaagggataaggtgggactggggttgcaatttttagcagggtggtcatgtgagaaaggaatctctttgagaaggttagatgagaggggaaccatgctccgtaagacataaaaacagctttagggtcagaagacgctttatacagatgatctcacaaggctggggcagagaaagatgtagtgattcctaatcacccagccttgaatccacatctgcctcaggtcagattgagtgcagattcccaacccaacaggccttctgttgcctgccccattctggtctttctgcctttggcttttgcttttcttagtggccctaaccatggtctcttcccagcaggtgaacagctcggagaagctgcagctgcaggagtgcttgtgggctggtgagttgggcctgggggcagctggggcagggccacctcctaggggtgaaggtcagggcatgggaggcaggcaagtggccaatcccagcaaggatgggtcttggtcagagtggcctctcaccccttccagactccctggggcctctcaaagacgatgtgctactgttggagacacgaggcccccaggacaacagatccctctgtgccttggaacccagtggctgtacttcactacccagcaaagcctccacggttaggactgggcgaccctcctccacagatctctccaaatgcatctcacatctggcctcaaattttcactccatccaccctgtgccggtctctgggaacatggggggtgactcagaccagggccatattcagcggcatcaccaaagtctcccagtcccctctacctcattctacccagctgtagcctggtaggtgctgccctaagggtgctacctccaggtaacagtgcccccatcctttggcttggcagagggcagctcgccttggagagtacttactacaagacctgcagtcaggccagtgtctgcaggtgagctggtggaagaagggccccacctcaatgcctaggggcaacaggcctaaaactagcactcacctactgtctatttaggcttattttatgttcagccctgggaaagttaagagtagaagaagcacagttcctatccccaaggagcacactgttggctagacacccataaacagataaccacacctacaggtgctaagttttgggttccagggagagcttccgggaagaatttcttcctataagccagatttggtatggaagaagtcataccctagtcagtgggcacagcacaaaggcagagcagctgcaggaaccttagccgggagatatgcatagttgatgctgggaatttggagatcaggccaccagagcttggtgaatattggaacacctggctggtgccctggatttggttctgtttgtatcttacagctatgggacgatgacttgggagcgctatgggcctgccccatggacaaatgtgagtattgtaagaactgcctttcctttctgtaccaggagtggggatcttgacagggaccactcttgggcacagcacatgcaatggccttgtccttccctgagatcagataaacagagggtcattccttcattcactcaaaaaatgatgagagcttgcagggatcgcaggaacaccaaaaatataaatccttgcccccgccccacccctagaagactagcaagacatgagccagtcacttacatttaaagtgggagctactgaagcaccaccaagtgttcagtgctgtaaatgcatacaatgtggacctgacctgggtggggtgaggggtgaggggctcagggggaaggttccagcaaaactctgaagactgagctaggggaagggggtagagatacagggtcttggacaggcaggtttctgtcatgagataaagatgcaggagacatgtaggggatttggatcttatgttgagagcagcaggagctacgatcaaatttttatatatttcacacacacacacacacatatatatatatatatatatatatatatatatacttatttttttatttatttttgaggcagagtctcactctgttgcccaggctggagtgcaatggcgcgatctcggctaactgcaacctctgcctcccgggttcaagcaattctctacctcagcctcccgggtagctgggattaataggcgcctgccaccatgccctgctaatttttgtatttttagtagagatggggtttcaccatcttggccaggctggtcttgaactcctgacctcgtgatccgcccgcgtcggcctcccaaagtgctgggattatagtcgtgagtcaccgcacctggcccaaatttatatttttaaaagatctctgaggctgtcatgaatcaattcaaggcaaatcaattggaggtaaaaaaaaaaaaaaaaagacagggcagggacaccaggtagttgcagacacccaggacagcaagatcaagggcccagcaaccctagcttaggggagaaaaacagctgacattttagcacttaagatgctcggcattgtgttaagtatgtattaacacattgtgttaagctttatatgtattaatatatttagtcctcacaccaaccctatgacacaggtacaactttacagaggagaaaactgaggcagagggtgacattacttattcaaagacccctaaacagatggagctatattcatccactggctctgacactgtgctgtggactctgggcaaatcatttcttcgttttttgttttgttttgttttgttttgagaggagtctcaccctgtcgcccaggctggagtgcaatggcgcgatctcggctcactgcaacctctgcctcccgagttcaagcgattctcttgcctcagcctcccgagtagctgggattacaggcgtgtgccaccacgcccggctaattttttgtatttttagtagagacggggtttcaccgtgttagccaggatggtcttgatgtcctgacctcgtgatctgcccgcctcggcctcccgaagtgctgggattatataaaggcatgagccaccgcacccggcccaattcatttctgttaagtctcagtttttcttctctgtggagggtaagtttctaactcttcttctctgggtctcccagacatccacaagcgctgggccctcgtgtggctggcctgcctactctttgccgctgcgctttccctcatcctccttctcaaaaaggatcacgcgaaaggtgagcgcttcccggctccccattcccctgggggaggaccagagtggctgtgggagttctccgagggaaagcggcggccgagctcactggctgcctccgcccctctcccctaacagggtggctgaggctcttgaaacaggacgtccgctcggggggtgagtgggagcaagcgctgggcggagggccgcccccggggagccaggcctgtgccagctcacctcttccctccccatctgttttctccggcagcggccgccaggggccgcgcggctctgctcctctactcagccgatgactcgggtttcgagcgcctggtgggcgccctggcgtcggccctgtgccagctgccgctgcgcgtggccgtagacctgtggagccgtcgtgaactgagcgcgcaggggcccgtggcttggtttcacgcgcagcggcgccagaccctgcaggagggcggcgtggtggtcttgctcttctctcccggtgcggtggcgctgtgcagcgagtggctacaggatggggtgtccgggcccggggcgcacggcccgcacgacgccttccgcgcctcgctcagctgcgtgctgcccgacttcttgcagggccgggcgcccggcagctacgtgggggcctgcttcgacaggctgctccacccggacgccgtacccgcccttttccgcaccgtgcccgtcttcacactgccctcccaactgccagacttcctgggggccctgcagcagcctcgcgccccgcgttccgggcggctccaagagagagcggagcaagtgtcccgggcccttcagccagccctggatagctacttccatcccccggggactcccgcgccgggacgcggggtgggaccaggcgcgggacctggggcgggggacgggacttaaataaaggcagacgctgtttttct

SEQ ID NO: 12591 - DNA, 2499 bp, Homo sapiens
actccgtgctggaagtaggaggagagtcaggactcccaggacagagagtgcacaaactacccagcacagccccctccgccccctctggaggctgaagagggattccagcccctgccacccacagacacgggctgactggggtgtctgccccccttgggggggggcagcacagggcctcaggcctgggtgccacctggcacctagaagatgcctgtgccctggttcttgctgtccttggcactgggccgaagcccagtggtcctttctctggagaggcttgtggggcctcaggacgctacccactgctctccgggcctctcctgccgcctctgggacagtgacatactctgcctgcctggggacatcgtgcctgctccgggccccgtgctggcgcctacgcacctgcagacagagctggtgctgaggtgccagaaggagaccgactgtgacctctgtctgcgtgtggctgtccacttggccgtgcatgggcactgggaagagcctgaagatgaggaaaagtttggaggagcagctgactcaggggtggaggagcctaggaatgcctctctccaggcccaagtcgtgctctccttccaggcctaccctactgcccgctgcgtcctgctggaggtgcaagtgcctgctgcccttgtgcagtttggtcagtctgtgggctctgtggtatatgactgcttcgaggctgccctagggagtgaggtacgaatctggtcctatactcagcccaggtacgagaaggaactcaaccacacacagcagctgcctgccctgccctggctcaacgtgtcagcagatggtgacaacgtgcatctggttctgaatgtctctgaggagcagcacttcggcctctccctgtactggaatcaggtccagggccccccaaaaccccggtggcacaaaaacctggtgaggcctcccccttcccaagtccattcccactgtaggccgatgcctgtgcaaaggacgcagtgccatatcagagaggatccttgaagaggactcaccccaagcaagggaaaattggtgggggaacttctgccttcctggtttccttgactttggcctcctcctcttcctccttatcttctccaacctccttcctttatttgttccacagactggaccgcagatcattaccttgaaccacacagacctggttccctgcctctgtattcaggtgtggcctctggaacctgactccgttaggacgaacatctgccccttcagggaggacccccgcgcacaccagaacctctggcaagccgcccgactgcaactgctgaccctgcagagctggctgctggacgcaccgtgctcgctgcccgcagaagcggcactgtgctggcgggctccgggtggggacccctgccagccactggtcccaccgctttcctgggagaacgtcactgtggacaaggttctcgagttcccattgctgaaaggccaccctaacctctgtgttcaggtgaacagctcggagaagctgcagctgcaggagtgcttgtgggctgactccctggggcctctcaaagacgatgtgctactgttggagacacgaggcccccaggacaacagatccctctgtgccttggaacccagtggctgtacttcactacccagcaaagcctccacgctatgggacgatgacttgggagcgctatgggcctgccccatggacaaatacatccacaagcgctgggccctcgtgtggctggcctgcctactctttgccgctgcgctttccctcatcctccttctcaaaaaggatcacgcgaaagggtggctgaggctcttgaaacaggacgtccgctcgggggcggccgccaggggccgcgcggctctgctcctctactcagccgatgactcgggtttcgagcgcctggtgggcgccctggcgtcggccctgtgccagctgccgctgcgcgtggccgtagacctgtggagccgtcgtgaactgagcgcgcaggggcccgtggcttggtttcacgcgcagcggcgccagaccctgcaggagggcggcgtggtggtcttgctcttctctcccggtgcggtggcgctgtgcagcgagtggctacaggatggggtgtccgggcccggggcgcacggcccgcacgacgccttccgcgcctcgctcagctgcgtgctgcccgacttcttgcagggccgggcgcccggcagctacgtgggggcctgcttcgacaggctgctccacccggacgccgtacccgcccttttccgcaccgtgcccgtcttcacactgccctcccaactgccagacttcctgggggccctgcagcagcctcgcgccccgcgttccgggcggctccaagagagagcggagcaagtgtcccgggcccttcagccagccctggatagctacttccatcccccggggactcccgcgccgggacgcggggtgggaccaggcgcgggacctggggcgggggacgggacttaaataaaggcagacgctgtttttct

SEQ ID NO: 12592 - DNA, 968 bp, Homo sapiens
actccgtgctggaagtaggaggagagtcaggactcccaggacagagagtgcacaaactacccagcacagccccctccgccccctctggaggctgaagagggattccagcccctgccacccacagacacgggctgactggggtgtctgccccccttgggggggggcagcacagggcctcaggcctgggtgccacctggcacctagaagatgcctgtgccctggttcttgctgtccttggcactgggccgaagcccagtggtcctttctctggagaggcttgtggggcctcaggacgctacccactgctctccggtgagtctggaaccctggggagacgaggaaaggctcagggttcagtttttggctcagcaaagccttagcctggctcctgtcactgctgccactgccagaactgccctgtctggtctgtctggtgctgatggtagaagagaagaacggggaaggggcaagagctgggtctgtctttctctgggagggtctgggaatacggagccccagaaaaaggtaggtggaggtcttaggcagagaacagtgcctagatggtgggggcacaaattctgactctcctttctttccttcccagggcctctcctgccgcctctggggtaagtatccctacttttaaaaagaatttcccaggttggccgaagggagcagagctgtcccaggcccatgccctccatgcccacctcagcctaggacagccaagttctttggctctctgggtatgtcaggtgccaccaaattctgggcttggaacagcttcagctcccacccgctcctccacacacagacagtgacatactctgcctgcctggggacatcgtgcctgctccgggccccgtgctggcgcctacgcacctgcagacagagctggtgctgaggtgccagaaggagaccgactgtgacctctgtctgcgtgtggctgtccacttggccgtgcatgg

SEQ ID NO: 12593 - DNA, 547 bp, Homo sapiens
actccgtgctggaagtaggaggagagtcaggactcccaggacagagagtgcacaaactacccagcacagccccctccgccccctctggaggctgaagagggattccagcccctgccacccacagacacgggctgactggggtgtctgccccccttgggggggggcagcacagggcctcaggcctgggtgccacctggcacctagaagatgcctgtgccctggttcttgctgtccttggcactgggccgaagcccagtggtcctttctctggagaggcttgtggggcctcaggacgctacccactgctctccgggcctctcctgccgcctctggggtgccaccaaattctgggcttggaacagcttcagctcccacccgctcctccacacacagacagtgacatactctgcctgcctggggacatcgtgcctgctccgggccccgtgctggcgcctacgcacctgcagacagagctggtgctgaggtgccagaaggagaccgactgtgacctctgtctgcgtgtggctgtccacttggccgtgcatgg

SEQ ID NO: 12594 - DNA, 4593 bp, Homo sapiens
catccggccaggcgcggtggctcacgcctgtaatcccagcactttgggaggccgaggcgggcagatcacgaggtcaggacatcaagaccatcctggctaacatggtgaaaccccatctctactaaaaatacaaaaaattagccggtcgtggtggtgggcacctgtagtcccagctactaggaaggctggggcaggagaatggcgtgaacctgggaggctgagcttgcagtgagctgagagggcgccactgcactccagcctgggtgacagagtgagactgggcgacagagtgaaactccgtctcaaaaaaaaaaaaaattcactcattcaagattttttgagcagcacaagtcactgttttaggcacttgtgatagaccctaacatctctaccctcatagaacttatattgtaatggagaaaggcaggcaacagacattgtaaataaatcatatagtatcttaaaattgcatacaaataccatgggaaagggataaggtgggactggggttgcaatttttagcagggtggtcatgtgagaaaggaatctctttgagaaggttagatgagaggggaaccatgctccgtaagacataaaaacagctttagggtcagaagacgctttatacagatgatctcacaaggctggggcagagaaagatgtagtgattcctaatcacccagccttgaatccacatctgcctcaggtcagattgagtgcagattcccaacccaacaggccttctgttgcctgccccattctggtctttctgcctttggcttttgcttttcttagtggccctaaccatggtctcttcccagcaggtgaacagctcggagaagctgcagctgcaggagtgcttgtgggctggtgagttgggcctgggggcagctggggcagggccacctcctaggggtgaaggtcagggcatgggaggcaggcaagtggccaatcccagcaaggatgggtcttggtcagagtggcctctcaccccttccagactccctggggcctctcaaagacgatgtgctactgttggagacacgaggcccccaggacaacagatccctctgtgccttggaacccagtggctgtacttcactacccagcaaagcctccacggttaggactgggcgaccctcctccacagatctctccaaatgcatctcacatctggcctcaaattttcactccatccaccctgtgccggtctctgggaacatggggggtgactcagaccagggccatattcagcggcatcaccaaagtctcccagtcccctctacctcattctacccagctgtagcctggtaggtgctgccctaagggtgctacctccaggtaacagtgcccccatcctttggcttggcagagggcagctcgccttggagagtacttactacaagacctgcagtcaggccagtgtctgcaggtgagctggtggaagaagggccccacctcaatgcctaggggcaacaggcctaaaactagcactcacctactgtctatttaggcttattttatgttcagccctgggaaagttaagagtagaagaagcacagttcctatccccaaggagcacactgttggctagacacccataaacagataaccacacctacaggtgctaagttttgggttccagggagagcttccgggaagaatttcttcctataagccagatttggtatggaagaagtcataccctagtcagtgggcacagcacaaaggcagagcagctgcaggaaccttagccgggagatatgcatagttgatgctgggaatttggagatcaggccaccagagcttggtgaatattggaacacctggctggtgccctggatttggttctgtttgtatcttacagctatgggacgatgacttgggagcgctatgggcctgccccatggacaaatgtgagtattgtaagaactgcctttcctttctgtaccaggagtggggatcttgacagggaccactcttgggcacagcacatgcaatggccttgtccttccctgagatcagataaacagagggtcattccttcattcactcaaaaaatgatgagagcttgcagggatcgcaggaacaccaaaaatataaatccttgcccccgccccacccctagaagactagcaagacatgagccagtcacttacatttaaagtgggagctactgaagcaccaccaagtgttcagtgctgtaaatgcatacaatgtggacctgacctgggtggggtgaggggtgaggggctcagggggaaggttccagcaaaactctgaagactgagctaggggaagggggtagagatacagggtcttggacaggcaggtttctgtcatgagataaagatgcaggagacatgtaggggatttggatcttatgttgagagcagcaggagctacgatcaaatttttatatatttcacacacacacacacacatatatatatatatatatatatatatatatatacttatttttttatttatttttgaggcagagtctcactctgttgcccaggctggagtgcaatggcgcgatctcggctaactgcaacctctgcctcccgggttcaagcaattctctacctcagcctcccgggtagctgggattaataggcgcctgccaccatgccctgctaatttttgtatttttagtagagatggggtttcaccatcttggccaggctggtcttgaactcctgacctcgtgatccgcccgcgtcggcctcccaaagtgctgggattatagtcgtgagtcaccgcacctggcccaaatttatatttttaaaagatctctgaggctgtcatgaatcaattcaaggcaaatcaattggaggtaaaaaaaaaaaaaaaaagacagggcagggacaccaggtagttgcagacacccaggacagcaagatcaagggcccagcaaccctagcttaggggagaaaaacagctgacattttagcacttaagatgctcggcattgtgttaagtatgtattaacacattgtgttaagctttatatgtattaatatatttagtcctcacaccaaccctatgacacaggtacaactttacagaggagaaaactgaggcagagggtgacattacttattcaaagacccctaaacagatggagctatattcatccactggctctgacactgtgctgtggactctgggcaaatcatttcttcgttttttgttttgttttgttttgttttgagaggagtctcaccctgtcgcccaggctggagtgcaatggcgcgatctcggctcactgcaacctctgcctcccgagttcaagcgattctcttgcctcagcctcccgagtagctgggattacaggcgtgtgccaccacgcccggctaattttttgtatttttagtagagacggggtttcaccgtgttagccaggatggtcttgatgtcctgacctcgtgatctgcccgcctcggcctcccgaagtgctgggattatataaaggcatgagccaccgcacccggcccaattcatttctgttaagtctcagtttttcttctctgtggagggtaagtttctaactcttcttctctgggtctcccagacatccacaagcgctgggccctcgtgtggctggcctgcctactctttgccgctgcgctttccctcatcctccttctcaaaaaggatcacgcgaaaggtgagcgcttcccggctccccattcccctgggggaggaccagagtggctgtgggagttctccgagggaaagcggcggccgagctcactggctgcctccgcccctctcccctaacagggtggctgaggctcttgaaacaggacgtccgctcggggggtgagtgggagcaagcgctgggcggagggccgcccccggggagccaggcctgtgccagctcacctcttccctccccatctgttttctccggcagcggccgccaggggccgcgcggctctgctcctctactcagccgatgactcgggtttcgagcgcctggtgggcgccctggcgtcggccctgtgccagctgccgctgcgcgtggccgtagacctgtggagccgtcgtgaactgagcgcgcaggggcccgtggcttggtttcacgcgcagcggcgccagaccctgcaggagggcggcgtggtggtcttgctcttctctcccggtgcggtggcgctgtgcagcgagtggctacaggatggggtgtccgggcccggggcgcacggcccgcacgacgccttccgcgcctcgctcagctgcgtgctgcccgacttcttgcagggccgggcgcccggcagctacgtgggggcctgcttcgacaggctgctccacccggacgccgtacccgcccttttccgcaccgtgcccgtcttcacactgccctcccaactgccagacttcctgggggccctgcagcagcctcgcgccccgcgttccgggcggctccaagagagagcggagcaagtgtcccgggcccttcagccagccctggatagctacttccatcccccggggactcccgcgccgggacgcggggtgggaccaggcgcgggacctggggcgggggacgggacttaaataaaggcagacgctgtttttctaccc

SEQ ID NO: 12595 - DNA, 1865 bp, Homo sapiens
catccggccaggcgcggtggctcacgcctgtaatcccagcactttgggaggccgaggcgggcagatcacgaggtcaggacatcaagaccatcctggctaacatggtgaaaccccatctctactaaaaatacaaaaaattagccggtcgtggtggtgggcacctgtagtcccagctactaggaaggctggggcaggagaatggcgtgaacctgggaggctgagcttgcagtgagctgagagggcgccactgcactccagcctgggtgacagagtgagactgggcgacagagtgaaactccgtctcaaaaaaaaaaaaaattcactcattcaagattttttgagcagcacaagtcactgttttaggcacttgtgatagaccctaacatctctaccctcatagaacttatattgtaatggagaaaggcaggcaacagacattgtaaataaatcatatagtatcttaaaattgcatacaaataccatgggaaagggataaggtgggactggggttgcaatttttagcagggtggtcatgtgagaaaggaatctctttgagaaggttagatgagaggggaaccatgctccgtaagacataaaaacagctttagggtcagaagacgctttatacagatgatctcacaaggctggggcagagaaagatgtagtgattcctaatcacccagccttgaatccacatctgcctcaggtcagattgagtgcagattcccaacccaacaggccttctgttgcctgccccattctggtctttctgcctttggcttttgcttttcttagtggccctaaccatggtctcttcccagcaggtgaacagctcggagaagctgcagctgcaggagtgcttgtgggctgactccctggggcctctcaaagacgatgtgctactgttggagacacgaggcccccaggacaacagatccctctgtgccttggaacccagtggctgtacttcactacccagcaaagcctccacgagggcagctcgccttggagagtacttactacaagacctgcagtcaggccagtgtctgcagctatgggacgatgacttgggagcgctatgggcctgccccatggacaaatacatccacaagcgctgggccctcgtgtggctggcctgcctactctttgccgctgcgctttccctcatcctccttctcaaaaaggatcacgcgaaagcggccgccaggggccgcgcggctctgctcctctactcagccgatgactcgggtttcgagcgcctggtgggcgccctggcgtcggccctgtgccagctgccgctgcgcgtggccgtagacctgtggagccgtcgtgaactgagcgcgcaggggcccgtggcttggtttcacgcgcagcggcgccagaccctgcaggagggcggcgtggtggtcttgctcttctctcccggtgcggtggcgctgtgcagcgagtggctacaggatggggtgtccgggcccggggcgcacggcccgcacgacgccttccgcgcctcgctcagctgcgtgctgcccgacttcttgcagggccgggcgcccggcagctacgtgggggcctgcttcgacaggctgctccacccggacgccgtacccgcccttttccgcaccgtgcccgtcttcacactgccctcccaactgccagacttcctgggggccctgcagcagcctcgcgccccgcgttccgggcggctccaagagagagcggagcaagtgtcccgggcccttcagccagccctggatagctacttccatcccccggggactcccgcgccgggacgcggggtgggaccaggcgcgggacctggggcgggggacgggacttaaataaaggcagacgctgtttttctaccc

SEQ ID NO: 12596 - DNA, 16520 bp, Homo sapiens
aaaacgaaagcactccgtgctggaagtaggaggagagtcaggactcccaggacagagagtgcacaaactacccagcacagccccctccgccccctctggaggctgaagagggattccagcccctgccacccacagacacgggctgactggggtgtctgccccccttgggggggggcagcacagggcctcaggcctgggtgccacctggcacctagaagatgcctgtgccctggttcttgctgtccttggcactgggccgaagcccagtggtcctttctctggagaggcttgtggggcctcaggacgctacccactgctctccggtgagtctggaaccctggggagacgaggaaaggctcagggttcagtttttggctcagcaaagccttagcctggctcctgtcactgctgccactgccagaactgccctgtctggtctgtctggtgctgatggtagaagagaagaacggggaaggggcaagagctgggtctgtctttctctgggagggtctgggaatacggagccccagaaaaaggtaggtggaggtcttaggcagagaacagtgcctagatggtgggggcacaaattctgactctcctttctttccttcccagggcctctcctgccgcctctggggtaagtatccctacttttaaaaagaatttcccaggttggccgaagggagcagagctgtcccaggcccatgccctccatgcccacctcagcctaggacagccaagttctttggctctctgggtatgtcaggtgccaccaaattctgggcttggaacagcttcagctcccacccgctcctccacacacagacagtgacatactctgcctgcctggggacatcgtgcctgctccgggccccgtgctggcgcctacgcacctgcagacagagctggtgctgaggtgccagaaggagaccgactgtgacctctgtctgcgtgtggctgtccacttggccgtgcatggtgagcaagtcatcctgtgacagtgcatgtgtacacgtgagtgtgtctggggtgggcatgagggccaggggatctctcaagcagtgctaggcatcctcagtgttctcctggaggacaccagcagaaggacccccaggccagtgtggtctccccagcccctgcttcccagcactgggctttccagaaggaagccaacgccaaagccagccagcccagagcagggggcctcacccagggccttgctcttgggtccttctagggcactgggaagagcctgaagatgaggaaaagtttggaggagcagctgactcaggggtggaggagcctaggaatggtgaggagaacctggctggcccaactgccccatgccaaggcctggcctgccgctcctgggcctgactgacccctgccctgttgcccacagcctctctccaggcccaagtcgtgctctccttccaggcctaccctactgcccgctgcgtcctgctggaggtgcaagtgcctgctgcccttgtgcagtttggtcagtctgtggtatgcaaaataataataatcaccttctaaacctaaaatctataaaactttttcacatgcattatctctttgaggattacaaaagaattaaatttattgaaacccttcagtaccaggcattacagccagtgttttacaggtatcaacttatttaattctcacaacagccatgtgaggtgggactattcttttgattctgatcagcgctgtgggcaagtcccttcagcctgttatgcctcagcttttatgtctgtaaaatggggatgagaatagttctacttcatatgcttgactgcgagaaatcaccaagcgtttttcagggtgcttctactattttcccctcctaccagcagtgtatgggagtcctagttgcttcccatctttgccaacacttgatggtgtaattttattttatttttaaattaaatatatttgaattttaaatatatgggaccctccatgaatttgcatgtcatcctcaggcacgggccttgctaatcttttctgtattgttccagttgtagtatatgtggtgccaaaacaagcataagtgttgtaattgtcataatttttctgcatatgtagtggtttgccattgtggttttaatttgtatcttccaatgactgatgaagttgagcacttttttcacatgcttattggctatttgtgtaacttccttgtgaaatatctcttaaagtttttttgtttttgtttttgtttttgtttttgccacataaaaaaacaatagttctggccgggcacagtggttcacacctgtaatcccagcactttgggaggctgaggcgggcagatcacgaagtcaggagattgagaccatcctggctaacactgtgaaaccctgcctccactaaaaaaatacaaaaaattagccaggcatggtggtgggcgcctgtagacccagctactcgggaggcagaggcaggagaatggcgtgaacccgggaggtggagcttgcagtgagccgagatcgcgccactgcactccagcctgggcgacagagcgagattccgtctcaaaaaaaaagaatagtcccacctcacatgactgttgtgagaattaaattaagttggtacctgtaaaacactggatgtaatgcctggcactgaataatttcaataaatttaattcttttgtaatcctcaaaactacctgatgaggcattattagtatcctcattttccagatagataaaatgaggcttggagaggggaggtctgtgggctggatgcacttctctgtactcttggaccaaagaaagagtcctaccatacataccatggtatacttaccatggtgtaagtaccatggtgcagggtgttggggcttctccctgccttaggaggccacatgtacctggaaggtctatttccactggggtcaaatcactcaaaccctttgactttccctccaacctccagcccccagccaatatcctatctggagaattgtagactgggagaacatctgcttggtccatgtcacaagcagttgtaaggaacactgaggcactgggttgagtgtgagaaccacttctgtggggaggggtgtgccatattgtgttggggtgtctcatctccttagctttggccaggtgatctagcacagcagggtgggtgcagggatttaaatgtctagggccttttcccgccctggtgacactcttactgaggacatttgctttagaattgaggccccttgaaagaaaggtgaatagtagatttcaggctatacagtataaatacagtcattagttgggggaggagggcagtgagcagagtggtccctgcagatgatcccacagcccttggcctggattctgagccctgcaccgccagccttcctcacccctctcctcacagggctctgtggtatatgactgcttcgaggctgccctagggagtgaggtacgaatctggtcctatactcagcccaggtacgagaaggaactcaaccacacacagcagctgcctggtaagtggacccccaagtcctggccccctagcctctgtcccctctggccattccccctcctgatttcaccctcttctagctccatccactctccggcaggggtctgagctgctatcctccccagagtcagtccctcggaccttctctctctgggtgatatggctttccagcccctggggaaggttctttgagcattggatagatgtgggtggtatgtaggggatggggagccattcctaatgcccccctgggagccaaattgcccccacttctttccttggcccccagccccactggaggctcttctgtgatctctcctcagactgcagggggctcgaagtctggaacagcatcccgagctgctggggtaggggctagggccagtgggccgggggtagggaggggcagggtctggagtataagaaacccttggagtccacttcagatatgggctaccacatctcagaagctcacagaacatattcattcattcattcattcattcatttgttcataacacattaattgcagtatctgtgctaagcactggaaatagaaagatgaatcttgggtcaggctcagtggctcatgcctgtaatcccagaactttgggaggccgaggtagaaggatcacttgagctcaaaagttcaagacgagcctgggcaacatggcaaatccccgtctctaccaaaaatacaaaaattaacaggacatggtggtgtgcatttgtggtcccagctactcaggaggctgaggcaggagaatcacttgagcctgggaggcaggggctacagtaagctgagactgcaccattgcacaccagcctgggtgacagagcaagactccgtctcaaaaaacaaaacaaaacaaaacaaaaacaaaaaacttgaaataaaagctaagaaagtcaagggtctaacttttttcccacgtactatttggattttgttttcgttttgtattttcttttttattgtgtataacatacatacataaaagtatgtaaagggtactgattttcttttttttttttttttttgagacagagtctcgctctgtcgctcaggctggagtgcagtggtgcaatctcggctcactgcaagctccgcctcccaggttcacgccattctcctgcctcagcctcccgagtagctgggactacaggcacccgccaccacgcctggctaatttttttttttttttagtagagacagggtttcaccgtgttagccaggatggtcttgatctcctgaccttgtgatccgcctgcctcagcctcccaaagtgctgggattacaggcgtgagccaccacgcccagccaaagggtactgatttccatgtccagttcttttttttttttttttttttggcggaatcttgctctgtcgcctaggctggactgcagtggtgtgatctcagctcactgcaacctctgccttctgggttcaagcgattctcctgcctcagcctcccaagcagctgggattacagacgtgcaccaccacgcacagctaatttttgtatttttagtagacatggagtttcaccatgctggccaggctggtcttgaactcctgacctcgtgatcctcccacctcggcctcccaaagtgctgggattacaggcatgagccgccacgtccggccaatttgtttttatatatgtatacacttgcataactagcacccagatcaatacataaatactgtgaatacatcacatactgtgatgttttctgaactactaaatgttttcaacttcattttctttttgccttcttaaaattaaagttggcctgcctctttggcaactcattaaagactattcaacaccagagttttgaaaacacagatgtgtatatcatggatttcatttcttccttcattaagtagacattgattcatttattcaacagatatttattaatttctgtgtaccaggcaaatccctggacactggaaatattaataaatcaataaatgaagatgacaaaaaacccgaccccacggagctggtgtcagggtcagggtgggggtgaggaaggacacaacaaacacatggagatgtgaagaatgcagtaagttagacagtgattagcactaaggagaacatttgtggaagggctggggaaggttgggagttgtagaggtcagggatggtctcattctggtgagcagagacctgaaagaggtgagggaggagccatatatttgagggaagagagaatagccagcaaaaagggcctggggtgggagtatgtcaggggtgtttaagaaatagtaaggagggggccgggcgcggtggctcacgcctgtaatcccagcactttgggaggccgaggctggcggatcacgaggtcaggagatcgagaccatcctggctaacacggtgaaaccccatctctacaaaaaatacaaaaaaatcagctgggcatggtggcaggcgcctgtagtcccagctactcgggagcctgaggcaggagaatggcttgaaccccaggaggcagagcttgcagtgagccgagatcacaccactgcactccagcctgggcgacagagccagactccatctcaaaaaaaaaaaaaggaaaaaaaaaagagagagaaacagtaaggaggtccttaataactctgcagcagagttattaaggacacaaatgccataggctgtgcgcgatggctcacgtctgcaatcccagcactttggggaagctgaggcaggaggattgcttgaggttaggagctcaagaccagcctggccaacatgagcgaaatcccatctctactaaaaatacaaaaactagccgggggtggtgacacacgcctgtaatcccagctactcgggtggctgaggcaagagaatcgcttgaacccaggaggtggaggttgcagtgagctatcgtgccaatgcactccagcctgggcaacagagcaagactccctctcaaaaaaaaaaaaggacacaagtatcaagaggtaaggtcagaaaggtcacagttctgaacagaggaaaatgacttgttttaaagaggttacaagatctttctgcagagggagaagcagggagaatagctcttctccgaccacacactagggtctccacgggcttggctttgggcagctgctaggagcaaagtctggtctgaaatgatgacacacgctctgccctccgagagcctcccagtctagggggtttgaaggaaactccaaagggtcagtcggggatgcagaagaggtgaggaagtctaagctgcgctctctttgcctctcccaccagccctgccctggctcaacgtgtcagcagatggtgacaacgtgcatctggttctgaatgtctctgaggagcagcacttcggcctctccctgtactggaatcaggtccagggccccccaaaaccccggtggcacaaaaacctggtgaggcctcccccttcccaagtccattcccactgtaggccgatgcctgtgcaaaggacgcagtgccatatcagagaggatccttgaagaggactcaccccaagcaagggaaaattggtgggggaacttctgccttcctggtttccttgactttggcctcctcctcttcctccttatcttctccaacctccttcctttatttgttccacagactggaccgcagatcattaccttgaaccacacagacctggttccctgcctctgtattcaggtaggagcagagtctagctgggtgccagaagaggagtgggaagatgatgatgggggtgatccctgccttcctggtctcaccattcttcaaacccttcattgaggtggagactgtggctccctggggtggctggccctcccttgacccttgctgtcctatgccttctgtctattacattccctgaatgctctccctgatcctccacagaactcctgcttattcttcatggccccattcaaatgtcaccttctccttgaaacctttccctactcctccagttctgtctttgtgttcccctggcgggcagagcatgtgctacgaacttggactggtttgaatcttggctcttgccatttgctagctgtgtaaccttgggcaagtcacttcacctctgtgagcctgtttctcatctgtaaaatgggaataataatagtaacagcctcatggggctgttataagaatgtgtgccacacccaggcttaaatatgctggctctttcctcttcctctgtacatttatttatttttttagacaaggtctcactctgttgcccaggctggagtgcagtggcacaatcatggcacactgcagcctcagccccatgggctcaagtgatcctcctgtctcagcctcccaagtagctggaactactggtgagcactaccatactcagctagtttttttttgttttgtgtagagacggggtcttgctatgttacccaggctgttctgaattcctgggcttatgctatcctcccacctcagcctcccaccaagtgctgggattataagcatgagccactgtggcttgccctgattgcactttttttttttttttttttaagacagagtctttctctgtcgcccaggctggagcaccgtggcgtgatctcggctcactgcaagctgcttctcctgggttcacgccattctcctgcctcagcctcgctgagtagctgggactacaggtgcctgcaaccacgcccagctaattttttgtattttcagtaaagacagggtttcaccgtgttagccaggatggtctcgatctcctgaccttatgatccacaagcctcgtcctcccaaagtgctgggattacaggcatgacccactgtgcccagccgctgattgcacatttaattggtcatcaggtctcatccatcttacctctgacattaatgtctctcattttctttccccctcctctccatctcagtccagcttagggctctatcatctgttttctagactgtttcaacacctccaagctcccctcccttcccatcactttcctggcattctgggcccatattctgcccccaacggtgccttttcactctattttccccatgattccccttcatgagaacattgttacatccagtggagctacttaccaagatacagctagctccctgccttttctcaggtggttcccattacctcaaatgccctcacctccttcccaaagcttttccccaaccacccggcctctcctagctccaaatccccttgcacttctatctttccttgtccatttatcacttcatttcttttattttcttaaattttttttttttttttagagacagcattttgctctgtcacccatggtagagtgcagtggcatgaacacgtctcattgcagccccaagctcccaggttcaagggatcctcctgcctcagcctctgcagctgggactgcaggcatgcgccaccatgcctggctaattgtttccttttttttttttttttttttttaatggagtttcactcttttgcccaggatggagtgcagtggcgtgatctcggctcactgcaacttccgcctcccaggttcaagccattctcctgcctcagcctcccaagtagctgagattacaggcacacaccaccatgcccagctaatttttgtatttttagtagagacagggtttcaccatgttggtcaggctggtcccaaattcctgacctcgtgatccacccgcctcggccgcccaaagtgctgggattacaggcgtgagccactgtgcccagcctgttttcattttttaatgttttgtggcgatgggccaccacacccagctcaatcacttactttcttatttgggcatctaatttcttcttgtacacaacagatgctcaataaatattatgaaatgaatgagtgttttactaatttatataaatattttatccttactacaagtgtgagtttgtgatttccttgaaggcaagcaaatcatatctaattcaaatgtaatagctttgcaagagccttgcacatagcgcctacttgttttttgtttttttgtgtttttgttttttttttgtttttttgtcttttttgagacagagtctcgctctattggcaggctggagtacagtggcgtgatctcggctcactgcaatctctgcctcctggattcaagcaattcttctgcctcagcctcccaagtagctgggactacaagtgcatgccaccatgcccggctaatttttgtattttcagtagagacggggtttcagcatgttggccagatggtctcgatctcttgacctcgtgatccgcccaccttggcctcccaaagtgctgggattacaggggtgagccaccgcgcccagccttgttttgtttttaaacaaggtaacagtatgaggtcctcactgttgaatgagtgaataaatgttactgcctaacacagccataggacacagcagatgttcatgagatgtatgctgtgatttaaatggcttcattgccaaacacagtgcctgccacatagtcggtgttcctaactaaaggcttgatggataaattaatgtattacctctagtgcttagcatagagctatgcacataataggcactcttgaaatgtctgttgaaagaataaatgaatgtgtccttagaacttagcacattccccaacacatagcaggtgcttacacaagtgattgtggaatgaattaaaattaattatccaccaggcacagtggctcacacctgtaatcccagcactttgggaggccaaggtgggtggatcacgaggtcaggagtttgagaccagcctggcctaacatagtgaaacccagtctctactaaaagtacaaaaattagccaggcatggtgatgtgcgcctgtagtccctgctacttgggaagctgaggcaggagaatcacttgaacccaggaggcggaggttgtggtgagctgagatcacaccactgcactccagcctgggcaacagagtgagattccatctcaaaaaataaaaaaataataaaaatttaattatccaaggtctcttgtgcttgccatactgctaagacacaatggtaggcactcattaaaagtctgttgaatgggccaggcgcggtggctcacgcttgtaatcccaacactttgggaggctgagacgggtggatcacttgaggtcaggagttcgagaccagcctgatcaatgtggtgaaaccccatctctactaaaaatacaaaaattaaccagttagccggccgttgtggcatgttcctgtaatcgcagctcctcaggagactgagatgggagaatcgcttgaacctgggaggtggaggttgtagtgagccaagattgcaccactgcactccagcctgggcgacagagcgagactctatctcaaaaaaaaaaaaaagtttgttaatgaagatgttgccagtgcccagcattatgtttgctggaagaatagatgtgagcacctccaggttttgtaaaaggcaggaagacccagcaagtgtttgtgaaatacctgctgaatgagtgcatccccactgtccagcagagggccaggcacatgcccatggaggggacctgagcagacccccatttcctttccaggtgtggcctctggaacctgactccgttaggacgaacatctgccccttcagggagggtgagccgaccggcctggggctggggttggggtgttgcgagcgatgggtacctggcctgcggtgactgtgccctttccttgcagacccccgcgcacaccagaacctctggcaagccgcccgactgcaactgctgaccctgcagagctggctgctggacgcaccgtgctcgctgcccgcagaagcggcactgtgctggcgggctccgggtggggacccctgccagccactggtcccaccgctttcctgggagaacgtcactgtggacgtaagtgaagcagagggcacctcccgtggtgaggggagagtggggaaccgggggtccccttttgtgatcccacccattcctctctttccacagaaggttctcgagttcccattgctgaaaggccaccctaacctctgtgttcaggtcagaaaggggtgcatagtgctgggctggaggctggacctgggcagaccccccagccaagggggtcttagttcttgggccgctaaagcatagtggttgccagcttcctctatgggagttccactgcctactttagtagtgcgcgggaccctgggcaactcacttcacctctctgaacgtcagtttcctcatctgtttaatgcagatgataatacagtaactacctcatggagtggttgtgacaatgaaataagagaagtgcttccccttaggaatcggtacagactaaatgctccataaatgtagccacttttattattgctatccttattctatttccatacctgtagaatgggttgctctacagtttcaaagggtgattataagaacattcactcatccggccaggcgcggtggctcacgcctgtaatcccagcactttgggaggccgaggcgggcagatcacgaggtcaggacatcaagaccatcctggctaacatggtgaaaccccatctctactaaaaatacaaaaaattagccggtcgtggtggtgggcacctgtagtcccagctactaggaaggctggggcaggagaatggcgtgaacctgggaggctgagcttgcagtgagctgagagggcgccactgcactccagcctgggtgacagagtgagactgggcgacagagtgaaactccgtctcaaaaaaaaaaaaaattcactcattcaagattttttgagcagcacaagtcactgttttaggcacttgtgatagaccctaacatctctaccctcatagaacttatattgtaatggagaaaggcaggcaacagacattgtaaataaatcatatagtatcttaaaattgcatacaaataccatgggaaagggataaggtgggactggggttgcaatttttagcagggtggtcatgtgagaaaggaatctctttgagaaggttagatgagaggggaaccatgctccgtaagacataaaaacagctttagggtcagaagacgctttatacagatgatctcacaaggctggggcagagaaagatgtagtgattcctaatcacccagccttgaatccacatctgcctcaggtcagattgagtgcagattcccaacccaacaggccttctgttgcctgccccattctggtctttctgcctttggcttttgcttttcttagtggccctaaccatggtctcttcccagcaggtgaacagctcggagaagctgcagctgcaggagtgcttgtgggctggtgagttgggcctgggggcagctggggcagggccacctcctaggggtgaaggtcagggcatgggaggcaggcaagtggccaatcccagcaaggatgggtcttggtcagagtggcctctcaccccttccagactccctggggcctctcaaagacgatgtgctactgttggagacacgaggcccccaggacaacagatccctctgtgccttggaacccagtggctgtacttcactacccagcaaagcctccacggttaggactgggcgaccctcctccacagatctctccaaatgcatctcacatctggcctcaaattttcactccatccaccctgtgccggtctctgggaacatggggggtgactcagaccagggccatattcagcggcatcaccaaagtctcccagtcccctctacctcattctacccagctgtagcctggtaggtgctgccctaagggtgctacctccaggtaacagtgcccccatcctttggcttggcagagggcagctcgccttggagagtacttactacaagacctgcagtcaggccagtgtctgcaggtgagctggtggaagaagggccccacctcaatgcctaggggcaacaggcctaaaactagcactcacctactgtctatttaggcttattttatgttcagccctgggaaagttaagagtagaagaagcacagttcctatccccaaggagcacactgttggctagacacccataaacagataaccacacctacaggtgctaagttttgggttccagggagagcttccgggaagaatttcttcctataagccagatttggtatggaagaagtcataccctagtcagtgggcacagcacaaaggcagagcagctgcaggaaccttagccgggagatatgcatagttgatgctgggaatttggagatcaggccaccagagcttggtgaatattggaacacctggctggtgccctggatttggttctgtttgtatcttacagctatgggacgatgacttgggagcgctatgggcctgccccatggacaaatgtgagtattgtaagaactgcctttcctttctgtaccaggagtggggatcttgacagggaccactcttgggcacagcacatgcaatggccttgtccttccctgagatcagataaacagagggtcattccttcattcactcaaaaaatgatgagagcttgcagggatcgcaggaacaccaaaaatataaatccttgcccccgccccacccctagaagactagcaagacatgagccagtcacttacatttaaagtgggagctactgaagcaccaccaagtgttcagtgctgtaaatgcatacaatgtggacctgacctgggtggggtgaggggtgaggggctcagggggaaggttccagcaaaactctgaagactgagctaggggaagggggtagagatacagggtcttggacaggcaggtttctgtcatgagataaagatgcaggagacatgtaggggatttggatcttatgttgagagcagcaggagctacgatcaaatttttatatatttcacacacacacacacacatatatatatatatatatatatatatatatatacttatttttttatttatttttgaggcagagtctcactctgttgcccaggctggagtgcaatggcgcgatctcggctaactgcaacctctgcctcccgggttcaagcaattctctacctcagcctcccgggtagctgggattaataggcgcctgccaccatgccctgctaatttttgtatttttagtagagatggggtttcaccatcttggccaggctggtcttgaactcctgacctcgtgatccgcccgcgtcggcctcccaaagtgctgggattatagtcgtgagtcaccgcacctggcccaaatttatatttttaaaagatctctgaggctgtcatgaatcaattcaaggcaaatcaattggaggtaaaaaaaaaaaaaaaaagacagggcagggacaccaggtagttgcagacacccaggacagcaagatcaagggcccagcaaccctagcttaggggagaaaaacagctgacattttagcacttaagatgctcggcattgtgttaagtatgtattaacacattgtgttaagctttatatgtattaatatatttagtcctcacaccaaccctatgacacaggtacaactttacagaggagaaaactgaggcagagggtgacattacttattcaaagacccctaaacagatggagctatattcatccactggctctgacactgtgctgtggactctgggcaaatcatttcttcgttttttgttttgttttgttttgttttgagaggagtctcaccctgtcgcccaggctggagtgcaatggcgcgatctcggctcactgcaacctctgcctcccgagttcaagcgattctcttgcctcagcctcccgagtagctgggattacaggcgtgtgccaccacgcccggctaattttttgtatttttagtagagacggggtttcaccgtgttagccaggatggtcttgatgtcctgacctcgtgatctgcccgcctcggcctcccgaagtgctgggattatataaaggcatgagccaccgcacccggcccaattcatttctgttaagtctcagtttttcttctctgtggagggtaagtttctaactcttcttctctgggtctcccagacatccacaagcgctgggccctcgtgtggctggcctgcctactctttgccgctgcgctttccctcatcctccttctcaaaaaggatcacgcgaaaggtgagcgcttcccggctccccattcccctgggggaggaccagagtggctgtgggagttctccgagggaaagcggcggccgagctcactggctgcctccgcccctctcccctaacagggtggctgaggctcttgaaacaggacgtccgctcggggggtgagtgggagcaagcgctgggcggagggccgcccccggggagccaggcctgtgccagctcacctcttccctccccatctgttttctccggcagcggccgccaggggccgcgcggctctgctcctctactcagccgatgactcgggtttcgagcgcctggtgggcgccctggcgtcggccctgtgccagctgccgctgcgcgtggccgtagacctgtggagccgtcgtgaactgagcgcgcaggggcccgtggcttggtttcacgcgcagcggcgccagaccctgcaggagggcggcgtggtggtcttgctcttctctcccggtgcggtggcgctgtgcagcgagtggctacaggatggggtgtccgggcccggggcgcacggcccgcacgacgccttccgcgcctcgctcagctgcgtgctgcccgacttcttgcagggccgggcgcccggcagctacgtgggggcctgcttcgacaggctgctccacccggacgccgtacccgcccttttccgcaccgtgcccgtcttcacactgccctcccaactgccagacttcctgggggccctgcagcagcctcgcgccccgcgttccgggcggctccaagagagagcggagcaagtgtcccgggcccttcagccagccctggatagctacttccatcccccggggactcccgcgccgggacgcggggtgggaccaggcgcgggacctggggcgggggacgggacttaaataaaggcagacgctgtttttcta

SEQ ID NO: 12597 - DNA, 2357 bp, Homo sapiens
aaaacgaaagcactccgtgctggaagtaggaggagagtcaggactcccaggacagagagtgcacaaactacccagcacagccccctccgccccctctggaggctgaagagggattccagcccctgccacccacagacacgggctgactggggtgtctgccccccttgggggggggcagcacagggcctcaggcctgggtgccacctggcacctagaagatgcctgtgccctggttcttgctgtccttggcactgggccgaagcccagtggtcctttctctggagaggcttgtggggcctcaggacgctacccactgctctccgggcctctcctgccgcctctggggtgccaccaaattctgggcttggaacagcttcagctcccacccgctcctccacacacagacagtgacatactctgcctgcctggggacatcgtgcctgctccgggccccgtgctggcgcctacgcacctgcagacagagctggtgctgaggtgccagaaggagaccgactgtgacctctgtctgcgtgtggctgtccacttggccgtgcatgggcactgggaagagcctgaagatgaggaaaagtttggaggagcagctgactcaggggtggaggagcctaggaatgcctctctccaggcccaagtcgtgctctccttccaggcctaccctactgcccgctgcgtcctgctggaggtgcaagtgcctgctgcccttgtgcagtttggtcagtctgtgggctctgtggtatatgactgcttcgaggctgccctagggagtgaggtacgaatctggtcctatactcagcccaggtacgagaaggaactcaaccacacacagcagctgcctgccctgccctggctcaacgtgtcagcagatggtgacaacgtgcatctggttctgaatgtctctgaggagcagcacttcggcctctccctgtactggaatcaggtccagggccccccaaaaccccggtggcacaaaaacctggtgaggcctcccccttcccaagtccattcccactgtaggccgatgcctgtgcaaaggacgcagtgccatatcagagaggatccttgaagaggactcaccccaagcaagggaaaattgactggaccgcagatcattaccttgaaccacacagacctggttccctgcctctgtattcaggtgtggcctctggaacctgactccgttaggacgaacatctgccccttcagggaggacccccgcgcacaccagaacctctggcaagccgcccgactgcaactgctgaccctgcagagctggctgctggacgcaccgtgctcgctgcccgcagaagcggcactgtgctggcgggctccgggtggggacccctgccagccactggtcccaccgctttcctgggagaacgtcactgtggacaaggttctcgagttcccattgctgaaaggccaccctaacctctgtgttcagcaggtgaacagctcggagaagctgcagctgcaggagtgcttgtgggctgctatgggacgatgacttgggagcgctatgggcctgccccatggacaaatacatccacaagcgctgggccctcgtgtggctggcctgcctactctttgccgctgcgctttccctcatcctccttctcaaaaaggatcacgcgaaagggtggctgaggctcttgaaacaggacgtccgctcgggggcggccgccaggggccgcgcggctctgctcctctactcagccgatgactcgggtttcgagcgcctggtgggcgccctggcgtcggccctgtgccagctgccgctgcgcgtggccgtagacctgtggagccgtcgtgaactgagcgcgcaggggcccgtggcttggtttcacgcgcagcggcgccagaccctgcaggagggcggcgtggtggtcttgctcttctctcccggtgcggtggcgctgtgcagcgagtggctacaggatggggtgtccgggcccggggcgcacggcccgcacgacgccttccgcgcctcgctcagctgcgtgctgcccgacttcttgcagggccgggcgcccggcagctacgtgggggcctgcttcgacaggctgctccacccggacgccgtacccgcccttttccgcaccgtgcccgtcttcacactgccctcccaactgccagacttcctgggggccctgcagcagcctcgcgccccgcgttccgggcggctccaagagagagcggagcaagtgtcccgggcccttcagccagccctggatagctacttccatcccccggggactcccgcgccgggacgcggggtgggaccaggcgcgggacctggggcgggggacgggacttaaataaaggcagacgctgtttttcta

SEQ ID NO: 12598 - DNA, 17706 bp, Homo sapiens
actcgaccgggctgcgctcactgcccagccggggccccgggagcctccaggctcccgcccgccctgagctgcggcctccgcatggaggggccactcactccaccaccgctgcagggaggcggagccgccgctgttccggagcccggagcccggcaacacccgggacacgagacggcggcgcagcggtacagcgcccgactgctgcaggccggctacgagcccgagaggtgacgcccagggcagagcgcgcggggcgcatccggggcgggcggccgaggagggcgcggcggctccgggaacccggcgacgctgcgggggaggggcaggccccacaaacccttcccctattaccgcctcagcctctaacttcccgaaacgccacgctcccggctttggttgggggatgcagacgggcactgtgcgaagggttaggtgcttcgttgcacgggggagcggaggagagggaacaggtcgtaaaaaccttccctaaaatcttagccctagattggacctcgctacacacccgacgacaccccgttcaggtggctccaactcctggggttcaaacagtgcttgctggagtcctgtccgactgacttggcttacccctccttagctgtttcctcctagaactatcttcagtggtcttactggcaggtgttggtgtccagatggatcgccttcgcagggctaggtgaggacactctcccctcctcaccatgcactgagatctgagaggctgccagtgcagctcacctcaaggtctctccgaagacgcaggcccccatgctggggtctgtaggggaatgagggacactggaggaagagtagggtagtgagctgggccccagggggactggctgaaaaggagacagcagctaatctctggattgtatcgcagcttgaaatgcaatcccactgtccttccggtccagaggatttggacttctttctctgcccatctgctggtgttcagcagcttggggaggtgacctggcagctgggttagatgggggtggtctgggggaattagcccggcagctctgcccaggggttggccgcttatgtaagaacttttaacggcttaaggggctcctcggcagtggggctgctgagttaggcccccctgtcctggcaggctgcctctctagaattgactcaggcttaggcaactcccagcctttctcctgtcctagaaatccagctcctggggttcaggccgcagggcgatagggaggggccacaggggctgaatgagccggttggggcttgacagaggcagtgcttggttagagtaggggttgcaaacataatgtttcagagctcaggccggagccatgtgagtgcatcctttctccagattgcacttctgcatcaaggggccatccctacccccacccccaaccgacccgcaccccccacttgggctcagggagcctgtgtaaacctgagccccagccaggtggtgtagtgagattcaaaacctgctggccagacctccacctgccttcgccaacctggagctgtgggaagaggacaggattctgtgagcagtcctgggtttgaatccagtgttattgctctctggcttgaacttggacaggctatgcccccgacccagctcaacagtgctaatgttactaccttttctgcccttcccccatcttcccctcaagagtgttttgaaatcttgttccttcaaatagccccaggcctgatagagccctcggggttccctgcctggacctcagtacccagctgggcactgttgccctgctaccctgaggaaggggcttggacctgccttcctatccccacagctgctaggtgggggtctcagggaacaacagcccttcctcggcttcggaggccgactggttgcctcggtgtctcctccccatggaggaagcagctggggaagatcaggaagagggtgtatgagagtgggggttgagggtggattagcggagtctctggaaaagcacagcctaacccagggctgagcccagcagcttagagtgatgaggagcccaacacaggttaaagtgggaggtgtgtaggggagcaggagaggggagtggggccatgaagtctgtaatcactgggaaggtgaccctccccatgcctcagccaggcagcctaagaaggctggggcagatgtcacagtcaggtcacctgagatggtaaaatccagctgctctcctgggccctggctctggttgaatcctgaatagtactctagccattcctaactcatactgtaggggacagtgacccagagcaggtcctttagtgacccagtaacccagagagaccactgggctggtctctgctgtgtgccaatctctgctctgtgcctgcagttggcatgatagctctgttcttctgtggccagaaaggtaccccagagcagctctgaatggtcaggcactttctgtggctggtctcactgctctgctccacgtggccagtgaaaggtcctagtgctggtgctcctcaggacgctcccctggtcccccatgtggcccgggctccctgcatgagcccaagaatgctgaaggttcagaggtgcttcccacacatcgctggcaatccggccccagcctcccctctgcacacagatggaacagtctgtgttttcctggcagggtcccgggggcatcaatgggggaggctgggcatcccagggaacctcgtggcttggaggccaagcctcccctgggcctagctgccatcacactgctgagaagtaaataaacccagcctcccagggccacagccagccaccaagccagggaggggactgtgtcccacaccaccttattctcttctccccaagtgagctgtgggagccacaggaggacacagggaggaggctgtggagtctgggtggggggacccactcttggtctgggaagagcactggcagttctggtcccataagagggaaggggatctacttcctaccaccccacctttccccatgtgaacctatctgtacccagtcactgcccccatgtagaaatctggatcttgctgggcacccagggccaccaacttctgctttggggatttttcagaagttccctagcccctgttcttatttgtatgcacacttgtctaagccaggcttatgatcctcccccatcttcccaccgcaggaccctcccaaataacaaaccgctctctgagattaaaagccctggtaccaacaccattttctcagccggagatagggcggtgagccgaagcactgggccatgaatcagaagcagtacccctcccttcctttccgaactatagattttgcctctgtcaagggaatgggtacccaatacttgtcaattaatagattgtggagttaatgtgctcatttatgaaaaatgctttgtaaactgcagagggccccaaggccacccaaaggtcaaggagtgtcattatgaagaatgccggctccctaggatgtcgggatggggcatagcgatccaacctcaaagtccttagtgctgggtagctgagagcccagaccggtttctcagggctccgggccttgatcagggtccgcggaagagtattggggattggggaacggcagaaccgtgttagaggtgccctggggagaagggcaaggtgggtggccccggctgggggagaactcgggggtggggggggtggggggtgtgggggtgtgggggggtggggcctctgctggggggtcctgggtggctggatgtagagcggcggagggggcgtgtcccggcctgacccggtactctcccccgcagccccacacctcctacccggtccgggcttgcggggtcgcagcgccgctgcaggcagctgggggcgtgcgcgcggcgcggctgagccctttgtgcggcgcgggcggaggcggcggtttccgcgggaggggcgagaagggcgggaggggcgggaggacagggcggcgccctggcccgccctgccgctgccgcagcccccgcccccgcccccggcccgcccggcccgcggcagcagcgtggccgcggcgcggcgtcagcagtagcagcagcagcagcggcggcagcggcgggcggccgcgcgggtgtttatgtcgggtcgcggggtctcgcggcagcatggcggactacctgatcagcggcggcaccggctacgtgcccgaggatgggctcaccgcgcagcagctcttcgccagcgccgacggcctcacctacaagtaagcgccgggtctcgtacccctaggtgcgcgcatccacgcgccgcgacccccgggccggccctgcacgtgcgcggctcccccggcgttccctgcccggtgcgagtgcctgctgtgggcgctgggggctgggcacgggaaggaaggaggcccgcgccggagcagacggacgtggcacggcgacaccgcggccctcagagccctgacccgtttctggccagatccgggttcggcctgtccccttcctcctctcagcggcatggaggggccctcgggcgtgtgggaactggagatgtgggcattatggggagacttttcccagccgctggtccaggacgccccctcccagcctcaccacgagggcagagggtccccggagccaagcttaagcagccgcttccgcatggccccaggagaggcccagccaggtggttggggtggcttcttttccaactgtctagtccagcgctttttccagttgtgtccctccctgcccacaggttggtattggtgcccctcccaaggcgcgaattattctgtgactgctacccctaagcccaccctacatggggttttggaggaggacacagacccacccgtctgcctctggcttcatttgccttttccgtggtccctaggccagttgccctgcgtgctgcaggcctggcactagctctgcctcctggctgcaggactgtgcccctgccaggaaggagcatcagaaggggcagagtggggatgctggccagtcaaaagcatccctgccttgtctcctgccagccctgccctggcttgtaagcactcctgcttggccagcagtttccctaaacaccaggatacccagtcactcctgaggagtgtctcctcctgcctgcccgtaggcgacgggtgtatagaacacctagaaaatgctatgaggcccagactccagcatttcttctgtggcctctttgctatacagaagaagggctgccaaaggctgggagcagccgaaattctttgtttttttggtggtctttggtgatgagattgaaagcccacctttgatacagttgtcattgaagtcttctaggagaacaccctaggggaacgcctaggagtttctctaggccttagggcagattaatgacccacccccctccaccctgtggcttttccttcctgcgctagggatgcctgctgctttgcttagctcagttcatagtgttcctgaagtgtgggatatttgcttttgggtgtgtctctcaaggcctgctgtgattttagcaggttggggcccctgagctgtgaccctgcacctagatgtacccatgcaggcctgcacttcccttgcggagtttgctgtgaccgtggcccaccctagtgttggtagctgccatgctttggctggggacccagtgtcctggtcccacctctaaggcctctttcctcccctttcccgtcctggccatttctgttctgctctgtcagaacatgccctgcactcagccccctggggtccctccatgctgttccgagccctgtgtgactcagcagcccaggcaccggggcatgcggactgtcctgtgctgggtcatgttcatactgtgttgagcgccacaaaattgttctcaggtttgttcccaatgtttacttattttctctccccatcaagattgagaagttttcaaaggcaggcactgtgtctgctgtgtgtggcgatatgggaacttctgtgtcgcttgacaaactctgagacttaaaggcaatggatattttgggcctattaccttgatggtaccccagtagacctttcgctgtctttggctctagctctgggggctggagtttgccagactctagtgaggtgcacgaggtgggaactgccctgatggggcagtagggatggggggctgtagcctctgctcctctaggcttttctgtacccccctgctgcctcctctggcatggcaggctctgcccctttggggcacccctccccactaataacactcacttctctgtcttcacagcgacttcctgattctcccaggattcatagacttcatagctgatgaggtggtgagtacctcttcctttgacaaggggagggggctgtgtatgtggtggaagaggctgacttcttgctcaggggcagggcatggagagatggagagacttttcttgggaatgggtggataggatatagtcctttttttttttttttttggagacagagtcttgctctgtcacacaggctggagtgcagtggtgtgatctcagctcactgcagcctccacctcccagattcaagtgattctcctgcctcagcctcctgagtaactgggattacaggcacatgccaaaaccccccgataatttttgtgtttttagtggagacggggtttcaccatgttggccaggctggtctcaaactcctgagctcaagtgatccgtccgcctcagcctccgaagacgctgtgattacaggggtgattccacccagctggtatgggtggatatagcctttattgttgccagagaaacaggcagagatcaaagggttatacctgatggggcagaggcagctatgggaacacaggagtgtcctgagtgaggcctggcccagggctgggtggctctctgtcagtgacagagcctgtgggcaggttcagaagaggcctgggaaggggtgggcttgggagtgggaacggtgggcttgggagtggctgccttattgtagagaccataaggattggattttgtctggaatgctgaacaaggacatgatagaagccagtgaaattatggagatttgaaaccggtagacagacttgttcactgatccacaatgtacaagaactggcaagagggtttaaaagagttacattttggataaatacaaggaaacgcagtgccttgctttcccagaggggctcatcagtgagccgaatcaatgaacaattaacatatgataaactcagagaagcccagatgggtagtgatgatggtgtaagtcatttcaagaaaaagtgccatgattcaatgatgaattcatatacattaaaaaaaaaacatttcttttctgttgctattattattgctatttattctggtctgattctcatgaaaggccagagggcctgagtgtgcctggatcacttacatgtgagggaagttcacatccagctggtgtttagccagagctgacccagacagattttcagggggaaattcgaatgattctggttgtttcccttatgacaacaaccaggaagcctgcttggtgcagctgttcagtttaacaaagtttactggccagtgtggctttgtgtcagaccctgggctggctgctaggaagggagggattgaaaagacccctaccagctgggcgtggtggctcatgcctgtaatcccagcattttgggaggctgaggcaggaggatcacctgaggtcaggagtttgagaccagcctggccaacatggtgaaaccccatctctactaaaaatgcaaaaattagctgggcattgtggcgggcatctgtaatcccagctactcgggaggctgaggcaggagaatcacttgaatctgggaggcggaggttgcagtgagtcgggattgcactactgtactctagcctgggtgacagaatgaggctccatcagagagagaaaaaaaaaaaaaccctgcctggccggcaaggatctccttgtcctgtggcttctgtcaggaaggctgtggcccttctgtggcatgacaaaagagaagatggtgttttctagatcatggggccagaggtctgaactagggttagtgatgggtttcagggactttgaatctaaaaaaattacatagcaaagtctgcacaaatgtcttggggactgggatccactactgttggcctgaccctcagaggggtatgtgctctggcctttcctccatgggcaggtggcttttaaatggatacttgcaatcctgaccactctcctgagctccagaccattcgttgcttgctttcctggatgcctaaaagactcttttccatgcctacccccacctcagcccttgtcacccagaatccattctccaccttggagcctgagtgacctttttgaaacataaatcagatcatttctctgtcaagaccctccagtggcttctctccgaatcaaatctgagcttctgtccgtggtcttcacggccatgcatgctgcccctgccttcctcctgcctctcccttccctccactcccctggccttctttttctttcttaagtgtgcctccgaaagaactggaccctgaggcgggtttgcactcagtccctcagccgagagtgacagcccctctgacttctacttaatcggctcccactggtcacctcccaggaaagaggctttccccagtcaccttgttgccagtggtcgcttggcctttttgtttttctctgcagccttcatcctgactgaagtcatcttgagcatatgtcctgtgtctgtcatttttctttccaagtagaacataagctccattagatgagctgggaactcatccaccttgttcactgccatgtccccagggcctgtcctggtgccggtgcatgtaggagctcagtgagtgagtgtccagtgggtgataaactctttacgtgggctgtgcctccatcctcaggacctgacctcagccctgacccggaagatcacgctgaagacgccactgatctcctcccccatggacactgtgacagaggctgacatggccattgccatggctgtgagttacacacctgcatggggactccagggcacacaggaactgaccatggtgggctgtgctgaggggcagggctgaggaggaatgggccccggctctgaccacacttcccttctacatcagctgatgggaggtattggtttcattcaccacaactgcaccccagagttccaggccaacgaggtgcggaaggtcaaggcaagtaccaggcctgtccccagcaagatgccacctggcagtccccacctcagaggccctcccagcctcccctgccagccctgcactgctacactccctgcgtgtccttcctctcagtggagccttggggccgagccctcattttcccactggctcctcatcccactgagggtcctggcttctctgcagcacagctgcatcctctgttccctgtggccagcctggacatcatccctggctttcttccagccttttcctcccccatctctgcccgcagaagtttgaacagggcttcatcacggaccctgtggtgctgagcccctcgcacactgtgggcgatgtgctggaggccaagatgcggcatggcttctctggcatccccatcactgagacgggcaccatgggcagcaagctggtgggcatcgtcacctcccgagacatcgactttcttgctgagaaggaccacaccaccctcctcagtgaggtacctgcagggcaggggaagcagggctgggtgtagagaggaccctcacgctggggcctcagactggtgcctgtgaccagggaccagagggaggcctggctccttctctctcacctgccaacctgcaggcaaatgttcctggccccacaggtgatgacgccaaggattgaactggtggtggctccagcaggtgtgacgttgaaagaggcaaatgagatcctgcagcgtagcaagaaaggtaccagggagctagttgaaaactcaacccccagcctgactccctgtccacagtcccgttgttccttcacagccttacaggttatcccagcaaccagactgagccctggggaaggttcgaataacctcaggcaggccagagcacaactcctgccatccttctcttagcttagggaagcttgcccctagtgcagcatcttcatagtatgtttcccaaaactagtcctatgcgatgctcatcagaaaaaaatcctgagcaataactcctttctctatcccctatcttgcataaagaattgcacattcacttattaaaggctctcagaagtcctgcagttaaatttatttgacactagagctgtttttataatattttccagctagaaacaactttagcttttttttttttgagacagagtctcactttctcacccaggctggagtacagtggcgcaatgtcagctcactgcaaccctcgcctcctgggttcaagcaattctcatgcctcagccttctgagtagccaggattacaggcatgtgctactataccagctaattttttttttttttttgtatttttagtagagatggggtttcaccatgttggccaggctggtcttgaactcctggcctcaagtgatctgccctcctgggcctcccaaagtgctggaattacaggcgtgaaccaccatgccctgccacaactttggcttctatttatttatttttgagacagagtcttgctctctcatccaggctggagtgcagtggtgtgatcttggctcactgcaatctctgcctcctgggttcaagcaagtctcctacctcagcctcccgagtagttgggacaacaggcacacaccaacacacccaggtaatttttttgtatttttagtagagatggggtttcaccatattggccgggctgttcttgaactcctggcctcaagtgatccacctgcctcggcctcccaaagtgaggaagctgtgagccaccacacccggccaactttcgcttgttagaaaaaaaaaggaaaaattaaatattcaccaggtccctgttggctatactgggaaatgcttccctggtccatactggagggttctttggtgtctgtattggacagggcacatgcttctccctgcaggacagcatcactcctggctaggagatttcggccactgtggcccagcaggtgaaaggctgccagtgctcgggctgcccatcccaggccacggggatgcccatccacagacccccaggaacctgctgggctgaaagatttctttgctccctgttccttgggaagagggctaggtccctaggaacacttcctgggggcggtgctgtcacctagtggctgactggggtacttcagtggaatctctggagtggtccactttcatcttcaccctcctaaacatctcccaaacttctccccaccaagcctgcttcatttcacccctgcattccttgtcagggaagctgcctatcgtcaatgattgcgatgagctggtggccatcatcgcccgcaccgacctgaagaagaaccgagactaccctctggcctccaaggattcccagaagcagctgctctgtggggcagctgtgggcacccgtgaggatgacaaataccgtctggacctgctcacccaggcgggcgtcgacgtcatagtcttggtaaggcccccgcctgagtggtgggggagatggatgagtggttcagcagagtggaggtttatgaggacccaggttcacctctgattaagcctgtgcccctcccttgctactcttcctctctctttctgagtgctccctggtgtcagaattaggagggtggcagcaggattgcctgagctcagaggttcaaggtcacagtgagctaggatcgtgccactgcactccagccctggggacagaacgagaccctttctcaaaaaacaaacaatggtttgtgtcatctgagatacaaagaaagaaaacaaacaagttaaaattctccagtggcacagccataagaaagaatgaaatcctgtcctttgcagcaacatggacagagctagaagccattatccttagtgaactaactccaaagcagaaaaccaaatactgcatgccctcacttataagtaggagctaaacagagagtacacatgttcataaagatggaaataatagacgctggggactccaaaatgggagagggtgggaggggaacgaaggatgaaaaattggctatcagacacagttttcgatatgtgggtattaggtacacttgaagcccaattctcaccagtatgcagtattccatttaagcaacaagcacatgtacccactgaatccttaaaaaaaaaattgacaaattgttgcaagcaacaattgcaaatcaagactctcccccaccccccgataaagggaggtagaataaagataaaggcttattgatcccttgtgagtgatctggaccatacatctagattcatctgtattctataactaggaggaagagaaattaggaaggtcactggcaccctctcaacagctcacaacagactgcaaacaaaggcctctgagggccttcttggctcataagttgaccctgataatttagctcacgtttactgagaaccgcctgtttgccaggcactgcgtcaagaccttaatgtatatcagtccattgaggaacagtcgccattccattttcagatgaagaaacaggcttaaagaagttaagtcatttcatttggttagtgagttggtgggaacaggatatggctccaggcagtgtctccttgctttaaggatcagtctgtacaatggataggaaaggccttatgtactctaagactgcattagttgtggttaacctttcagggaagcagtcccctttgagaattgactgaaagttgtcaagtgaatttccagaaaaaaaaaaaaaaaaacaaccagaaggaaagagcattctcataacagttttcataggatttgaggggttcatccactcaggctctccctcctgccttgagaatcctcagctgtctaagcccaagctcttccgtcctttctcacaggactcgtcccaagggaattcggtgtatcagatcgccatggtgcattacatcaaacagaagtacccccacctccaggtgattggggggaacggtgagtgcggggtcgcctcccacccgcctgctcctgcccctccaatgagtaacccttttctgtccttcagcatccctaggtgatggtatggctcctggcatgggtggcagggagcatgatgggctttggtcactgtaggggggttggggggtgctagactggggtcccaagaggctgttgggcaggcaggggcatcccatcctcacattgttcctctgccccatccccacccccagtggtgacagcagcccaggccaagaacctgattgatgctggtgtggacgggctgcgcgtgggcatgggctgcggctccatctgcatcacccaggaaggtgggtgtcaggaggtgagcgagtgcccgctggccccggggcctcgcctttgttccccagatgtatatcaagtactctctctgccaggccctgttctgccatggtaggctccggggtgacccaggcatgggccccaccccatcgggcccactgacttaggggaaggcaggtgtaagcagggtgcaagagctgcagcctgcttctcagagtgcggtcaagggggctctgcctggggcttggggcctggggctggtgtgactgtccatggggcttgttggaacctcagggtttggatttgatttgtgacaaggcagatatttaagacacagagacgacatgtccctgaatatataaagatatgttatacacctgcttcaccatgtggttgggcgtggggagttccacccaattacaaagcccttttgcagggtgggttcctgaacatgaagtgggaaggggggagcctggcatgtgtcccccatgtggttattgaggaggtgctccctggaggctggtatctgacttgtggggtggctgcctggaagacttgggtcctcacttggcctgaggagatgtacccggcccctcctgtgagggcaatttctccaaaacactgagtgatgcatttggcctttcctaccccaaacagctcccccttttggtcctcagagcctctgctatttaggtttgtgcccttcgccttaggtggccaccatggtgaaatgagggccctctctcacccacttaacaaatattcattaggcacctacttgtctcaggcactgttcaaagctttgaggtagagtagggacaaaacaaatgagaggcgccatctctggtttatccagctttgcatccgtccctagacaggtgtggttccttgtagtccccacctaaaacctaacactgaaggaccttggacacttagacttgaagaaatgcaaaccagtatcccaaaggggaccatagtacctaaccctggtaacggtttttgcaaacaaaagccttgaaggggaacttgtgccttgagagcaggtgaggctggggccacctgtctgggggcattgggctctgaaggccgcttctggttcccccgtcagaatcccctgtcatgctcttaggggtggggtggcccagatccctagagtgacactcatcctggtggtatttgccagcacctatgttatgcctcagacacaccatccagccctgtcccttttcctgagtagaggtagtgcacaggaggaagagctgggctggccccgctccaggccccggagttgctgttgactcttctctgccttgtgcaccccaccctcccccagtgatggcctgtggtcggccccagggcactgctgtgtacaaggtggctgagtatgcccggcgctttggtgtgcccatcatagccgatggcggcatccagaccgtgggacacgtggtcaaggccctggcccttggagcctccacaggtgaggggagaatgtgctggggattgggcaggcgagggctggaagctgggggggtggcactagtgggctggaggcactaatcccttgcccactgtagtgatgatgggctccctgctggccgccactacggaggcccctggcgagtacttcttctcagacggggtgcggctcaagaagtaccggggcatgggctcactggatgccatggagaagagcagcagcagccagaaacgatacttcaggttccctgaccctgggccccacctgggcagatcagcccacaacccttcagggcccgctcatgccaccgacttccccagatggcagccagtccccatatggtggttctggaaactgaggcacagggcttaagtagcagacccaggatctgtccctgggccatctgactcagcccagtgaggggtggcctgggggaccttcctgggcggtatcccgtttttgcccttaagaggtggggtggggtcctctgagcttcaagctgctgggctcagtcttccaccctccacgcagcgagggggataaagtgaagatcgcgcagggtgtctcgggctccatccaggacaaaggatccattcagaagttcgtgccctacctcatagcaggcatccaacacggctgccaggatatcggggcccgcagcctgtctgtccttcggtgagtgctgagactgggggtggctcctgcttcctttctctcgctcttctccacccttggtggccctgatctgctccacctaccttcctcctaggtccatgatgtactcaggagagctcaagtttgagaagcggaccatgtcggcccagattgagggtggtgtccatggcctgcactcgtaagtgtggtggcctccttgctgtcacttggaggcagtgggttgggcaggtggggccagggttctgaggtcaagctgaggttccagggaccccatggaccacctgcagcagggacagatgctgctgcaggatggcccctcaccctctcttcgggggcccagccccctgttccttgtcctttagtccccatgcaagcaggccctcccctcccctcgggcctctcccgagcagggcacaggaggtgtggccagtcactgcacctggactcccagcccttgcttgctcaggaagcttggtggctggtggcaggggctgtggtggcaccaggcagccaggcagaagatgcgggtgtgacccctctggcgggtacaagggcagagagatggacgccagggccagcgctggggcaaccgtgggcgggggcagtgctcgttggcagcagtagttgcaggcatgtgccccaccctggtcaggagccctgtccccaggtatcagcgggcgtctaacctgtgtctctttccgccccacccttccgtagctatacctttctgccgtgtaagtaaccgcgctgcccgggccaagcgtagagtagagcaggggcagtctgggtgggacctgggctggaggtgggggtgggtattgggtgggggtaggagggtgctggggtgtaaccatgagatgtggaccctgggtttgggcccccccggccccctaactccaacaccatgatggaggaaaccagcagtgtcccctcatccagctgaaacacatatccctttctggctgcagagagatgcccgtgacctcaggcctaaggctgccccattttagactggacccagtgaccacaagcagcctaggccactgtgcctgcagggctggggctgggtgcggacatgggcagcagaggttcggctccaggttggagtttgctccatgaggatgggccatgcctgcctgagctgtccctccaccctgggcactgaggacatccactcagatgtggcgatggcccaaaggagcatggccatctctgcacccagcatggttcttcagggaatgctggcctgggggaggacagaggcctagggcctgctccaggccctcctcctgcgccgtacggctgagatctcagggcttctcagctctctgttctctcctacatctgggggccctggggaaagggttttgggaaggagcagggtccacacacccactcttgttccccctcttgccttgtccccacagttacgaaaagcggctgtactgaggacagcggtggaggccgaggtggtggaggggatgcaccccagtgtccacttttgggcacagcctccctccataactgagtggtccacagatttgcactacgggttctccagctcctttccaggcagagaggaggggaggtcctgaggggactgctgcccctcactcggcatcccctgcagagtcaggactgctcccggggccaggctgccctgggagcccccctccgagcccagccagccaggctctcaggccctgcgcctgcctcaggtctttcttgctgcagcctgctccagcctggcccccaccccaggggcaggcggcccctcctggcttctcctgtagggcacctccctgcccctagcctcccaggaaatggtgctctcctggccctgcctctggcccttcccgggccgctgcccctcagccatgtggcacttctgagctcctgacctaggccaaggggaggtctctgcccccttccccggccctgggctacccttgggtcctgctcctcaggccgctcccctgtccctggccatgggtaggagactgccctggtcatggccgcctgcctgtcattcctgactcaccaccgtccccaggtgaaccattcctcccttctcctcagctgcagtcgaaggctttaactttgcacacttgggatcacagttgcgtcattgtgtattaaatacttggaataaatcaagcaggtctcaacgcctccacta

SEQ ID NO: 12599 - DNA, 2611 bp, Homo sapiens
actcgaccgggctgcgctcactgcccagccggggccccgggagcctccaggctcccgcccgccctgagctgcggcctccgcatggaggggccactcactccaccaccgctgcagggaggcggagccgccgctgttccggagcccggagcccggcaacacccgggacacgagacggcggcgcagcggtacagcgcccgactgctgcaggccggctacgagcccgagagccctagattggacctcgctacacacccgacgacaccccgttcagaactatcttcagtggtcttactggcaggtgttggtgtccagatggatcgccttcgcagggctagcatggcggactacctgatcagcggcggcaccggctacgtgcccgaggatgggctcaccgcgcagcagctcttcgccagcgccgacggcctcacctacaacgacttcctgattctcccaggattcatagacttcatagctgatgaggtggacctgacctcagccctgacccggaagatcacgctgaagacgccactgatctcctcccccatggacactgtgacagaggctgacatggccattgccatggctctgatgggaggtattggtttcattcaccacaactgcaccccagagttccaggccaacgaggtgcggaaggtcaagaagtttgaacagggcttcatcacggaccctgtggtgctgagcccctcgcacactgtgggcgatgtgctggaggccaagatgcggcatggcttctctggcatccccatcactgagacgggcaccatgggcagcaagctggtgggcatcgtcacctcccgagacatcgactttcttgctgagaaggaccacaccaccctcctcagtgaggtgatgacgccaaggattgaactggtggtggctccagcaggtgtgacgttgaaagaggcaaatgagatcctgcagcgtagcaagaaagggaagctgcctatcgtcaatgattgcgatgagctggtggccatcatcgcccgcaccgacctgaagaagaaccgagactaccctctggcctccaaggattcccagaagcagctgctctgtggggcagctgtgggcacccgtgaggatgacaaataccgtctggacctgctcacccaggcgggcgtcgacgtcatagtcttggactcgtcccaagggaattcggtgtatcagatcgccatggtgcattacatcaaacagaagtacccccacctccaggtgattggggggaacgtggtgacagcagcccaggccaagaacctgattgatgctggtgtggacgggctgcgcgtgggcatgggctgcggctccatctgcatcacccaggaagtgatggcctgtggtcggccccagggcactgctgtgtacaaggtggctgagtatgcccggcgctttggtgtgcccatcatagccgatggcggcatccagaccgtgggacacgtggtcaaggccctggcccttggagcctccacagtgatgatgggctccctgctggccgccactacggaggcccctggcgagtacttcttctcagacggggtgcggctcaagaagtaccggggcatgggctcactggatgccatggagaagagcagcagcagccagaaacgatacttcagcgagggggataaagtgaagatcgcgcagggtgtctcgggctccatccaggacaaaggatccattcagaagttcgtgccctacctcatagcaggcatccaacacggctgccaggatatcggggcccgcagcctgtctgtccttcggtccatgatgtactcaggagagctcaagtttgagaagcggaccatgtcggcccagattgagggtggtgtccatggcctgcactcttacgaaaagcggctgtactgaggacagcggtggaggccgaggtggtggaggggatgcaccccagtgtccacttttgggcacagcctccctccataactgagtggtccacagatttgcactacgggttctccagctcctttccaggcagagaggaggggaggtcctgaggggactgctgcccctcactcggcatcccctgcagagtcaggactgctcccggggccaggctgccctgggagcccccctccgagcccagccagccaggctctcaggccctgcgcctgcctcaggtctttcttgctgcagcctgctccagcctggcccccaccccaggggcaggcggcccctcctggcttctcctgtagggcacctccctgcccctagcctcccaggaaatggtgctctcctggccctgcctctggcccttcccgggccgctgcccctcagccatgtggcacttctgagctcctgacctaggccaaggggaggtctctgcccccttccccggccctgggctacccttgggtcctgctcctcaggccgctcccctgtccctggccatgggtaggagactgccctggtcatggccgcctgcctgtcattcctgactcaccaccgtccccaggtgaaccattcctcccttctcctcagctgcagtcgaaggctttaactttgcacacttgggatcacagttgcgtcattgtgtattaaatacttggaataaatcaagcaggtctcaacgcctccacta

SEQ ID NO: 12600 - DNA, 17682 bp, Homo sapiens
actcgaccgggctgcgctcactgcccagccggggccccgggagcctccaggctcccgcccgccctgagctgcggcctccgcatggaggggccactcactccaccaccgctgcagggaggcggagccgccgctgttccggagcccggagcccggcaacacccgggacacgagacggcggcgcagcggtacagcgcccgactgctgcaggccggctacgagcccgagaggtgacgcccagggcagagcgcgcggggcgcatccggggcgggcggccgaggagggcgcggcggctccgggaacccggcgacgctgcgggggaggggcaggccccacaaacccttcccctattaccgcctcagcctctaacttcccgaaacgccacgctcccggctttggttgggggatgcagacgggcactgtgcgaagggttaggtgcttcgttgcacgggggagcggaggagagggaacaggtcgtaaaaaccttccctaaaatcttagccctagattggacctcgctacacacccgacgacaccccgttcaggtggctccaactcctggggttcaaacagtgcttgctggagtcctgtccgactgacttggcttacccctccttagctgtttcctcctagaactatcttcagtggtcttactggcaggtgttggtgtccagatggatcgccttcgcagggctaggtgaggacactctcccctcctcaccatgcactgagatctgagaggctgccagtgcagctcacctcaaggtctctccgaagacgcaggcccccatgctggggtctgtaggggaatgagggacactggaggaagagtagggtagtgagctgggccccagggggactggctgaaaaggagacagcagctaatctctggattgtatcgcagcttgaaatgcaatcccactgtccttccggtccagaggatttggacttctttctctgcccatctgctggtgttcagcagcttggggaggtgacctggcagctgggttagatgggggtggtctgggggaattagcccggcagctctgcccaggggttggccgcttatgtaagaacttttaacggcttaaggggctcctcggcagtggggctgctgagttaggcccccctgtcctggcaggctgcctctctagaattgactcaggcttaggcaactcccagcctttctcctgtcctagaaatccagctcctggggttcaggccgcagggcgatagggaggggccacaggggctgaatgagccggttggggcttgacagaggcagtgcttggttagagtaggggttgcaaacataatgtttcagagctcaggccggagccatgtgagtgcatcctttctccagattgcacttctgcatcaaggggccatccctacccccacccccaaccgacccgcaccccccacttgggctcagggagcctgtgtaaacctgagccccagccaggtggtgtagtgagattcaaaacctgctggccagacctccacctgccttcgccaacctggagctgtgggaagaggacaggattctgtgagcagtcctgggtttgaatccagtgttattgctctctggcttgaacttggacaggctatgcccccgacccagctcaacagtgctaatgttactaccttttctgcccttcccccatcttcccctcaagagtgttttgaaatcttgttccttcaaatagccccaggcctgatagagccctcggggttccctgcctggacctcagtacccagctgggcactgttgccctgctaccctgaggaaggggcttggacctgccttcctatccccacagctgctaggtgggggtctcagggaacaacagcccttcctcggcttcggaggccgactggttgcctcggtgtctcctccccatggaggaagcagctggggaagatcaggaagagggtgtatgagagtgggggttgagggtggattagcggagtctctggaaaagcacagcctaacccagggctgagcccagcagcttagagtgatgaggagcccaacacaggttaaagtgggaggtgtgtaggggagcaggagaggggagtggggccatgaagtctgtaatcactgggaaggtgaccctccccatgcctcagccaggcagcctaagaaggctggggcagatgtcacagtcaggtcacctgagatggtaaaatccagctgctctcctgggccctggctctggttgaatcctgaatagtactctagccattcctaactcatactgtaggggacagtgacccagagcaggtcctttagtgacccagtaacccagagagaccactgggctggtctctgctgtgtgccaatctctgctctgtgcctgcagttggcatgatagctctgttcttctgtggccagaaaggtaccccagagcagctctgaatggtcaggcactttctgtggctggtctcactgctctgctccacgtggccagtgaaaggtcctagtgctggtgctcctcaggacgctcccctggtcccccatgtggcccgggctccctgcatgagcccaagaatgctgaaggttcagaggtgcttcccacacatcgctggcaatccggccccagcctcccctctgcacacagatggaacagtctgtgttttcctggcagggtcccgggggcatcaatgggggaggctgggcatcccagggaacctcgtggcttggaggccaagcctcccctgggcctagctgccatcacactgctgagaagtaaataaacccagcctcccagggccacagccagccaccaagccagggaggggactgtgtcccacaccaccttattctcttctccccaagtgagctgtgggagccacaggaggacacagggaggaggctgtggagtctgggtggggggacccactcttggtctgggaagagcactggcagttctggtcccataagagggaaggggatctacttcctaccaccccacctttccccatgtgaacctatctgtacccagtcactgcccccatgtagaaatctggatcttgctgggcacccagggccaccaacttctgctttggggatttttcagaagttccctagcccctgttcttatttgtatgcacacttgtctaagccaggcttatgatcctcccccatcttcccaccgcaggaccctcccaaataacaaaccgctctctgagattaaaagccctggtaccaacaccattttctcagccggagatagggcggtgagccgaagcactgggccatgaatcagaagcagtacccctcccttcctttccgaactatagattttgcctctgtcaagggaatgggtacccaatacttgtcaattaatagattgtggagttaatgtgctcatttatgaaaaatgctttgtaaactgcagagggccccaaggccacccaaaggtcaaggagtgtcattatgaagaatgccggctccctaggatgtcgggatggggcatagcgatccaacctcaaagtccttagtgctgggtagctgagagcccagaccggtttctcagggctccgggccttgatcagggtccgcggaagagtattggggattggggaacggcagaaccgtgttagaggtgccctggggagaagggcaaggtgggtggccccggctgggggagaactcgggggtggggggggtggggggtgtgggggtgtgggggggtggggcctctgctggggggtcctgggtggctggatgtagagcggcggagggggcgtgtcccggcctgacccggtactctcccccgcagccccacacctcctacccggtccgggcttgcggggtcgcagcgccgctgcaggcagctgggggcgtgcgcgcggcgcggctgagccctttgtgcggcgcgggcggaggcggcggtttccgcgggaggggcgagaagggcgggaggggcgggaggacagggcggcgccctggcccgccctgccgctgccgcagcccccgcccccgcccccggcccgcccggcccgcggcagcagcgtggccgcggcgcggcgtcagcagtagcagcagcagcagcggcggcagcggcgggcggccgcgcgggtgtttatgtcgggtcgcggggtctcgcggcagcatggcggactacctgatcagcggcggcaccggctacgtgcccgaggatgggctcaccgcgcagcagctcttcgccagcgccgacggcctcacctacaagtaagcgccgggtctcgtacccctaggtgcgcgcatccacgcgccgcgacccccgggccggccctgcacgtgcgcggctcccccggcgttccctgcccggtgcgagtgcctgctgtgggcgctgggggctgggcacgggaaggaaggaggcccgcgccggagcagacggacgtggcacggcgacaccgcggccctcagagccctgacccgtttctggccagatccgggttcggcctgtccccttcctcctctcagcggcatggaggggccctcgggcgtgtgggaactggagatgtgggcattatggggagacttttcccagccgctggtccaggacgccccctcccagcctcaccacgagggcagagggtccccggagccaagcttaagcagccgcttccgcatggccccaggagaggcccagccaggtggttggggtggcttcttttccaactgtctagtccagcgctttttccagttgtgtccctccctgcccacaggttggtattggtgcccctcccaaggcgcgaattattctgtgactgctacccctaagcccaccctacatggggttttggaggaggacacagacccacccgtctgcctctggcttcatttgccttttccgtggtccctaggccagttgccctgcgtgctgcaggcctggcactagctctgcctcctggctgcaggactgtgcccctgccaggaaggagcatcagaaggggcagagtggggatgctggccagtcaaaagcatccctgccttgtctcctgccagccctgccctggcttgtaagcactcctgcttggccagcagtttccctaaacaccaggatacccagtcactcctgaggagtgtctcctcctgcctgcccgtaggcgacgggtgtatagaacacctagaaaatgctatgaggcccagactccagcatttcttctgtggcctctttgctatacagaagaagggctgccaaaggctgggagcagccgaaattctttgtttttttggtggtctttggtgatgagattgaaagcccacctttgatacagttgtcattgaagtcttctaggagaacaccctaggggaacgcctaggagtttctctaggccttagggcagattaatgacccacccccctccaccctgtggcttttccttcctgcgctagggatgcctgctgctttgcttagctcagttcatagtgttcctgaagtgtgggatatttgcttttgggtgtgtctctcaaggcctgctgtgattttagcaggttggggcccctgagctgtgaccctgcacctagatgtacccatgcaggcctgcacttcccttgcggagtttgctgtgaccgtggcccaccctagtgttggtagctgccatgctttggctggggacccagtgtcctggtcccacctctaaggcctctttcctcccctttcccgtcctggccatttctgttctgctctgtcagaacatgccctgcactcagccccctggggtccctccatgctgttccgagccctgtgtgactcagcagcccaggcaccggggcatgcggactgtcctgtgctgggtcatgttcatactgtgttgagcgccacaaaattgttctcaggtttgttcccaatgtttacttattttctctccccatcaagattgagaagttttcaaaggcaggcactgtgtctgctgtgtgtggcgatatgggaacttctgtgtcgcttgacaaactctgagacttaaaggcaatggatattttgggcctattaccttgatggtaccccagtagacctttcgctgtctttggctctagctctgggggctggagtttgccagactctagtgaggtgcacgaggtgggaactgccctgatggggcagtagggatggggggctgtagcctctgctcctctaggcttttctgtacccccctgctgcctcctctggcatggcaggctctgcccctttggggcacccctccccactaataacactcacttctctgtcttcacagcgacttcctgattctcccaggattcatagacttcatagctgatgaggtggtgagtacctcttcctttgacaaggggagggggctgtgtatgtggtggaagaggctgacttcttgctcaggggcagggcatggagagatggagagacttttcttgggaatgggtggataggatatagtcctttttttttttttttttggagacagagtcttgctctgtcacacaggctggagtgcagtggtgtgatctcagctcactgcagcctccacctcccagattcaagtgattctcctgcctcagcctcctgagtaactgggattacaggcacatgccaaaaccccccgataatttttgtgtttttagtggagacggggtttcaccatgttggccaggctggtctcaaactcctgagctcaagtgatccgtccgcctcagcctccgaagacgctgtgattacaggggtgattccacccagctggtatgggtggatatagcctttattgttgccagagaaacaggcagagatcaaagggttatacctgatggggcagaggcagctatgggaacacaggagtgtcctgagtgaggcctggcccagggctgggtggctctctgtcagtgacagagcctgtgggcaggttcagaagaggcctgggaaggggtgggcttgggagtgggaacggtgggcttgggagtggctgccttattgtagagaccataaggattggattttgtctggaatgctgaacaaggacatgatagaagccagtgaaattatggagatttgaaaccggtagacagacttgttcactgatccacaatgtacaagaactggcaagagggtttaaaagagttacattttggataaatacaaggaaacgcagtgccttgctttcccagaggggctcatcagtgagccgaatcaatgaacaattaacatatgataaactcagagaagcccagatgggtagtgatgatggtgtaagtcatttcaagaaaaagtgccatgattcaatgatgaattcatatacattaaaaaaaaaacatttcttttctgttgctattattattgctatttattctggtctgattctcatgaaaggccagagggcctgagtgtgcctggatcacttacatgtgagggaagttcacatccagctggtgtttagccagagctgacccagacagattttcagggggaaattcgaatgattctggttgtttcccttatgacaacaaccaggaagcctgcttggtgcagctgttcagtttaacaaagtttactggccagtgtggctttgtgtcagaccctgggctggctgctaggaagggagggattgaaaagacccctaccagctgggcgtggtggctcatgcctgtaatcccagcattttgggaggctgaggcaggaggatcacctgaggtcaggagtttgagaccagcctggccaacatggtgaaaccccatctctactaaaaatgcaaaaattagctgggcattgtggcgggcatctgtaatcccagctactcgggaggctgaggcaggagaatcacttgaatctgggaggcggaggttgcagtgagtcgggattgcactactgtactctagcctgggtgacagaatgaggctccatcagagagagaaaaaaaaaaaaaccctgcctggccggcaaggatctccttgtcctgtggcttctgtcaggaaggctgtggcccttctgtggcatgacaaaagagaagatggtgttttctagatcatggggccagaggtctgaactagggttagtgatgggtttcagggactttgaatctaaaaaaattacatagcaaagtctgcacaaatgtcttggggactgggatccactactgttggcctgaccctcagaggggtatgtgctctggcctttcctccatgggcaggtggcttttaaatggatacttgcaatcctgaccactctcctgagctccagaccattcgttgcttgctttcctggatgcctaaaagactcttttccatgcctacccccacctcagcccttgtcacccagaatccattctccaccttggagcctgagtgacctttttgaaacataaatcagatcatttctctgtcaagaccctccagtggcttctctccgaatcaaatctgagcttctgtccgtggtcttcacggccatgcatgctgcccctgccttcctcctgcctctcccttccctccactcccctggccttctttttctttcttaagtgtgcctccgaaagaactggaccctgaggcgggtttgcactcagtccctcagccgagagtgacagcccctctgacttctacttaatcggctcccactggtcacctcccaggaaagaggctttccccagtcaccttgttgccagtggtcgcttggcctttttgtttttctctgcagccttcatcctgactgaagtcatcttgagcatatgtcctgtgtctgtcatttttctttccaagtagaacataagctccattagatgagctgggaactcatccaccttgttcactgccatgtccccagggcctgtcctggtgccggtgcatgtaggagctcagtgagtgagtgtccagtgggtgataaactctttacgtgggctgtgcctccatcctcaggacctgacctcagccctgacccggaagatcacgctgaagacgccactgatctcctcccccatggacactgtgacagaggctgacatggccattgccatggctgtgagttacacacctgcatggggactccagggcacacaggaactgaccatggtgggctgtgctgaggggcagggctgaggaggaatgggccccggctctgaccacacttcccttctacatcagctgatgggaggtattggtttcattcaccacaactgcaccccagagttccaggccaacgaggtgcggaaggtcaaggcaagtaccaggcctgtccccagcaagatgccacctggcagtccccacctcagaggccctcccagcctcccctgccagccctgcactgctacactccctgcgtgtccttcctctcagtggagccttggggccgagccctcattttcccactggctcctcatcccactgagggtcctggcttctctgcagcacagctgcatcctctgttccctgtggccagcctggacatcatccctggctttcttccagccttttcctcccccatctctgcccgcagaagtttgaacagggcttcatcacggaccctgtggtgctgagcccctcgcacactgtgggcgatgtgctggaggccaagatgcggcatggcttctctggcatccccatcactgagacgggcaccatgggcagcaagctggtgggcatcgtcacctcccgagacatcgactttcttgctgagaaggaccacaccaccctcctcagtgaggtacctgcagggcaggggaagcagggctgggtgtagagaggaccctcacgctggggcctcagactggtgcctgtgaccagggaccagagggaggcctggctccttctctctcacctgccaacctgcaggcaaatgttcctggccccacaggtgatgacgccaaggattgaactggtggtggctccagcaggtgtgacgttgaaagaggcaaatgagatcctgcagcgtagcaagaaaggtaccagggagctagttgaaaactcaacccccagcctgactccctgtccacagtcccgttgttccttcacagccttacaggttatcccagcaaccagactgagccctggggaaggttcgaataacctcaggcaggccagagcacaactcctgccatccttctcttagcttagggaagcttgcccctagtgcagcatcttcatagtatgtttcccaaaactagtcctatgcgatgctcatcagaaaaaaatcctgagcaataactcctttctctatcccctatcttgcataaagaattgcacattcacttattaaaggctctcagaagtcctgcagttaaatttatttgacactagagctgtttttataatattttccagctagaaacaactttagcttttttttttttgagacagagtctcactttctcacccaggctggagtacagtggcgcaatgtcagctcactgcaaccctcgcctcctgggttcaagcaattctcatgcctcagccttctgagtagccaggattacaggcatgtgctactataccagctaattttttttttttttttgtatttttagtagagatggggtttcaccatgttggccaggctggtcttgaactcctggcctcaagtgatctgccctcctgggcctcccaaagtgctggaattacaggcgtgaaccaccatgccctgccacaactttggcttctatttatttatttttgagacagagtcttgctctctcatccaggctggagtgcagtggtgtgatcttggctcactgcaatctctgcctcctgggttcaagcaagtctcctacctcagcctcccgagtagttgggacaacaggcacacaccaacacacccaggtaatttttttgtatttttagtagagatggggtttcaccatattggccgggctgttcttgaactcctggcctcaagtgatccacctgcctcggcctcccaaagtgaggaagctgtgagccaccacacccggccaactttcgcttgttagaaaaaaaaaggaaaaattaaatattcaccaggtccctgttggctatactgggaaatgcttccctggtccatactggagggttctttggtgtctgtattggacagggcacatgcttctccctgcaggacagcatcactcctggctaggagatttcggccactgtggcccagcaggtgaaaggctgccagtgctcgggctgcccatcccaggccacggggatgcccatccacagacccccaggaacctgctgggctgaaagatttctttgctccctgttccttgggaagagggctaggtccctaggaacacttcctgggggcggtgctgtcacctagtggctgactggggtacttcagtggaatctctggagtggtccactttcatcttcaccctcctaaacatctcccaaacttctccccaccaagcctgcttcatttcacccctgcattccttgtcagggaagctgcctatcgtcaatgattgcgatgagctggtggccatcatcgcccgcaccgacctgaagaagaaccgagactaccctctggcctccaaggattcccagaagcagctgctctgtggggcagctgtgggcacccgtgaggatgacaaataccgtctggacctgctcacccaggcgggcgtcgacgtcatagtcttggtaaggcccccgcctgagtggtgggggagatggatgagtggttcagcagagtggaggtttatgaggacccaggttcacctctgattaagcctgtgcccctcccttgctactcttcctctctctttctgagtgctccctggtgtcagaattaggagggtggcagcaggattgcctgagctcagaggttcaaggtcacagtgagctaggatcgtgccactgcactccagccctggggacagaacgagaccctttctcaaaaaacaaacaatggtttgtgtcatctgagatacaaagaaagaaaacaaacaagttaaaattctccagtggcacagccataagaaagaatgaaatcctgtcctttgcagcaacatggacagagctagaagccattatccttagtgaactaactccaaagcagaaaaccaaatactgcatgccctcacttataagtaggagctaaacagagagtacacatgttcataaagatggaaataatagacgctggggactccaaaatgggagagggtgggaggggaacgaaggatgaaaaattggctatcagacacagttttcgatatgtgggtattaggtacacttgaagcccaattctcaccagtatgcagtattccatttaagcaacaagcacatgtacccactgaatccttaaaaaaaaaattgacaaattgttgcaagcaacaattgcaaatcaagactctcccccaccccccgataaagggaggtagaataaagataaaggcttattgatcccttgtgagtgatctggaccatacatctagattcatctgtattctataactaggaggaagagaaattaggaaggtcactggcaccctctcaacagctcacaacagactgcaaacaaaggcctctgagggccttcttggctcataagttgaccctgataatttagctcacgtttactgagaaccgcctgtttgccaggcactgcgtcaagaccttaatgtatatcagtccattgaggaacagtcgccattccattttcagatgaagaaacaggcttaaagaagttaagtcatttcatttggttagtgagttggtgggaacaggatatggctccaggcagtgtctccttgctttaaggatcagtctgtacaatggataggaaaggccttatgtactctaagactgcattagttgtggttaacctttcagggaagcagtcccctttgagaattgactgaaagttgtcaagtgaatttccagaaaaaaaaaaaaaaaaacaaccagaaggaaagagcattctcataacagttttcataggatttgaggggttcatccactcaggctctccctcctgccttgagaatcctcagctgtctaagcccaagctcttccgtcctttctcacaggactcgtcccaagggaattcggtgtatcagatcgccatggtgcattacatcaaacagaagtacccccacctccaggtgattggggggaacggtgagtgcggggtcgcctcccacccgcctgctcctgcccctccaatgagtaacccttttctgtccttcagcatccctaggtgatggtatggctcctggcatgggtggcagggagcatgatgggctttggtcactgtaggggggttggggggtgctagactggggtcccaagaggctgttgggcaggcaggggcatcccatcctcacattgttcctctgccccatccccacccccagtggtgacagcagcccaggccaagaacctgattgatgctggtgtggacgggctgcgcgtgggcatgggctgcggctccatctgcatcacccaggaaggtgggtgtcaggaggtgagcgagtgcccgctggccccggggcctcgcctttgttccccagatgtatatcaagtactctctctgccaggccctgttctgccatggtaggctccggggtgacccaggcatgggccccaccccatcgggcccactgacttaggggaaggcaggtgtaagcagggtgcaagagctgcagcctgcttctcagagtgcggtcaagggggctctgcctggggcttggggcctggggctggtgtgactgtccatggggcttgttggaacctcagggtttggatttgatttgtgacaaggcagatatttaagacacagagacgacatgtccctgaatatataaagatatgttatacacctgcttcaccatgtggttgggcgtggggagttccacccaattacaaagcccttttgcagggtgggttcctgaacatgaagtgggaaggggggagcctggcatgtgtcccccatgtggttattgaggaggtgctccctggaggctggtatctgacttgtggggtggctgcctggaagacttgggtcctcacttggcctgaggagatgtacccggcccctcctgtgagggcaatttctccaaaacactgagtgatgcatttggcctttcctaccccaaacagctcccccttttggtcctcagagcctctgctatttaggtttgtgcccttcgccttaggtggccaccatggtgaaatgagggccctctctcacccacttaacaaatattcattaggcacctacttgtctcaggcactgttcaaagctttgaggtagagtagggacaaaacaaatgagaggcgccatctctggtttatccagctttgcatccgtccctagacaggtgtggttccttgtagtccccacctaaaacctaacactgaaggaccttggacacttagacttgaagaaatgcaaaccagtatcccaaaggggaccatagtacctaaccctggtaacggtttttgcaaacaaaagccttgaaggggaacttgtgccttgagagcaggtgaggctggggccacctgtctgggggcattgggctctgaaggccgcttctggttcccccgtcagaatcccctgtcatgctcttaggggtggggtggcccagatccctagagtgacactcatcctggtggtatttgccagcacctatgttatgcctcagacacaccatccagccctgtcccttttcctgagtagaggtagtgcacaggaggaagagctgggctggccccgctccaggccccggagttgctgttgactcttctctgccttgtgcaccccaccctcccccagtgatggcctgtggtcggccccagggcactgctgtgtacaaggtggctgagtatgcccggcgctttggtgtgcccatcatagccgatggcggcatccagaccgtgggacacgtggtcaaggccctggcccttggagcctccacaggtgaggggagaatgtgctggggattgggcaggcgagggctggaagctgggggggtggcactagtgggctggaggcactaatcccttgcccactgtagtgatgatgggctccctgctggccgccactacggaggcccctggcgagtacttcttctcagacggggtgcggctcaagaagtaccggggcatgggctcactggatgccatggagaagagcagcagcagccagaaacgatacttcaggttccctgaccctgggccccacctgggcagatcagcccacaacccttcagggcccgctcatgccaccgacttccccagatggcagccagtccccatatggtggttctggaaactgaggcacagggcttaagtagcagacccaggatctgtccctgggccatctgactcagcccagtgaggggtggcctgggggaccttcctgggcggtatcccgtttttgcccttaagaggtggggtggggtcctctgagcttcaagctgctgggctcagtcttccaccctccacgcagcgagggggataaagtgaagatcgcgcagggtgtctcgggctccatccaggacaaaggatccattcagaagttcgtgccctacctcatagcaggcatccaacacggctgccaggatatcggggcccgcagcctgtctgtccttcggtgagtgctgagactgggggtggctcctgcttcctttctctcgctcttctccacccttggtggccctgatctgctccacctaccttcctcctaggtccatgatgtactcaggagagctcaagtttgagaagcggaccatgtcggcccagattgagggtggtgtccatggcctgcactcgtaagtgtggtggcctccttgctgtcacttggaggcagtgggttgggcaggtggggccagggttctgaggtcaagctgaggttccagggaccccatggaccacctgcagcagggacagatgctgctgcaggatggcccctcaccctctcttcgggggcccagccccctgttccttgtcctttagtccccatgcaagcaggccctcccctcccctcgggcctctcccgagcagggcacaggaggtgtggccagtcactgcacctggactcccagcccttgcttgctcaggaagcttggtggctggtggcaggggctgtggtggcaccaggcagccaggcagaagatgcgggtgtgacccctctggcgggtacaagggcagagagatggacgccagggccagcgctggggcaaccgtgggcgggggcagtgctcgttggcagcagtagttgcaggcatgtgccccaccctggtcaggagccctgtccccaggtatcagcgggcgtctaacctgtgtctctttccgccccacccttccgtagctatacctttctgccgtgtaagtaaccgcgctgcccgggccaagcgtagagtagagcaggggcagtctgggtgggacctgggctggaggtgggggtgggtattgggtgggggtaggagggtgctggggtgtaaccatgagatgtggaccctgggtttgggcccccccggccccctaactccaacaccatgatggaggaaaccagcagtgtcccctcatccagctgaaacacatatccctttctggctgcagagagatgcccgtgacctcaggcctaaggctgccccattttagactggacccagtgaccacaagcagcctaggccactgtgcctgcagggctggggctgggtgcggacatgggcagcagaggttcggctccaggttggagtttgctccatgaggatgggccatgcctgcctgagctgtccctccaccctgggcactgaggacatccactcagatgtggcgatggcccaaaggagcatggccatctctgcacccagcatggttcttcagggaatgctggcctgggggaggacagaggcctagggcctgctccaggccctcctcctgcgccgtacggctgagatctcagggcttctcagctctctgttctctcctacatctgggggccctggggaaagggttttgggaaggagcagggtccacacacccactcttgttccccctcttgccttgtccccacagttacgaaaagcggctgtactgaggacagcggtggaggccgaggtggtggaggggatgcaccccagtgtccacttttgggcacagcctccctccataactgagtggtccacagatttgcactacgggttctccagctcctttccaggcagagaggaggggaggtcctgaggggactgctgcccctcactcggcatcccctgcagagtcaggactgctcccggggccaggctgccctgggagcccccctccgagcccagccagccaggctctcaggccctgcgcctgcctcaggtctttcttgctgcagcctgctccagcctggcccccaccccaggggcaggcggcccctcctggcttctcctgtagggcacctccctgcccctagcctcccaggaaatggtgctctcctggccctgcctctggcccttcccgggccgctgcccctcagccatgtggcacttctgagctcctgacctaggccaaggggaggtctctgcccccttccccggccctgggctacccttgggtcctgctcctcaggccgctcccctgtccctggccatgggtaggagactgccctggtcatggccgcctgcctgtcattcctgactcaccaccgtccccaggtgaaccattcctcccttctcctcagctgcagtcgaaggctttaactttgcacacttgggatcacagttgcgtcattgtgtattaaatacttggaataaatc

SEQ ID NO: 12601 - DNA, 2479 bp, Homo sapiens
actcgaccgggctgcgctcactgcccagccggggccccgggagcctccaggctcccgcccgccctgagctgcggcctccgcatggaggggccactcactccaccaccgctgcagggaggcggagccgccgctgttccggagcccggagcccggcaacacccgggacacgagacggcggcgcagcggtacagcgcccgactgctgcaggccggctacgagcccgagagcatggcggactacctgatcagcggcggcaccggctacgtgcccgaggatgggctcaccgcgcagcagctcttcgccagcgccgacggcctcacctacaacgacttcctgattctcccaggattcatagacttcatagctgatgaggtggacctgacctcagccctgacccggaagatcacgctgaagacgccactgatctcctcccccatggacactgtgacagaggctgacatggccattgccatggctctgatgggaggtattggtttcattcaccacaactgcaccccagagttccaggccaacgaggtgcggaaggtcaagaagtttgaacagggcttcatcacggaccctgtggtgctgagcccctcgcacactgtgggcgatgtgctggaggccaagatgcggcatggcttctctggcatccccatcactgagacgggcaccatgggcagcaagctggtgggcatcgtcacctcccgagacatcgactttcttgctgagaaggaccacaccaccctcctcagtgaggtgatgacgccaaggattgaactggtggtggctccagcaggtgtgacgttgaaagaggcaaatgagatcctgcagcgtagcaagaaagggaagctgcctatcgtcaatgattgcgatgagctggtggccatcatcgcccgcaccgacctgaagaagaaccgagactaccctctggcctccaaggattcccagaagcagctgctctgtggggcagctgtgggcacccgtgaggatgacaaataccgtctggacctgctcacccaggcgggcgtcgacgtcatagtcttggactcgtcccaagggaattcggtgtatcagatcgccatggtgcattacatcaaacagaagtacccccacctccaggtgattggggggaacgtggtgacagcagcccaggccaagaacctgattgatgctggtgtggacgggctgcgcgtgggcatgggctgcggctccatctgcatcacccaggaagtgatggcctgtggtcggccccagggcactgctgtgtacaaggtggctgagtatgcccggcgctttggtgtgcccatcatagccgatggcggcatccagaccgtgggacacgtggtcaaggccctggcccttggagcctccacagtgatgatgggctccctgctggccgccactacggaggcccctggcgagtacttcttctcagacggggtgcggctcaagaagtaccggggcatgggctcactggatgccatggagaagagcagcagcagccagaaacgatacttcagcgagggggataaagtgaagatcgcgcagggtgtctcgggctccatccaggacaaaggatccattcagaagttcgtgccctacctcatagcaggcatccaacacggctgccaggatatcggggcccgcagcctgtctgtccttcggtccatgatgtactcaggagagctcaagtttgagaagcggaccatgtcggcccagattgagggtggtgtccatggcctgcactcttacgaaaagcggctgtactgaggacagcggtggaggccgaggtggtggaggggatgcaccccagtgtccacttttgggcacagcctccctccataactgagtggtccacagatttgcactacgggttctccagctcctttccaggcagagaggaggggaggtcctgaggggactgctgcccctcactcggcatcccctgcagagtcaggactgctcccggggccaggctgccctgggagcccccctccgagcccagccagccaggctctcaggccctgcgcctgcctcaggtctttcttgctgcagcctgctccagcctggcccccaccccaggggcaggcggcccctcctggcttctcctgtagggcacctccctgcccctagcctcccaggaaatggtgctctcctggccctgcctctggcccttcccgggccgctgcccctcagccatgtggcacttctgagctcctgacctaggccaaggggaggtctctgcccccttccccggccctgggctacccttgggtcctgctcctcaggccgctcccctgtccctggccatgggtaggagactgccctggtcatggccgcctgcctgtcattcctgactcaccaccgtccccaggtgaaccattcctcccttctcctcagctgcagtcgaaggctttaactttgcacacttgggatcacagttgcgtcattgtgtattaaatacttggaataaatc

SEQ ID NO: 12602 - DNA, 17705 bp, Homo sapiens
actcgaccgggctgcgctcactgcccagccggggccccgggagcctccaggctcccgcccgccctgagctgcggcctccgcatggaggggccactcactccaccaccgctgcagggaggcggagccgccgctgttccggagcccggagcccggcaacacccgggacacgagacggcggcgcagcggtacagcgcccgactgctgcaggccggctacgagcccgagaggtgacgcccagggcagagcgcgcggggcgcatccggggcgggcggccgaggagggcgcggcggctccgggaacccggcgacgctgcgggggaggggcaggccccacaaacccttcccctattaccgcctcagcctctaacttcccgaaacgccacgctcccggctttggttgggggatgcagacgggcactgtgcgaagggttaggtgcttcgttgcacgggggagcggaggagagggaacaggtcgtaaaaaccttccctaaaatcttagccctagattggacctcgctacacacccgacgacaccccgttcaggtggctccaactcctggggttcaaacagtgcttgctggagtcctgtccgactgacttggcttacccctccttagctgtttcctcctagaactatcttcagtggtcttactggcaggtgttggtgtccagatggatcgccttcgcagggctaggtgaggacactctcccctcctcaccatgcactgagatctgagaggctgccagtgcagctcacctcaaggtctctccgaagacgcaggcccccatgctggggtctgtaggggaatgagggacactggaggaagagtagggtagtgagctgggccccagggggactggctgaaaaggagacagcagctaatctctggattgtatcgcagcttgaaatgcaatcccactgtccttccggtccagaggatttggacttctttctctgcccatctgctggtgttcagcagcttggggaggtgacctggcagctgggttagatgggggtggtctgggggaattagcccggcagctctgcccaggggttggccgcttatgtaagaacttttaacggcttaaggggctcctcggcagtggggctgctgagttaggcccccctgtcctggcaggctgcctctctagaattgactcaggcttaggcaactcccagcctttctcctgtcctagaaatccagctcctggggttcaggccgcagggcgatagggaggggccacaggggctgaatgagccggttggggcttgacagaggcagtgcttggttagagtaggggttgcaaacataatgtttcagagctcaggccggagccatgtgagtgcatcctttctccagattgcacttctgcatcaaggggccatccctacccccacccccaaccgacccgcaccccccacttgggctcagggagcctgtgtaaacctgagccccagccaggtggtgtagtgagattcaaaacctgctggccagacctccacctgccttcgccaacctggagctgtgggaagaggacaggattctgtgagcagtcctgggtttgaatccagtgttattgctctctggcttgaacttggacaggctatgcccccgacccagctcaacagtgctaatgttactaccttttctgcccttcccccatcttcccctcaagagtgttttgaaatcttgttccttcaaatagccccaggcctgatagagccctcggggttccctgcctggacctcagtacccagctgggcactgttgccctgctaccctgaggaaggggcttggacctgccttcctatccccacagctgctaggtgggggtctcagggaacaacagcccttcctcggcttcggaggccgactggttgcctcggtgtctcctccccatggaggaagcagctggggaagatcaggaagagggtgtatgagagtgggggttgagggtggattagcggagtctctggaaaagcacagcctaacccagggctgagcccagcagcttagagtgatgaggagcccaacacaggttaaagtgggaggtgtgtaggggagcaggagaggggagtggggccatgaagtctgtaatcactgggaaggtgaccctccccatgcctcagccaggcagcctaagaaggctggggcagatgtcacagtcaggtcacctgagatggtaaaatccagctgctctcctgggccctggctctggttgaatcctgaatagtactctagccattcctaactcatactgtaggggacagtgacccagagcaggtcctttagtgacccagtaacccagagagaccactgggctggtctctgctgtgtgccaatctctgctctgtgcctgcagttggcatgatagctctgttcttctgtggccagaaaggtaccccagagcagctctgaatggtcaggcactttctgtggctggtctcactgctctgctccacgtggccagtgaaaggtcctagtgctggtgctcctcaggacgctcccctggtcccccatgtggcccgggctccctgcatgagcccaagaatgctgaaggttcagaggtgcttcccacacatcgctggcaatccggccccagcctcccctctgcacacagatggaacagtctgtgttttcctggcagggtcccgggggcatcaatgggggaggctgggcatcccagggaacctcgtggcttggaggccaagcctcccctgggcctagctgccatcacactgctgagaagtaaataaacccagcctcccagggccacagccagccaccaagccagggaggggactgtgtcccacaccaccttattctcttctccccaagtgagctgtgggagccacaggaggacacagggaggaggctgtggagtctgggtggggggacccactcttggtctgggaagagcactggcagttctggtcccataagagggaaggggatctacttcctaccaccccacctttccccatgtgaacctatctgtacccagtcactgcccccatgtagaaatctggatcttgctgggcacccagggccaccaacttctgctttggggatttttcagaagttccctagcccctgttcttatttgtatgcacacttgtctaagccaggcttatgatcctcccccatcttcccaccgcaggaccctcccaaataacaaaccgctctctgagattaaaagccctggtaccaacaccattttctcagccggagatagggcggtgagccgaagcactgggccatgaatcagaagcagtacccctcccttcctttccgaactatagattttgcctctgtcaagggaatgggtacccaatacttgtcaattaatagattgtggagttaatgtgctcatttatgaaaaatgctttgtaaactgcagagggccccaaggccacccaaaggtcaaggagtgtcattatgaagaatgccggctccctaggatgtcgggatggggcatagcgatccaacctcaaagtccttagtgctgggtagctgagagcccagaccggtttctcagggctccgggccttgatcagggtccgcggaagagtattggggattggggaacggcagaaccgtgttagaggtgccctggggagaagggcaaggtgggtggccccggctgggggagaactcgggggtggggggggtggggggtgtgggggtgtgggggggtggggcctctgctggggggtcctgggtggctggatgtagagcggcggagggggcgtgtcccggcctgacccggtactctcccccgcagccccacacctcctacccggtccgggcttgcggggtcgcagcgccgctgcaggcagctgggggcgtgcgcgcggcgcggctgagccctttgtgcggcgcgggcggaggcggcggtttccgcgggaggggcgagaagggcgggaggggcgggaggacagggcggcgccctggcccgccctgccgctgccgcagcccccgcccccgcccccggcccgcccggcccgcggcagcagcgtggccgcggcgcggcgtcagcagtagcagcagcagcagcggcggcagcggcgggcggccgcgcgggtgtttatgtcgggtcgcggggtctcgcggcagcatggcggactacctgatcagcggcggcaccggctacgtgcccgaggatgggctcaccgcgcagcagctcttcgccagcgccgacggcctcacctacaagtaagcgccgggtctcgtacccctaggtgcgcgcatccacgcgccgcgacccccgggccggccctgcacgtgcgcggctcccccggcgttccctgcccggtgcgagtgcctgctgtgggcgctgggggctgggcacgggaaggaaggaggcccgcgccggagcagacggacgtggcacggcgacaccgcggccctcagagccctgacccgtttctggccagatccgggttcggcctgtccccttcctcctctcagcggcatggaggggccctcgggcgtgtgggaactggagatgtgggcattatggggagacttttcccagccgctggtccaggacgccccctcccagcctcaccacgagggcagagggtccccggagccaagcttaagcagccgcttccgcatggccccaggagaggcccagccaggtggttggggtggcttcttttccaactgtctagtccagcgctttttccagttgtgtccctccctgcccacaggttggtattggtgcccctcccaaggcgcgaattattctgtgactgctacccctaagcccaccctacatggggttttggaggaggacacagacccacccgtctgcctctggcttcatttgccttttccgtggtccctaggccagttgccctgcgtgctgcaggcctggcactagctctgcctcctggctgcaggactgtgcccctgccaggaaggagcatcagaaggggcagagtggggatgctggccagtcaaaagcatccctgccttgtctcctgccagccctgccctggcttgtaagcactcctgcttggccagcagtttccctaaacaccaggatacccagtcactcctgaggagtgtctcctcctgcctgcccgtaggcgacgggtgtatagaacacctagaaaatgctatgaggcccagactccagcatttcttctgtggcctctttgctatacagaagaagggctgccaaaggctgggagcagccgaaattctttgtttttttggtggtctttggtgatgagattgaaagcccacctttgatacagttgtcattgaagtcttctaggagaacaccctaggggaacgcctaggagtttctctaggccttagggcagattaatgacccacccccctccaccctgtggcttttccttcctgcgctagggatgcctgctgctttgcttagctcagttcatagtgttcctgaagtgtgggatatttgcttttgggtgtgtctctcaaggcctgctgtgattttagcaggttggggcccctgagctgtgaccctgcacctagatgtacccatgcaggcctgcacttcccttgcggagtttgctgtgaccgtggcccaccctagtgttggtagctgccatgctttggctggggacccagtgtcctggtcccacctctaaggcctctttcctcccctttcccgtcctggccatttctgttctgctctgtcagaacatgccctgcactcagccccctggggtccctccatgctgttccgagccctgtgtgactcagcagcccaggcaccggggcatgcggactgtcctgtgctgggtcatgttcatactgtgttgagcgccacaaaattgttctcaggtttgttcccaatgtttacttattttctctccccatcaagattgagaagttttcaaaggcaggcactgtgtctgctgtgtgtggcgatatgggaacttctgtgtcgcttgacaaactctgagacttaaaggcaatggatattttgggcctattaccttgatggtaccccagtagacctttcgctgtctttggctctagctctgggggctggagtttgccagactctagtgaggtgcacgaggtgggaactgccctgatggggcagtagggatggggggctgtagcctctgctcctctaggcttttctgtacccccctgctgcctcctctggcatggcaggctctgcccctttggggcacccctccccactaataacactcacttctctgtcttcacagcgacttcctgattctcccaggattcatagacttcatagctgatgaggtggtgagtacctcttcctttgacaaggggagggggctgtgtatgtggtggaagaggctgacttcttgctcaggggcagggcatggagagatggagagacttttcttgggaatgggtggataggatatagtcctttttttttttttttttggagacagagtcttgctctgtcacacaggctggagtgcagtggtgtgatctcagctcactgcagcctccacctcccagattcaagtgattctcctgcctcagcctcctgagtaactgggattacaggcacatgccaaaaccccccgataatttttgtgtttttagtggagacggggtttcaccatgttggccaggctggtctcaaactcctgagctcaagtgatccgtccgcctcagcctccgaagacgctgtgattacaggggtgattccacccagctggtatgggtggatatagcctttattgttgccagagaaacaggcagagatcaaagggttatacctgatggggcagaggcagctatgggaacacaggagtgtcctgagtgaggcctggcccagggctgggtggctctctgtcagtgacagagcctgtgggcaggttcagaagaggcctgggaaggggtgggcttgggagtgggaacggtgggcttgggagtggctgccttattgtagagaccataaggattggattttgtctggaatgctgaacaaggacatgatagaagccagtgaaattatggagatttgaaaccggtagacagacttgttcactgatccacaatgtacaagaactggcaagagggtttaaaagagttacattttggataaatacaaggaaacgcagtgccttgctttcccagaggggctcatcagtgagccgaatcaatgaacaattaacatatgataaactcagagaagcccagatgggtagtgatgatggtgtaagtcatttcaagaaaaagtgccatgattcaatgatgaattcatatacattaaaaaaaaaacatttcttttctgttgctattattattgctatttattctggtctgattctcatgaaaggccagagggcctgagtgtgcctggatcacttacatgtgagggaagttcacatccagctggtgtttagccagagctgacccagacagattttcagggggaaattcgaatgattctggttgtttcccttatgacaacaaccaggaagcctgcttggtgcagctgttcagtttaacaaagtttactggccagtgtggctttgtgtcagaccctgggctggctgctaggaagggagggattgaaaagacccctaccagctgggcgtggtggctcatgcctgtaatcccagcattttgggaggctgaggcaggaggatcacctgaggtcaggagtttgagaccagcctggccaacatggtgaaaccccatctctactaaaaatgcaaaaattagctgggcattgtggcgggcatctgtaatcccagctactcgggaggctgaggcaggagaatcacttgaatctgggaggcggaggttgcagtgagtcgggattgcactactgtactctagcctgggtgacagaatgaggctccatcagagagagaaaaaaaaaaaaaccctgcctggccggcaaggatctccttgtcctgtggcttctgtcaggaaggctgtggcccttctgtggcatgacaaaagagaagatggtgttttctagatcatggggccagaggtctgaactagggttagtgatgggtttcagggactttgaatctaaaaaaattacatagcaaagtctgcacaaatgtcttggggactgggatccactactgttggcctgaccctcagaggggtatgtgctctggcctttcctccatgggcaggtggcttttaaatggatacttgcaatcctgaccactctcctgagctccagaccattcgttgcttgctttcctggatgcctaaaagactcttttccatgcctacccccacctcagcccttgtcacccagaatccattctccaccttggagcctgagtgacctttttgaaacataaatcagatcatttctctgtcaagaccctccagtggcttctctccgaatcaaatctgagcttctgtccgtggtcttcacggccatgcatgctgcccctgccttcctcctgcctctcccttccctccactcccctggccttctttttctttcttaagtgtgcctccgaaagaactggaccctgaggcgggtttgcactcagtccctcagccgagagtgacagcccctctgacttctacttaatcggctcccactggtcacctcccaggaaagaggctttccccagtcaccttgttgccagtggtcgcttggcctttttgtttttctctgcagccttcatcctgactgaagtcatcttgagcatatgtcctgtgtctgtcatttttctttccaagtagaacataagctccattagatgagctgggaactcatccaccttgttcactgccatgtccccagggcctgtcctggtgccggtgcatgtaggagctcagtgagtgagtgtccagtgggtgataaactctttacgtgggctgtgcctccatcctcaggacctgacctcagccctgacccggaagatcacgctgaagacgccactgatctcctcccccatggacactgtgacagaggctgacatggccattgccatggctgtgagttacacacctgcatggggactccagggcacacaggaactgaccatggtgggctgtgctgaggggcagggctgaggaggaatgggccccggctctgaccacacttcccttctacatcagctgatgggaggtattggtttcattcaccacaactgcaccccagagttccaggccaacgaggtgcggaaggtcaaggcaagtaccaggcctgtccccagcaagatgccacctggcagtccccacctcagaggccctcccagcctcccctgccagccctgcactgctacactccctgcgtgtccttcctctcagtggagccttggggccgagccctcattttcccactggctcctcatcccactgagggtcctggcttctctgcagcacagctgcatcctctgttccctgtggccagcctggacatcatccctggctttcttccagccttttcctcccccatctctgcccgcagaagtttgaacagggcttcatcacggaccctgtggtgctgagcccctcgcacactgtgggcgatgtgctggaggccaagatgcggcatggcttctctggcatccccatcactgagacgggcaccatgggcagcaagctggtgggcatcgtcacctcccgagacatcgactttcttgctgagaaggaccacaccaccctcctcagtgaggtacctgcagggcaggggaagcagggctgggtgtagagaggaccctcacgctggggcctcagactggtgcctgtgaccagggaccagagggaggcctggctccttctctctcacctgccaacctgcaggcaaatgttcctggccccacaggtgatgacgccaaggattgaactggtggtggctccagcaggtgtgacgttgaaagaggcaaatgagatcctgcagcgtagcaagaaaggtaccagggagctagttgaaaactcaacccccagcctgactccctgtccacagtcccgttgttccttcacagccttacaggttatcccagcaaccagactgagccctggggaaggttcgaataacctcaggcaggccagagcacaactcctgccatccttctcttagcttagggaagcttgcccctagtgcagcatcttcatagtatgtttcccaaaactagtcctatgcgatgctcatcagaaaaaaatcctgagcaataactcctttctctatcccctatcttgcataaagaattgcacattcacttattaaaggctctcagaagtcctgcagttaaatttatttgacactagagctgtttttataatattttccagctagaaacaactttagcttttttttttttgagacagagtctcactttctcacccaggctggagtacagtggcgcaatgtcagctcactgcaaccctcgcctcctgggttcaagcaattctcatgcctcagccttctgagtagccaggattacaggcatgtgctactataccagctaattttttttttttttttgtatttttagtagagatggggtttcaccatgttggccaggctggtcttgaactcctggcctcaagtgatctgccctcctgggcctcccaaagtgctggaattacaggcgtgaaccaccatgccctgccacaactttggcttctatttatttatttttgagacagagtcttgctctctcatccaggctggagtgcagtggtgtgatcttggctcactgcaatctctgcctcctgggttcaagcaagtctcctacctcagcctcccgagtagttgggacaacaggcacacaccaacacacccaggtaatttttttgtatttttagtagagatggggtttcaccatattggccgggctgttcttgaactcctggcctcaagtgatccacctgcctcggcctcccaaagtgaggaagctgtgagccaccacacccggccaactttcgcttgttagaaaaaaaaaggaaaaattaaatattcaccaggtccctgttggctatactgggaaatgcttccctggtccatactggagggttctttggtgtctgtattggacagggcacatgcttctccctgcaggacagcatcactcctggctaggagatttcggccactgtggcccagcaggtgaaaggctgccagtgctcgggctgcccatcccaggccacggggatgcccatccacagacccccaggaacctgctgggctgaaagatttctttgctccctgttccttgggaagagggctaggtccctaggaacacttcctgggggcggtgctgtcacctagtggctgactggggtacttcagtggaatctctggagtggtccactttcatcttcaccctcctaaacatctcccaaacttctccccaccaagcctgcttcatttcacccctgcattccttgtcagggaagctgcctatcgtcaatgattgcgatgagctggtggccatcatcgcccgcaccgacctgaagaagaaccgagactaccctctggcctccaaggattcccagaagcagctgctctgtggggcagctgtgggcacccgtgaggatgacaaataccgtctggacctgctcacccaggcgggcgtcgacgtcatagtcttggtaaggcccccgcctgagtggtgggggagatggatgagtggttcagcagagtggaggtttatgaggacccaggttcacctctgattaagcctgtgcccctcccttgctactcttcctctctctttctgagtgctccctggtgtcagaattaggagggtggcagcaggattgcctgagctcagaggttcaaggtcacagtgagctaggatcgtgccactgcactccagccctggggacagaacgagaccctttctcaaaaaacaaacaatggtttgtgtcatctgagatacaaagaaagaaaacaaacaagttaaaattctccagtggcacagccataagaaagaatgaaatcctgtcctttgcagcaacatggacagagctagaagccattatccttagtgaactaactccaaagcagaaaaccaaatactgcatgccctcacttataagtaggagctaaacagagagtacacatgttcataaagatggaaataatagacgctggggactccaaaatgggagagggtgggaggggaacgaaggatgaaaaattggctatcagacacagttttcgatatgtgggtattaggtacacttgaagcccaattctcaccagtatgcagtattccatttaagcaacaagcacatgtacccactgaatccttaaaaaaaaaattgacaaattgttgcaagcaacaattgcaaatcaagactctcccccaccccccgataaagggaggtagaataaagataaaggcttattgatcccttgtgagtgatctggaccatacatctagattcatctgtattctataactaggaggaagagaaattaggaaggtcactggcaccctctcaacagctcacaacagactgcaaacaaaggcctctgagggccttcttggctcataagttgaccctgataatttagctcacgtttactgagaaccgcctgtttgccaggcactgcgtcaagaccttaatgtatatcagtccattgaggaacagtcgccattccattttcagatgaagaaacaggcttaaagaagttaagtcatttcatttggttagtgagttggtgggaacaggatatggctccaggcagtgtctccttgctttaaggatcagtctgtacaatggataggaaaggccttatgtactctaagactgcattagttgtggttaacctttcagggaagcagtcccctttgagaattgactgaaagttgtcaagtgaatttccagaaaaaaaaaaaaaaaaacaaccagaaggaaagagcattctcataacagttttcataggatttgaggggttcatccactcaggctctccctcctgccttgagaatcctcagctgtctaagcccaagctcttccgtcctttctcacaggactcgtcccaagggaattcggtgtatcagatcgccatggtgcattacatcaaacagaagtacccccacctccaggtgattggggggaacggtgagtgcggggtcgcctcccacccgcctgctcctgcccctccaatgagtaacccttttctgtccttcagcatccctaggtgatggtatggctcctggcatgggtggcagggagcatgatgggctttggtcactgtaggggggttggggggtgctagactggggtcccaagaggctgttgggcaggcaggggcatcccatcctcacattgttcctctgccccatccccacccccagtggtgacagcagcccaggccaagaacctgattgatgctggtgtggacgggctgcgcgtgggcatgggctgcggctccatctgcatcacccaggaaggtgggtgtcaggaggtgagcgagtgcccgctggccccggggcctcgcctttgttccccagatgtatatcaagtactctctctgccaggccctgttctgccatggtaggctccggggtgacccaggcatgggccccaccccatcgggcccactgacttaggggaaggcaggtgtaagcagggtgcaagagctgcagcctgcttctcagagtgcggtcaagggggctctgcctggggcttggggcctggggctggtgtgactgtccatggggcttgttggaacctcagggtttggatttgatttgtgacaaggcagatatttaagacacagagacgacatgtccctgaatatataaagatatgttatacacctgcttcaccatgtggttgggcgtggggagttccacccaattacaaagcccttttgcagggtgggttcctgaacatgaagtgggaaggggggagcctggcatgtgtcccccatgtggttattgaggaggtgctccctggaggctggtatctgacttgtggggtggctgcctggaagacttgggtcctcacttggcctgaggagatgtacccggcccctcctgtgagggcaatttctccaaaacactgagtgatgcatttggcctttcctaccccaaacagctcccccttttggtcctcagagcctctgctatttaggtttgtgcccttcgccttaggtggccaccatggtgaaatgagggccctctctcacccacttaacaaatattcattaggcacctacttgtctcaggcactgttcaaagctttgaggtagagtagggacaaaacaaatgagaggcgccatctctggtttatccagctttgcatccgtccctagacaggtgtggttccttgtagtccccacctaaaacctaacactgaaggaccttggacacttagacttgaagaaatgcaaaccagtatcccaaaggggaccatagtacctaaccctggtaacggtttttgcaaacaaaagccttgaaggggaacttgtgccttgagagcaggtgaggctggggccacctgtctgggggcattgggctctgaaggccgcttctggttcccccgtcagaatcccctgtcatgctcttaggggtggggtggcccagatccctagagtgacactcatcctggtggtatttgccagcacctatgttatgcctcagacacaccatccagccctgtcccttttcctgagtagaggtagtgcacaggaggaagagctgggctggccccgctccaggccccggagttgctgttgactcttctctgccttgtgcaccccaccctcccccagtgatggcctgtggtcggccccagggcactgctgtgtacaaggtggctgagtatgcccggcgctttggtgtgcccatcatagccgatggcggcatccagaccgtgggacacgtggtcaaggccctggcccttggagcctccacaggtgaggggagaatgtgctggggattgggcaggcgagggctggaagctgggggggtggcactagtgggctggaggcactaatcccttgcccactgtagtgatgatgggctccctgctggccgccactacggaggcccctggcgagtacttcttctcagacggggtgcggctcaagaagtaccggggcatgggctcactggatgccatggagaagagcagcagcagccagaaacgatacttcaggttccctgaccctgggccccacctgggcagatcagcccacaacccttcagggcccgctcatgccaccgacttccccagatggcagccagtccccatatggtggttctggaaactgaggcacagggcttaagtagcagacccaggatctgtccctgggccatctgactcagcccagtgaggggtggcctgggggaccttcctgggcggtatcccgtttttgcccttaagaggtggggtggggtcctctgagcttcaagctgctgggctcagtcttccaccctccacgcagcgagggggataaagtgaagatcgcgcagggtgtctcgggctccatccaggacaaaggatccattcagaagttcgtgccctacctcatagcaggcatccaacacggctgccaggatatcggggcccgcagcctgtctgtccttcggtgagtgctgagactgggggtggctcctgcttcctttctctcgctcttctccacccttggtggccctgatctgctccacctaccttcctcctaggtccatgatgtactcaggagagctcaagtttgagaagcggaccatgtcggcccagattgagggtggtgtccatggcctgcactcgtaagtgtggtggcctccttgctgtcacttggaggcagtgggttgggcaggtggggccagggttctgaggtcaagctgaggttccagggaccccatggaccacctgcagcagggacagatgctgctgcaggatggcccctcaccctctcttcgggggcccagccccctgttccttgtcctttagtccccatgcaagcaggccctcccctcccctcgggcctctcccgagcagggcacaggaggtgtggccagtcactgcacctggactcccagcccttgcttgctcaggaagcttggtggctggtggcaggggctgtggtggcaccaggcagccaggcagaagatgcgggtgtgacccctctggcgggtacaagggcagagagatggacgccagggccagcgctggggcaaccgtgggcgggggcagtgctcgttggcagcagtagttgcaggcatgtgccccaccctggtcaggagccctgtccccaggtatcagcgggcgtctaacctgtgtctctttccgccccacccttccgtagctatacctttctgccgtgtaagtaaccgcgctgcccgggccaagcgtagagtagagcaggggcagtctgggtgggacctgggctggaggtgggggtgggtattgggtgggggtaggagggtgctggggtgtaaccatgagatgtggaccctgggtttgggcccccccggccccctaactccaacaccatgatggaggaaaccagcagtgtcccctcatccagctgaaacacatatccctttctggctgcagagagatgcccgtgacctcaggcctaaggctgccccattttagactggacccagtgaccacaagcagcctaggccactgtgcctgcagggctggggctgggtgcggacatgggcagcagaggttcggctccaggttggagtttgctccatgaggatgggccatgcctgcctgagctgtccctccaccctgggcactgaggacatccactcagatgtggcgatggcccaaaggagcatggccatctctgcacccagcatggttcttcagggaatgctggcctgggggaggacagaggcctagggcctgctccaggccctcctcctgcgccgtacggctgagatctcagggcttctcagctctctgttctctcctacatctgggggccctggggaaagggttttgggaaggagcagggtccacacacccactcttgttccccctcttgccttgtccccacagttacgaaaagcggctgtactgaggacagcggtggaggccgaggtggtggaggggatgcaccccagtgtccacttttgggcacagcctccctccataactgagtggtccacagatttgcactacgggttctccagctcctttccaggcagagaggaggggaggtcctgaggggactgctgcccctcactcggcatcccctgcagagtcaggactgctcccggggccaggctgccctgggagcccccctccgagcccagccagccaggctctcaggccctgcgcctgcctcaggtctttcttgctgcagcctgctccagcctggcccccaccccaggggcaggcggcccctcctggcttctcctgtagggcacctccctgcccctagcctcccaggaaatggtgctctcctggccctgcctctggcccttcccgggccgctgcccctcagccatgtggcacttctgagctcctgacctaggccaaggggaggtctctgcccccttccccggccctgggctacccttgggtcctgctcctcaggccgctcccctgtccctggccatgggtaggagactgccctggtcatggccgcctgcctgtcattcctgactcaccaccgtccccaggtgaaccattcctcccttctcctcagctgcagtcgaaggctttaactttgcacacttgggatcacagttgcgtcattgtgtattaaatacttggaataaatcaagcaggtctcaacgcctccact

SEQ ID NO: 12603 - DNA, 2580 bp, Homo sapiens
actcgaccgggctgcgctcactgcccagccggggccccgggagcctccaggctcccgcccgccctgagctgcggcctccgcatggaggggccactcactccaccaccgctgcagggaggcggagccgccgctgttccggagcccggagcccggcaacacccgggacacgagacggcggcgcagcggtacagcgcccgactgctgcaggccggctacgagcccgagagctgtttcctcctagaactatcttcagtggtcttactggcaggtgttggtgtccagatggatcgccttcgcagggctagcatggcggactacctgatcagcggcggcaccggctacgtgcccgaggatgggctcaccgcgcagcagctcttcgccagcgccgacggcctcacctacaacgacttcctgattctcccaggattcatagacttcatagctgatgaggtggacctgacctcagccctgacccggaagatcacgctgaagacgccactgatctcctcccccatggacactgtgacagaggctgacatggccattgccatggctctgatgggaggtattggtttcattcaccacaactgcaccccagagttccaggccaacgaggtgcggaaggtcaagaagtttgaacagggcttcatcacggaccctgtggtgctgagcccctcgcacactgtgggcgatgtgctggaggccaagatgcggcatggcttctctggcatccccatcactgagacgggcaccatgggcagcaagctggtgggcatcgtcacctcccgagacatcgactttcttgctgagaaggaccacaccaccctcctcagtgaggtgatgacgccaaggattgaactggtggtggctccagcaggtgtgacgttgaaagaggcaaatgagatcctgcagcgtagcaagaaagggaagctgcctatcgtcaatgattgcgatgagctggtggccatcatcgcccgcaccgacctgaagaagaaccgagactaccctctggcctccaaggattcccagaagcagctgctctgtggggcagctgtgggcacccgtgaggatgacaaataccgtctggacctgctcacccaggcgggcgtcgacgtcatagtcttggactcgtcccaagggaattcggtgtatcagatcgccatggtgcattacatcaaacagaagtacccccacctccaggtgattggggggaacgtggtgacagcagcccaggccaagaacctgattgatgctggtgtggacgggctgcgcgtgggcatgggctgcggctccatctgcatcacccaggaagtgatggcctgtggtcggccccagggcactgctgtgtacaaggtggctgagtatgcccggcgctttggtgtgcccatcatagccgatggcggcatccagaccgtgggacacgtggtcaaggccctggcccttggagcctccacagtgatgatgggctccctgctggccgccactacggaggcccctggcgagtacttcttctcagacggggtgcggctcaagaagtaccggggcatgggctcactggatgccatggagaagagcagcagcagccagaaacgatacttcagcgagggggataaagtgaagatcgcgcagggtgtctcgggctccatccaggacaaaggatccattcagaagttcgtgccctacctcatagcaggcatccaacacggctgccaggatatcggggcccgcagcctgtctgtccttcggtccatgatgtactcaggagagctcaagtttgagaagcggaccatgtcggcccagattgagggtggtgtccatggcctgcactcttacgaaaagcggctgtactgaggacagcggtggaggccgaggtggtggaggggatgcaccccagtgtccacttttgggcacagcctccctccataactgagtggtccacagatttgcactacgggttctccagctcctttccaggcagagaggaggggaggtcctgaggggactgctgcccctcactcggcatcccctgcagagtcaggactgctcccggggccaggctgccctgggagcccccctccgagcccagccagccaggctctcaggccctgcgcctgcctcaggtctttcttgctgcagcctgctccagcctggcccccaccccaggggcaggcggcccctcctggcttctcctgtagggcacctccctgcccctagcctcccaggaaatggtgctctcctggccctgcctctggcccttcccgggccgctgcccctcagccatgtggcacttctgagctcctgacctaggccaaggggaggtctctgcccccttccccggccctgggctacccttgggtcctgctcctcaggccgctcccctgtccctggccatgggtaggagactgccctggtcatggccgcctgcctgtcattcctgactcaccaccgtccccaggtgaaccattcctcccttctcctcagctgcagtcgaaggctttaactttgcacacttgggatcacagttgcgtcattgtgtattaaatacttggaataaatcaagcaggtctcaacgcctccact

SEQ ID NO: 12604 - DNA, 17625 bp, Homo sapiens
atggaggggccactcactccaccaccgctgcagggaggcggagccgccgctgttccggagcccggagcccggcaacacccgggacacgagacggcggcgcagcggtacagcgcccgactgctgcaggccggctacgagcccgagaggtgacgcccagggcagagcgcgcggggcgcatccggggcgggcggccgaggagggcgcggcggctccgggaacccggcgacgctgcgggggaggggcaggccccacaaacccttcccctattaccgcctcagcctctaacttcccgaaacgccacgctcccggctttggttgggggatgcagacgggcactgtgcgaagggttaggtgcttcgttgcacgggggagcggaggagagggaacaggtcgtaaaaaccttccctaaaatcttagccctagattggacctcgctacacacccgacgacaccccgttcaggtggctccaactcctggggttcaaacagtgcttgctggagtcctgtccgactgacttggcttacccctccttagctgtttcctcctagaactatcttcagtggtcttactggcaggtgttggtgtccagatggatcgccttcgcagggctaggtgaggacactctcccctcctcaccatgcactgagatctgagaggctgccagtgcagctcacctcaaggtctctccgaagacgcaggcccccatgctggggtctgtaggggaatgagggacactggaggaagagtagggtagtgagctgggccccagggggactggctgaaaaggagacagcagctaatctctggattgtatcgcagcttgaaatgcaatcccactgtccttccggtccagaggatttggacttctttctctgcccatctgctggtgttcagcagcttggggaggtgacctggcagctgggttagatgggggtggtctgggggaattagcccggcagctctgcccaggggttggccgcttatgtaagaacttttaacggcttaaggggctcctcggcagtggggctgctgagttaggcccccctgtcctggcaggctgcctctctagaattgactcaggcttaggcaactcccagcctttctcctgtcctagaaatccagctcctggggttcaggccgcagggcgatagggaggggccacaggggctgaatgagccggttggggcttgacagaggcagtgcttggttagagtaggggttgcaaacataatgtttcagagctcaggccggagccatgtgagtgcatcctttctccagattgcacttctgcatcaaggggccatccctacccccacccccaaccgacccgcaccccccacttgggctcagggagcctgtgtaaacctgagccccagccaggtggtgtagtgagattcaaaacctgctggccagacctccacctgccttcgccaacctggagctgtgggaagaggacaggattctgtgagcagtcctgggtttgaatccagtgttattgctctctggcttgaacttggacaggctatgcccccgacccagctcaacagtgctaatgttactaccttttctgcccttcccccatcttcccctcaagagtgttttgaaatcttgttccttcaaatagccccaggcctgatagagccctcggggttccctgcctggacctcagtacccagctgggcactgttgccctgctaccctgaggaaggggcttggacctgccttcctatccccacagctgctaggtgggggtctcagggaacaacagcccttcctcggcttcggaggccgactggttgcctcggtgtctcctccccatggaggaagcagctggggaagatcaggaagagggtgtatgagagtgggggttgagggtggattagcggagtctctggaaaagcacagcctaacccagggctgagcccagcagcttagagtgatgaggagcccaacacaggttaaagtgggaggtgtgtaggggagcaggagaggggagtggggccatgaagtctgtaatcactgggaaggtgaccctccccatgcctcagccaggcagcctaagaaggctggggcagatgtcacagtcaggtcacctgagatggtaaaatccagctgctctcctgggccctggctctggttgaatcctgaatagtactctagccattcctaactcatactgtaggggacagtgacccagagcaggtcctttagtgacccagtaacccagagagaccactgggctggtctctgctgtgtgccaatctctgctctgtgcctgcagttggcatgatagctctgttcttctgtggccagaaaggtaccccagagcagctctgaatggtcaggcactttctgtggctggtctcactgctctgctccacgtggccagtgaaaggtcctagtgctggtgctcctcaggacgctcccctggtcccccatgtggcccgggctccctgcatgagcccaagaatgctgaaggttcagaggtgcttcccacacatcgctggcaatccggccccagcctcccctctgcacacagatggaacagtctgtgttttcctggcagggtcccgggggcatcaatgggggaggctgggcatcccagggaacctcgtggcttggaggccaagcctcccctgggcctagctgccatcacactgctgagaagtaaataaacccagcctcccagggccacagccagccaccaagccagggaggggactgtgtcccacaccaccttattctcttctccccaagtgagctgtgggagccacaggaggacacagggaggaggctgtggagtctgggtggggggacccactcttggtctgggaagagcactggcagttctggtcccataagagggaaggggatctacttcctaccaccccacctttccccatgtgaacctatctgtacccagtcactgcccccatgtagaaatctggatcttgctgggcacccagggccaccaacttctgctttggggatttttcagaagttccctagcccctgttcttatttgtatgcacacttgtctaagccaggcttatgatcctcccccatcttcccaccgcaggaccctcccaaataacaaaccgctctctgagattaaaagccctggtaccaacaccattttctcagccggagatagggcggtgagccgaagcactgggccatgaatcagaagcagtacccctcccttcctttccgaactatagattttgcctctgtcaagggaatgggtacccaatacttgtcaattaatagattgtggagttaatgtgctcatttatgaaaaatgctttgtaaactgcagagggccccaaggccacccaaaggtcaaggagtgtcattatgaagaatgccggctccctaggatgtcgggatggggcatagcgatccaacctcaaagtccttagtgctgggtagctgagagcccagaccggtttctcagggctccgggccttgatcagggtccgcggaagagtattggggattggggaacggcagaaccgtgttagaggtgccctggggagaagggcaaggtgggtggccccggctgggggagaactcgggggtggggggggtggggggtgtgggggtgtgggggggtggggcctctgctggggggtcctgggtggctggatgtagagcggcggagggggcgtgtcccggcctgacccggtactctcccccgcagccccacacctcctacccggtccgggcttgcggggtcgcagcgccgctgcaggcagctgggggcgtgcgcgcggcgcggctgagccctttgtgcggcgcgggcggaggcggcggtttccgcgggaggggcgagaagggcgggaggggcgggaggacagggcggcgccctggcccgccctgccgctgccgcagcccccgcccccgcccccggcccgcccggcccgcggcagcagcgtggccgcggcgcggcgtcagcagtagcagcagcagcagcggcggcagcggcgggcggccgcgcgggtgtttatgtcgggtcgcggggtctcgcggcagcatggcggactacctgatcagcggcggcaccggctacgtgcccgaggatgggctcaccgcgcagcagctcttcgccagcgccgacggcctcacctacaagtaagcgccgggtctcgtacccctaggtgcgcgcatccacgcgccgcgacccccgggccggccctgcacgtgcgcggctcccccggcgttccctgcccggtgcgagtgcctgctgtgggcgctgggggctgggcacgggaaggaaggaggcccgcgccggagcagacggacgtggcacggcgacaccgcggccctcagagccctgacccgtttctggccagatccgggttcggcctgtccccttcctcctctcagcggcatggaggggccctcgggcgtgtgggaactggagatgtgggcattatggggagacttttcccagccgctggtccaggacgccccctcccagcctcaccacgagggcagagggtccccggagccaagcttaagcagccgcttccgcatggccccaggagaggcccagccaggtggttggggtggcttcttttccaactgtctagtccagcgctttttccagttgtgtccctccctgcccacaggttggtattggtgcccctcccaaggcgcgaattattctgtgactgctacccctaagcccaccctacatggggttttggaggaggacacagacccacccgtctgcctctggcttcatttgccttttccgtggtccctaggccagttgccctgcgtgctgcaggcctggcactagctctgcctcctggctgcaggactgtgcccctgccaggaaggagcatcagaaggggcagagtggggatgctggccagtcaaaagcatccctgccttgtctcctgccagccctgccctggcttgtaagcactcctgcttggccagcagtttccctaaacaccaggatacccagtcactcctgaggagtgtctcctcctgcctgcccgtaggcgacgggtgtatagaacacctagaaaatgctatgaggcccagactccagcatttcttctgtggcctctttgctatacagaagaagggctgccaaaggctgggagcagccgaaattctttgtttttttggtggtctttggtgatgagattgaaagcccacctttgatacagttgtcattgaagtcttctaggagaacaccctaggggaacgcctaggagtttctctaggccttagggcagattaatgacccacccccctccaccctgtggcttttccttcctgcgctagggatgcctgctgctttgcttagctcagttcatagtgttcctgaagtgtgggatatttgcttttgggtgtgtctctcaaggcctgctgtgattttagcaggttggggcccctgagctgtgaccctgcacctagatgtacccatgcaggcctgcacttcccttgcggagtttgctgtgaccgtggcccaccctagtgttggtagctgccatgctttggctggggacccagtgtcctggtcccacctctaaggcctctttcctcccctttcccgtcctggccatttctgttctgctctgtcagaacatgccctgcactcagccccctggggtccctccatgctgttccgagccctgtgtgactcagcagcccaggcaccggggcatgcggactgtcctgtgctgggtcatgttcatactgtgttgagcgccacaaaattgttctcaggtttgttcccaatgtttacttattttctctccccatcaagattgagaagttttcaaaggcaggcactgtgtctgctgtgtgtggcgatatgggaacttctgtgtcgcttgacaaactctgagacttaaaggcaatggatattttgggcctattaccttgatggtaccccagtagacctttcgctgtctttggctctagctctgggggctggagtttgccagactctagtgaggtgcacgaggtgggaactgccctgatggggcagtagggatggggggctgtagcctctgctcctctaggcttttctgtacccccctgctgcctcctctggcatggcaggctctgcccctttggggcacccctccccactaataacactcacttctctgtcttcacagcgacttcctgattctcccaggattcatagacttcatagctgatgaggtggtgagtacctcttcctttgacaaggggagggggctgtgtatgtggtggaagaggctgacttcttgctcaggggcagggcatggagagatggagagacttttcttgggaatgggtggataggatatagtcctttttttttttttttttggagacagagtcttgctctgtcacacaggctggagtgcagtggtgtgatctcagctcactgcagcctccacctcccagattcaagtgattctcctgcctcagcctcctgagtaactgggattacaggcacatgccaaaaccccccgataatttttgtgtttttagtggagacggggtttcaccatgttggccaggctggtctcaaactcctgagctcaagtgatccgtccgcctcagcctccgaagacgctgtgattacaggggtgattccacccagctggtatgggtggatatagcctttattgttgccagagaaacaggcagagatcaaagggttatacctgatggggcagaggcagctatgggaacacaggagtgtcctgagtgaggcctggcccagggctgggtggctctctgtcagtgacagagcctgtgggcaggttcagaagaggcctgggaaggggtgggcttgggagtgggaacggtgggcttgggagtggctgccttattgtagagaccataaggattggattttgtctggaatgctgaacaaggacatgatagaagccagtgaaattatggagatttgaaaccggtagacagacttgttcactgatccacaatgtacaagaactggcaagagggtttaaaagagttacattttggataaatacaaggaaacgcagtgccttgctttcccagaggggctcatcagtgagccgaatcaatgaacaattaacatatgataaactcagagaagcccagatgggtagtgatgatggtgtaagtcatttcaagaaaaagtgccatgattcaatgatgaattcatatacattaaaaaaaaaacatttcttttctgttgctattattattgctatttattctggtctgattctcatgaaaggccagagggcctgagtgtgcctggatcacttacatgtgagggaagttcacatccagctggtgtttagccagagctgacccagacagattttcagggggaaattcgaatgattctggttgtttcccttatgacaacaaccaggaagcctgcttggtgcagctgttcagtttaacaaagtttactggccagtgtggctttgtgtcagaccctgggctggctgctaggaagggagggattgaaaagacccctaccagctgggcgtggtggctcatgcctgtaatcccagcattttgggaggctgaggcaggaggatcacctgaggtcaggagtttgagaccagcctggccaacatggtgaaaccccatctctactaaaaatgcaaaaattagctgggcattgtggcgggcatctgtaatcccagctactcgggaggctgaggcaggagaatcacttgaatctgggaggcggaggttgcagtgagtcgggattgcactactgtactctagcctgggtgacagaatgaggctccatcagagagagaaaaaaaaaaaaaccctgcctggccggcaaggatctccttgtcctgtggcttctgtcaggaaggctgtggcccttctgtggcatgacaaaagagaagatggtgttttctagatcatggggccagaggtctgaactagggttagtgatgggtttcagggactttgaatctaaaaaaattacatagcaaagtctgcacaaatgtcttggggactgggatccactactgttggcctgaccctcagaggggtatgtgctctggcctttcctccatgggcaggtggcttttaaatggatacttgcaatcctgaccactctcctgagctccagaccattcgttgcttgctttcctggatgcctaaaagactcttttccatgcctacccccacctcagcccttgtcacccagaatccattctccaccttggagcctgagtgacctttttgaaacataaatcagatcatttctctgtcaagaccctccagtggcttctctccgaatcaaatctgagcttctgtccgtggtcttcacggccatgcatgctgcccctgccttcctcctgcctctcccttccctccactcccctggccttctttttctttcttaagtgtgcctccgaaagaactggaccctgaggcgggtttgcactcagtccctcagccgagagtgacagcccctctgacttctacttaatcggctcccactggtcacctcccaggaaagaggctttccccagtcaccttgttgccagtggtcgcttggcctttttgtttttctctgcagccttcatcctgactgaagtcatcttgagcatatgtcctgtgtctgtcatttttctttccaagtagaacataagctccattagatgagctgggaactcatccaccttgttcactgccatgtccccagggcctgtcctggtgccggtgcatgtaggagctcagtgagtgagtgtccagtgggtgataaactctttacgtgggctgtgcctccatcctcaggacctgacctcagccctgacccggaagatcacgctgaagacgccactgatctcctcccccatggacactgtgacagaggctgacatggccattgccatggctgtgagttacacacctgcatggggactccagggcacacaggaactgaccatggtgggctgtgctgaggggcagggctgaggaggaatgggccccggctctgaccacacttcccttctacatcagctgatgggaggtattggtttcattcaccacaactgcaccccagagttccaggccaacgaggtgcggaaggtcaaggcaagtaccaggcctgtccccagcaagatgccacctggcagtccccacctcagaggccctcccagcctcccctgccagccctgcactgctacactccctgcgtgtccttcctctcagtggagccttggggccgagccctcattttcccactggctcctcatcccactgagggtcctggcttctctgcagcacagctgcatcctctgttccctgtggccagcctggacatcatccctggctttcttccagccttttcctcccccatctctgcccgcagaagtttgaacagggcttcatcacggaccctgtggtgctgagcccctcgcacactgtgggcgatgtgctggaggccaagatgcggcatggcttctctggcatccccatcactgagacgggcaccatgggcagcaagctggtgggcatcgtcacctcccgagacatcgactttcttgctgagaaggaccacaccaccctcctcagtgaggtacctgcagggcaggggaagcagggctgggtgtagagaggaccctcacgctggggcctcagactggtgcctgtgaccagggaccagagggaggcctggctccttctctctcacctgccaacctgcaggcaaatgttcctggccccacaggtgatgacgccaaggattgaactggtggtggctccagcaggtgtgacgttgaaagaggcaaatgagatcctgcagcgtagcaagaaaggtaccagggagctagttgaaaactcaacccccagcctgactccctgtccacagtcccgttgttccttcacagccttacaggttatcccagcaaccagactgagccctggggaaggttcgaataacctcaggcaggccagagcacaactcctgccatccttctcttagcttagggaagcttgcccctagtgcagcatcttcatagtatgtttcccaaaactagtcctatgcgatgctcatcagaaaaaaatcctgagcaataactcctttctctatcccctatcttgcataaagaattgcacattcacttattaaaggctctcagaagtcctgcagttaaatttatttgacactagagctgtttttataatattttccagctagaaacaactttagcttttttttttttgagacagagtctcactttctcacccaggctggagtacagtggcgcaatgtcagctcactgcaaccctcgcctcctgggttcaagcaattctcatgcctcagccttctgagtagccaggattacaggcatgtgctactataccagctaattttttttttttttttgtatttttagtagagatggggtttcaccatgttggccaggctggtcttgaactcctggcctcaagtgatctgccctcctgggcctcccaaagtgctggaattacaggcgtgaaccaccatgccctgccacaactttggcttctatttatttatttttgagacagagtcttgctctctcatccaggctggagtgcagtggtgtgatcttggctcactgcaatctctgcctcctgggttcaagcaagtctcctacctcagcctcccgagtagttgggacaacaggcacacaccaacacacccaggtaatttttttgtatttttagtagagatggggtttcaccatattggccgggctgttcttgaactcctggcctcaagtgatccacctgcctcggcctcccaaagtgaggaagctgtgagccaccacacccggccaactttcgcttgttagaaaaaaaaaggaaaaattaaatattcaccaggtccctgttggctatactgggaaatgcttccctggtccatactggagggttctttggtgtctgtattggacagggcacatgcttctccctgcaggacagcatcactcctggctaggagatttcggccactgtggcccagcaggtgaaaggctgccagtgctcgggctgcccatcccaggccacggggatgcccatccacagacccccaggaacctgctgggctgaaagatttctttgctccctgttccttgggaagagggctaggtccctaggaacacttcctgggggcggtgctgtcacctagtggctgactggggtacttcagtggaatctctggagtggtccactttcatcttcaccctcctaaacatctcccaaacttctccccaccaagcctgcttcatttcacccctgcattccttgtcagggaagctgcctatcgtcaatgattgcgatgagctggtggccatcatcgcccgcaccgacctgaagaagaaccgagactaccctctggcctccaaggattcccagaagcagctgctctgtggggcagctgtgggcacccgtgaggatgacaaataccgtctggacctgctcacccaggcgggcgtcgacgtcatagtcttggtaaggcccccgcctgagtggtgggggagatggatgagtggttcagcagagtggaggtttatgaggacccaggttcacctctgattaagcctgtgcccctcccttgctactcttcctctctctttctgagtgctccctggtgtcagaattaggagggtggcagcaggattgcctgagctcagaggttcaaggtcacagtgagctaggatcgtgccactgcactccagccctggggacagaacgagaccctttctcaaaaaacaaacaatggtttgtgtcatctgagatacaaagaaagaaaacaaacaagttaaaattctccagtggcacagccataagaaagaatgaaatcctgtcctttgcagcaacatggacagagctagaagccattatccttagtgaactaactccaaagcagaaaaccaaatactgcatgccctcacttataagtaggagctaaacagagagtacacatgttcataaagatggaaataatagacgctggggactccaaaatgggagagggtgggaggggaacgaaggatgaaaaattggctatcagacacagttttcgatatgtgggtattaggtacacttgaagcccaattctcaccagtatgcagtattccatttaagcaacaagcacatgtacccactgaatccttaaaaaaaaaattgacaaattgttgcaagcaacaattgcaaatcaagactctcccccaccccccgataaagggaggtagaataaagataaaggcttattgatcccttgtgagtgatctggaccatacatctagattcatctgtattctataactaggaggaagagaaattaggaaggtcactggcaccctctcaacagctcacaacagactgcaaacaaaggcctctgagggccttcttggctcataagttgaccctgataatttagctcacgtttactgagaaccgcctgtttgccaggcactgcgtcaagaccttaatgtatatcagtccattgaggaacagtcgccattccattttcagatgaagaaacaggcttaaagaagttaagtcatttcatttggttagtgagttggtgggaacaggatatggctccaggcagtgtctccttgctttaaggatcagtctgtacaatggataggaaaggccttatgtactctaagactgcattagttgtggttaacctttcagggaagcagtcccctttgagaattgactgaaagttgtcaagtgaatttccagaaaaaaaaaaaaaaaaacaaccagaaggaaagagcattctcataacagttttcataggatttgaggggttcatccactcaggctctccctcctgccttgagaatcctcagctgtctaagcccaagctcttccgtcctttctcacaggactcgtcccaagggaattcggtgtatcagatcgccatggtgcattacatcaaacagaagtacccccacctccaggtgattggggggaacggtgagtgcggggtcgcctcccacccgcctgctcctgcccctccaatgagtaacccttttctgtccttcagcatccctaggtgatggtatggctcctggcatgggtggcagggagcatgatgggctttggtcactgtaggggggttggggggtgctagactggggtcccaagaggctgttgggcaggcaggggcatcccatcctcacattgttcctctgccccatccccacccccagtggtgacagcagcccaggccaagaacctgattgatgctggtgtggacgggctgcgcgtgggcatgggctgcggctccatctgcatcacccaggaaggtgggtgtcaggaggtgagcgagtgcccgctggccccggggcctcgcctttgttccccagatgtatatcaagtactctctctgccaggccctgttctgccatggtaggctccggggtgacccaggcatgggccccaccccatcgggcccactgacttaggggaaggcaggtgtaagcagggtgcaagagctgcagcctgcttctcagagtgcggtcaagggggctctgcctggggcttggggcctggggctggtgtgactgtccatggggcttgttggaacctcagggtttggatttgatttgtgacaaggcagatatttaagacacagagacgacatgtccctgaatatataaagatatgttatacacctgcttcaccatgtggttgggcgtggggagttccacccaattacaaagcccttttgcagggtgggttcctgaacatgaagtgggaaggggggagcctggcatgtgtcccccatgtggttattgaggaggtgctccctggaggctggtatctgacttgtggggtggctgcctggaagacttgggtcctcacttggcctgaggagatgtacccggcccctcctgtgagggcaatttctccaaaacactgagtgatgcatttggcctttcctaccccaaacagctcccccttttggtcctcagagcctctgctatttaggtttgtgcccttcgccttaggtggccaccatggtgaaatgagggccctctctcacccacttaacaaatattcattaggcacctacttgtctcaggcactgttcaaagctttgaggtagagtagggacaaaacaaatgagaggcgccatctctggtttatccagctttgcatccgtccctagacaggtgtggttccttgtagtccccacctaaaacctaacactgaaggaccttggacacttagacttgaagaaatgcaaaccagtatcccaaaggggaccatagtacctaaccctggtaacggtttttgcaaacaaaagccttgaaggggaacttgtgccttgagagcaggtgaggctggggccacctgtctgggggcattgggctctgaaggccgcttctggttcccccgtcagaatcccctgtcatgctcttaggggtggggtggcccagatccctagagtgacactcatcctggtggtatttgccagcacctatgttatgcctcagacacaccatccagccctgtcccttttcctgagtagaggtagtgcacaggaggaagagctgggctggccccgctccaggccccggagttgctgttgactcttctctgccttgtgcaccccaccctcccccagtgatggcctgtggtcggccccagggcactgctgtgtacaaggtggctgagtatgcccggcgctttggtgtgcccatcatagccgatggcggcatccagaccgtgggacacgtggtcaaggccctggcccttggagcctccacaggtgaggggagaatgtgctggggattgggcaggcgagggctggaagctgggggggtggcactagtgggctggaggcactaatcccttgcccactgtagtgatgatgggctccctgctggccgccactacggaggcccctggcgagtacttcttctcagacggggtgcggctcaagaagtaccggggcatgggctcactggatgccatggagaagagcagcagcagccagaaacgatacttcaggttccctgaccctgggccccacctgggcagatcagcccacaacccttcagggcccgctcatgccaccgacttccccagatggcagccagtccccatatggtggttctggaaactgaggcacagggcttaagtagcagacccaggatctgtccctgggccatctgactcagcccagtgaggggtggcctgggggaccttcctgggcggtatcccgtttttgcccttaagaggtggggtggggtcctctgagcttcaagctgctgggctcagtcttccaccctccacgcagcgagggggataaagtgaagatcgcgcagggtgtctcgggctccatccaggacaaaggatccattcagaagttcgtgccctacctcatagcaggcatccaacacggctgccaggatatcggggcccgcagcctgtctgtccttcggtgagtgctgagactgggggtggctcctgcttcctttctctcgctcttctccacccttggtggccctgatctgctccacctaccttcctcctaggtccatgatgtactcaggagagctcaagtttgagaagcggaccatgtcggcccagattgagggtggtgtccatggcctgcactcgtaagtgtggtggcctccttgctgtcacttggaggcagtgggttgggcaggtggggccagggttctgaggtcaagctgaggttccagggaccccatggaccacctgcagcagggacagatgctgctgcaggatggcccctcaccctctcttcgggggcccagccccctgttccttgtcctttagtccccatgcaagcaggccctcccctcccctcgggcctctcccgagcagggcacaggaggtgtggccagtcactgcacctggactcccagcccttgcttgctcaggaagcttggtggctggtggcaggggctgtggtggcaccaggcagccaggcagaagatgcgggtgtgacccctctggcgggtacaagggcagagagatggacgccagggccagcgctggggcaaccgtgggcgggggcagtgctcgttggcagcagtagttgcaggcatgtgccccaccctggtcaggagccctgtccccaggtatcagcgggcgtctaacctgtgtctctttccgccccacccttccgtagctatacctttctgccgtgtaagtaaccgcgctgcccgggccaagcgtagagtagagcaggggcagtctgggtgggacctgggctggaggtgggggtgggtattgggtgggggtaggagggtgctggggtgtaaccatgagatgtggaccctgggtttgggcccccccggccccctaactccaacaccatgatggaggaaaccagcagtgtcccctcatccagctgaaacacatatccctttctggctgcagagagatgcccgtgacctcaggcctaaggctgccccattttagactggacccagtgaccacaagcagcctaggccactgtgcctgcagggctggggctgggtgcggacatgggcagcagaggttcggctccaggttggagtttgctccatgaggatgggccatgcctgcctgagctgtccctccaccctgggcactgaggacatccactcagatgtggcgatggcccaaaggagcatggccatctctgcacccagcatggttcttcagggaatgctggcctgggggaggacagaggcctagggcctgctccaggccctcctcctgcgccgtacggctgagatctcagggcttctcagctctctgttctctcctacatctgggggccctggggaaagggttttgggaaggagcagggtccacacacccactcttgttccccctcttgccttgtccccacagttacgaaaagcggctgtactgaggacagcggtggaggccgaggtggtggaggggatgcaccccagtgtccacttttgggcacagcctccctccataactgagtggtccacagatttgcactacgggttctccagctcctttccaggcagagaggaggggaggtcctgaggggactgctgcccctcactcggcatcccctgcagagtcaggactgctcccggggccaggctgccctgggagcccccctccgagcccagccagccaggctctcaggccctgcgcctgcctcaggtctttcttgctgcagcctgctccagcctggcccccaccccaggggcaggcggcccctcctggcttctcctgtagggcacctccctgcccctagcctcccaggaaatggtgctctcctggccctgcctctggcccttcccgggccgctgcccctcagccatgtggcacttctgagctcctgacctaggccaaggggaggtctctgcccccttccccggccctgggctacccttgggtcctgctcctcaggccgctcccctgtccctggccatgggtaggagactgccctggtcatggccgcctgcctgtcattcctgactcaccaccgtccccaggtgaaccattcctcccttctcctcagctgcagtcgaaggctttaactttgcacacttgggatcacagttgcgtcattgtgtattaaatacttggaataaatcaagcaggtctcaacgcctccacta

SEQ ID NO: 12605 - DNA, 2431 bp, Homo sapiens
atggaggggccactcactccaccaccgctgcagggaggcggagccgccgctgttccggagcccggagcccggcaacacccgggacacgagacggcggcgcagcggtacagcgcccgactgctgcaggccggctacgagcccgagagccctagattggacctcgctacacacccgacgacaccccgttcagaactatcttcagtggtcttactggcaggtgttggtgtccagatggatcgccttcgcagggctagcgacttcctgattctcccaggattcatagacttcatagctgatgaggtggacctgacctcagccctgacccggaagatcacgctgaagacgccactgatctcctcccccatggacactgtgacagaggctgacatggccattgccatggctctgatgggaggtattggtttcattcaccacaactgcaccccagagttccaggccaacgaggtgcggaaggtcaagaagtttgaacagggcttcatcacggaccctgtggtgctgagcccctcgcacactgtgggcgatgtgctggaggccaagatgcggcatggcttctctggcatccccatcactgagacgggcaccatgggcagcaagctggtgggcatcgtcacctcccgagacatcgactttcttgctgagaaggaccacaccaccctcctcagtgaggtgatgacgccaaggattgaactggtggtggctccagcaggtgtgacgttgaaagaggcaaatgagatcctgcagcgtagcaagaaagggaagctgcctatcgtcaatgattgcgatgagctggtggccatcatcgcccgcaccgacctgaagaagaaccgagactaccctctggcctccaaggattcccagaagcagctgctctgtggggcagctgtgggcacccgtgaggatgacaaataccgtctggacctgctcacccaggcgggcgtcgacgtcatagtcttggactcgtcccaagggaattcggtgtatcagatcgccatggtgcattacatcaaacagaagtacccccacctccaggtgattggggggaacgtggtgacagcagcccaggccaagaacctgattgatgctggtgtggacgggctgcgcgtgggcatgggctgcggctccatctgcatcacccaggaagtgatggcctgtggtcggccccagggcactgctgtgtacaaggtggctgagtatgcccggcgctttggtgtgcccatcatagccgatggcggcatccagaccgtgggacacgtggtcaaggccctggcccttggagcctccacagtgatgatgggctccctgctggccgccactacggaggcccctggcgagtacttcttctcagacggggtgcggctcaagaagtaccggggcatgggctcactggatgccatggagaagagcagcagcagccagaaacgatacttcagcgagggggataaagtgaagatcgcgcagggtgtctcgggctccatccaggacaaaggatccattcagaagttcgtgccctacctcatagcaggcatccaacacggctgccaggatatcggggcccgcagcctgtctgtccttcggtccatgatgtactcaggagagctcaagtttgagaagcggaccatgtcggcccagattgagggtggtgtccatggcctgcactcttacgaaaagcggctgtactgaggacagcggtggaggccgaggtggtggaggggatgcaccccagtgtccacttttgggcacagcctccctccataactgagtggtccacagatttgcactacgggttctccagctcctttccaggcagagaggaggggaggtcctgaggggactgctgcccctcactcggcatcccctgcagagtcaggactgctcccggggccaggctgccctgggagcccccctccgagcccagccagccaggctctcaggccctgcgcctgcctcaggtctttcttgctgcagcctgctccagcctggcccccaccccaggggcaggcggcccctcctggcttctcctgtagggcacctccctgcccctagcctcccaggaaatggtgctctcctggccctgcctctggcccttcccgggccgctgcccctcagccatgtggcacttctgagctcctgacctaggccaaggggaggtctctgcccccttccccggccctgggctacccttgggtcctgctcctcaggccgctcccctgtccctggccatgggtaggagactgccctggtcatggccgcctgcctgtcattcctgactcaccaccgtccccaggtgaaccattcctcccttctcctcagctgcagtcgaaggctttaactttgcacacttgggatcacagttgcgtcattgtgtattaaatacttggaataaatcaagcaggtctcaacgcctccacta

SEQ ID NO: 12606 - DNA, 897 bp, Homo sapiens
gggacacgtggtcaaggccctggcccttggagcctccacaggtgaggggagaatgtgctggggattgggcaggcgagggctggaagctgggggggtggcactagtgggctggaggcactaatcccttgcccactgtagtgatgatgggctccctgctggccgccactacggaggcccctggcgagtacttcttctcagacggggtgcggctcaagaagtaccggggcatgggctcactggatgccatggagaagagcagcagcagccagaaacgatacttcaggttccctgaccctgggccccacctgggcagatcagcccacaacccttcagggcccgctcatgccaccgacttccccagatggcagccagtccccatatggtggttctggaaactgaggcacagggcttaagtagcagacccaggatctgtccctgggccatctgactcagcccagtgaggggtggcctgggggaccttcctgggcggtatcccgtttttgcccttaagaggtggggtggggtcctctgagcttcaagctgctgggctcagtcttccaccctccacgcagcgagggggataaagtgaagatcgcgcagggtgtctcgggctccatccaggacaaaggatccattcagaagttcgtgccctacctcatagcaggcatccaacacggctgccaggatatcggggcccgcagcctgtctgtccttcggtgagtgctgagactgggggtggctcctgcttcctttctctcgctcttctccacccttggtggccctgatctgctccacctaccttcctcctaggtccatgatgtactcaggagagctcaagtttgagaagcggaccatgtcggcccagattgagggtggtgtccatggcctgcactcgta

SEQ ID NO: 12607 - DNA, 671 bp, Homo sapiens
gggacacgtggtcaaggccctggcccttggagcctccacaggcccctggcgagtacttcttctcagacggggtgcggctcaagaagtaccggggcatgggctcactggatgccatggagaagagcagcagcagccagaaacgatacttcaggttccctgaccctgggccccacctgggcagatcagcccacaacccttcagggcccgctcatgccaccgacttccccagatggcagccagtccccatatggtggttctggaaactgaggcacagggcttaagtagcagacccaggatctgtccctgggccatctgactcagcccagtgaggggtggcctgggggaccttcctgggcggtatcccgtttttgcccttaagaggtggggtggggtcctctgagcttcaagctgctgggctcagtcttccaccctccacgcagcgagggggataaagtgaagatcgcgcagggtgtctcgggctccatccaggacaaaggatccattcagaagttcgtgccctacctcatagcaggcatccaacacggctgccaggatatcggggcccgcagcctgtctgtccttcggtccatgatgtactcaggagagctcaagtttgagaagcggaccatgtcggcccagattgagggtggtgtccatggcctgcactcgta

SEQ ID NO: 12608 - DNA, 2196 bp, Homo sapiens
cgagccctcattttcccactggctcctcatcccactgagggtcctggcttctctgcagcacagctgcatcctctgttccctgtggccagcctggacatcatccctggctttcttccagccttttcctcccccatctctgcccgcagaagtttgaacagggcttcatcacggaccctgtggtgctgagcccctcgcacactgtgggcgatgtgctggaggccaagatgcggcatggcttctctggcatccccatcactgagacgggcaccatgggcagcaagctggtgggcatcgtcacctcccgagacatcgactttcttgctgagaaggaccacaccaccctcctcagtgaggtacctgcagggcaggggaagcagggctgggtgtagagaggaccctcacgctggggcctcagactggtgcctgtgaccagggaccagagggaggcctggctccttctctctcacctgccaacctgcaggcaaatgttcctggccccacaggtgatgacgccaaggattgaactggtggtggctccagcaggtgtgacgttgaaagaggcaaatgagatcctgcagcgtagcaagaaaggtaccagggagctagttgaaaactcaacccccagcctgactccctgtccacagtcccgttgttccttcacagccttacaggttatcccagcaaccagactgagccctggggaaggttcgaataacctcaggcaggccagagcacaactcctgccatccttctcttagcttagggaagcttgcccctagtgcagcatcttcatagtatgtttcccaaaactagtcctatgcgatgctcatcagaaaaaaatcctgagcaataactcctttctctatcccctatcttgcataaagaattgcacattcacttattaaaggctctcagaagtcctgcagttaaatttatttgacactagagctgtttttataatattttccagctagaaacaactttagcttttttttttttgagacagagtctcactttctcacccaggctggagtacagtggcgcaatgtcagctcactgcaaccctcgcctcctgggttcaagcaattctcatgcctcagccttctgagtagccaggattacaggcatgtgctactataccagctaattttttttttttttttgtatttttagtagagatggggtttcaccatgttggccaggctggtcttgaactcctggcctcaagtgatctgccctcctgggcctcccaaagtgctggaattacaggcgtgaaccaccatgccctgccacaactttggcttctatttatttatttttgagacagagtcttgctctctcatccaggctggagtgcagtggtgtgatcttggctcactgcaatctctgcctcctgggttcaagcaagtctcctacctcagcctcccgagtagttgggacaacaggcacacaccaacacacccaggtaatttttttgtatttttagtagagatggggtttcaccatattggccgggctgttcttgaactcctggcctcaagtgatccacctgcctcggcctcccaaagtgaggaagctgtgagccaccacacccggccaactttcgcttgttagaaaaaaaaaggaaaaattaaatattcaccaggtccctgttggctatactgggaaatgcttccctggtccatactggagggttctttggtgtctgtattggacagggcacatgcttctccctgcaggacagcatcactcctggctaggagatttcggccactgtggcccagcaggtgaaaggctgccagtgctcgggctgcccatcccaggccacggggatgcccatccacagacccccaggaacctgctgggctgaaagatttctttgctccctgttccttgggaagagggctaggtccctaggaacacttcctgggggcggtgctgtcacctagtggctgactggggtacttcagtggaatctctggagtggtccactttcatcttcaccctcctaaacatctcccaaacttctccccaccaagcctgcttcatttcacccctgcattccttgtcagggaagctgcctatcgtcaatgattgcgatgagctggtggccatcatcgcccgcaccgacctgaagaagaaccgagactaccctctggcctccaaggattcccagaagcagctgctctgtggggc

SEQ ID NO: 12609 - DNA, 587 bp, Homo sapiens
cgagccctcattttcccactggctcctcatcccactgagggtcctggcttctctgcagcacagctgcatcctctgttccctgtggccagcctggacatcatccctggctttcttccagccttttcctcccccatctctgcccgcagaagtttgaacagggcttcatcacggaccctgtggtgctgagcccctcgcacactgtgggcgatgtgctggaggccaagatgcggcatggcttctctggcatccccatcactgagacgggcaccatgggcagcaagctggtgggcatcgtcacctcccgagacatcgactttcttgctgagaaggaccacaccaccctcctcagtgaggcaaatgttcctggccccacaggtgatgacgccaaggattgaactggtggtggctccagcaggtgtgacgttgaaagaggcaaatgagatcctgcagcgtagcaagaaagggaagctgcctatcgtcaatgattgcgatgagctggtggccatcatcgcccgcaccgacctgaagaagaaccgagactaccctctggcctccaaggattcccagaagcagctgctctgtggggc

SEQ ID NO: 12610 - DNA, 13589 bp, Homo sapiens
catggcggactacctgatcagcggcggcaccggctacgtgcccgaggatgggctcaccgcgcagcagctcttcgccagcgccgacggcctcacctacaagtaagcgccgggtctcgtacccctaggtgcgcgcatccacgcgccgcgacccccgggccggccctgcacgtgcgcggctcccccggcgttccctgcccggtgcgagtgcctgctgtgggcgctgggggctgggcacgggaaggaaggaggcccgcgccggagcagacggacgtggcacggcgacaccgcggccctcagagccctgacccgtttctggccagatccgggttcggcctgtccccttcctcctctcagcggcatggaggggccctcgggcgtgtgggaactggagatgtgggcattatggggagacttttcccagccgctggtccaggacgccccctcccagcctcaccacgagggcagagggtccccggagccaagcttaagcagccgcttccgcatggccccaggagaggcccagccaggtggttggggtggcttcttttccaactgtctagtccagcgctttttccagttgtgtccctccctgcccacaggttggtattggtgcccctcccaaggcgcgaattattctgtgactgctacccctaagcccaccctacatggggttttggaggaggacacagacccacccgtctgcctctggcttcatttgccttttccgtggtccctaggccagttgccctgcgtgctgcaggcctggcactagctctgcctcctggctgcaggactgtgcccctgccaggaaggagcatcagaaggggcagagtggggatgctggccagtcaaaagcatccctgccttgtctcctgccagccctgccctggcttgtaagcactcctgcttggccagcagtttccctaaacaccaggatacccagtcactcctgaggagtgtctcctcctgcctgcccgtaggcgacgggtgtatagaacacctagaaaatgctatgaggcccagactccagcatttcttctgtggcctctttgctatacagaagaagggctgccaaaggctgggagcagccgaaattctttgtttttttggtggtctttggtgatgagattgaaagcccacctttgatacagttgtcattgaagtcttctaggagaacaccctaggggaacgcctaggagtttctctaggccttagggcagattaatgacccacccccctccaccctgtggcttttccttcctgcgctagggatgcctgctgctttgcttagctcagttcatagtgttcctgaagtgtgggatatttgcttttgggtgtgtctctcaaggcctgctgtgattttagcaggttggggcccctgagctgtgaccctgcacctagatgtacccatgcaggcctgcacttcccttgcggagtttgctgtgaccgtggcccaccctagtgttggtagctgccatgctttggctggggacccagtgtcctggtcccacctctaaggcctctttcctcccctttcccgtcctggccatttctgttctgctctgtcagaacatgccctgcactcagccccctggggtccctccatgctgttccgagccctgtgtgactcagcagcccaggcaccggggcatgcggactgtcctgtgctgggtcatgttcatactgtgttgagcgccacaaaattgttctcaggtttgttcccaatgtttacttattttctctccccatcaagattgagaagttttcaaaggcaggcactgtgtctgctgtgtgtggcgatatgggaacttctgtgtcgcttgacaaactctgagacttaaaggcaatggatattttgggcctattaccttgatggtaccccagtagacctttcgctgtctttggctctagctctgggggctggagtttgccagactctagtgaggtgcacgaggtgggaactgccctgatggggcagtagggatggggggctgtagcctctgctcctctaggcttttctgtacccccctgctgcctcctctggcatggcaggctctgcccctttggggcacccctccccactaataacactcacttctctgtcttcacagcgacttcctgattctcccaggattcatagacttcatagctgatgaggtggtgagtacctcttcctttgacaaggggagggggctgtgtatgtggtggaagaggctgacttcttgctcaggggcagggcatggagagatggagagacttttcttgggaatgggtggataggatatagtcctttttttttttttttttggagacagagtcttgctctgtcacacaggctggagtgcagtggtgtgatctcagctcactgcagcctccacctcccagattcaagtgattctcctgcctcagcctcctgagtaactgggattacaggcacatgccaaaaccccccgataatttttgtgtttttagtggagacggggtttcaccatgttggccaggctggtctcaaactcctgagctcaagtgatccgtccgcctcagcctccgaagacgctgtgattacaggggtgattccacccagctggtatgggtggatatagcctttattgttgccagagaaacaggcagagatcaaagggttatacctgatggggcagaggcagctatgggaacacaggagtgtcctgagtgaggcctggcccagggctgggtggctctctgtcagtgacagagcctgtgggcaggttcagaagaggcctgggaaggggtgggcttgggagtgggaacggtgggcttgggagtggctgccttattgtagagaccataaggattggattttgtctggaatgctgaacaaggacatgatagaagccagtgaaattatggagatttgaaaccggtagacagacttgttcactgatccacaatgtacaagaactggcaagagggtttaaaagagttacattttggataaatacaaggaaacgcagtgccttgctttcccagaggggctcatcagtgagccgaatcaatgaacaattaacatatgataaactcagagaagcccagatgggtagtgatgatggtgtaagtcatttcaagaaaaagtgccatgattcaatgatgaattcatatacattaaaaaaaaaacatttcttttctgttgctattattattgctatttattctggtctgattctcatgaaaggccagagggcctgagtgtgcctggatcacttacatgtgagggaagttcacatccagctggtgtttagccagagctgacccagacagattttcagggggaaattcgaatgattctggttgtttcccttatgacaacaaccaggaagcctgcttggtgcagctgttcagtttaacaaagtttactggccagtgtggctttgtgtcagaccctgggctggctgctaggaagggagggattgaaaagacccctaccagctgggcgtggtggctcatgcctgtaatcccagcattttgggaggctgaggcaggaggatcacctgaggtcaggagtttgagaccagcctggccaacatggtgaaaccccatctctactaaaaatgcaaaaattagctgggcattgtggcgggcatctgtaatcccagctactcgggaggctgaggcaggagaatcacttgaatctgggaggcggaggttgcagtgagtcgggattgcactactgtactctagcctgggtgacagaatgaggctccatcagagagagaaaaaaaaaaaaaccctgcctggccggcaaggatctccttgtcctgtggcttctgtcaggaaggctgtggcccttctgtggcatgacaaaagagaagatggtgttttctagatcatggggccagaggtctgaactagggttagtgatgggtttcagggactttgaatctaaaaaaattacatagcaaagtctgcacaaatgtcttggggactgggatccactactgttggcctgaccctcagaggggtatgtgctctggcctttcctccatgggcaggtggcttttaaatggatacttgcaatcctgaccactctcctgagctccagaccattcgttgcttgctttcctggatgcctaaaagactcttttccatgcctacccccacctcagcccttgtcacccagaatccattctccaccttggagcctgagtgacctttttgaaacataaatcagatcatttctctgtcaagaccctccagtggcttctctccgaatcaaatctgagcttctgtccgtggtcttcacggccatgcatgctgcccctgccttcctcctgcctctcccttccctccactcccctggccttctttttctttcttaagtgtgcctccgaaagaactggaccctgaggcgggtttgcactcagtccctcagccgagagtgacagcccctctgacttctacttaatcggctcccactggtcacctcccaggaaagaggctttccccagtcaccttgttgccagtggtcgcttggcctttttgtttttctctgcagccttcatcctgactgaagtcatcttgagcatatgtcctgtgtctgtcatttttctttccaagtagaacataagctccattagatgagctgggaactcatccaccttgttcactgccatgtccccagggcctgtcctggtgccggtgcatgtaggagctcagtgagtgagtgtccagtgggtgataaactctttacgtgggctgtgcctccatcctcaggacctgacctcagccctgacccggaagatcacgctgaagacgccactgatctcctcccccatggacactgtgacagaggctgacatggccattgccatggctgtgagttacacacctgcatggggactccagggcacacaggaactgaccatggtgggctgtgctgaggggcagggctgaggaggaatgggccccggctctgaccacacttcccttctacatcagctgatgggaggtattggtttcattcaccacaactgcaccccagagttccaggccaacgaggtgcggaaggtcaaggcaagtaccaggcctgtccccagcaagatgccacctggcagtccccacctcagaggccctcccagcctcccctgccagccctgcactgctacactccctgcgtgtccttcctctcagtggagccttggggccgagccctcattttcccactggctcctcatcccactgagggtcctggcttctctgcagcacagctgcatcctctgttccctgtggccagcctggacatcatccctggctttcttccagccttttcctcccccatctctgcccgcagaagtttgaacagggcttcatcacggaccctgtggtgctgagcccctcgcacactgtgggcgatgtgctggaggccaagatgcggcatggcttctctggcatccccatcactgagacgggcaccatgggcagcaagctggtgggcatcgtcacctcccgagacatcgactttcttgctgagaaggaccacaccaccctcctcagtgaggtacctgcagggcaggggaagcagggctgggtgtagagaggaccctcacgctggggcctcagactggtgcctgtgaccagggaccagagggaggcctggctccttctctctcacctgccaacctgcaggcaaatgttcctggccccacaggtgatgacgccaaggattgaactggtggtggctccagcaggtgtgacgttgaaagaggcaaatgagatcctgcagcgtagcaagaaaggtaccagggagctagttgaaaactcaacccccagcctgactccctgtccacagtcccgttgttccttcacagccttacaggttatcccagcaaccagactgagccctggggaaggttcgaataacctcaggcaggccagagcacaactcctgccatccttctcttagcttagggaagcttgcccctagtgcagcatcttcatagtatgtttcccaaaactagtcctatgcgatgctcatcagaaaaaaatcctgagcaataactcctttctctatcccctatcttgcataaagaattgcacattcacttattaaaggctctcagaagtcctgcagttaaatttatttgacactagagctgtttttataatattttccagctagaaacaactttagcttttttttttttgagacagagtctcactttctcacccaggctggagtacagtggcgcaatgtcagctcactgcaaccctcgcctcctgggttcaagcaattctcatgcctcagccttctgagtagccaggattacaggcatgtgctactataccagctaattttttttttttttttgtatttttagtagagatggggtttcaccatgttggccaggctggtcttgaactcctggcctcaagtgatctgccctcctgggcctcccaaagtgctggaattacaggcgtgaaccaccatgccctgccacaactttggcttctatttatttatttttgagacagagtcttgctctctcatccaggctggagtgcagtggtgtgatcttggctcactgcaatctctgcctcctgggttcaagcaagtctcctacctcagcctcccgagtagttgggacaacaggcacacaccaacacacccaggtaatttttttgtatttttagtagagatggggtttcaccatattggccgggctgttcttgaactcctggcctcaagtgatccacctgcctcggcctcccaaagtgaggaagctgtgagccaccacacccggccaactttcgcttgttagaaaaaaaaaggaaaaattaaatattcaccaggtccctgttggctatactgggaaatgcttccctggtccatactggagggttctttggtgtctgtattggacagggcacatgcttctccctgcaggacagcatcactcctggctaggagatttcggccactgtggcccagcaggtgaaaggctgccagtgctcgggctgcccatcccaggccacggggatgcccatccacagacccccaggaacctgctgggctgaaagatttctttgctccctgttccttgggaagagggctaggtccctaggaacacttcctgggggcggtgctgtcacctagtggctgactggggtacttcagtggaatctctggagtggtccactttcatcttcaccctcctaaacatctcccaaacttctccccaccaagcctgcttcatttcacccctgcattccttgtcagggaagctgcctatcgtcaatgattgcgatgagctggtggccatcatcgcccgcaccgacctgaagaagaaccgagactaccctctggcctccaaggattcccagaagcagctgctctgtggggcagctgtgggcacccgtgaggatgacaaataccgtctggacctgctcacccaggcgggcgtcgacgtcatagtcttggtaaggcccccgcctgagtggtgggggagatggatgagtggttcagcagagtggaggtttatgaggacccaggttcacctctgattaagcctgtgcccctcccttgctactcttcctctctctttctgagtgctccctggtgtcagaattaggagggtggcagcaggattgcctgagctcagaggttcaaggtcacagtgagctaggatcgtgccactgcactccagccctggggacagaacgagaccctttctcaaaaaacaaacaatggtttgtgtcatctgagatacaaagaaagaaaacaaacaagttaaaattctccagtggcacagccataagaaagaatgaaatcctgtcctttgcagcaacatggacagagctagaagccattatccttagtgaactaactccaaagcagaaaaccaaatactgcatgccctcacttataagtaggagctaaacagagagtacacatgttcataaagatggaaataatagacgctggggactccaaaatgggagagggtgggaggggaacgaaggatgaaaaattggctatcagacacagttttcgatatgtgggtattaggtacacttgaagcccaattctcaccagtatgcagtattccatttaagcaacaagcacatgtacccactgaatccttaaaaaaaaaattgacaaattgttgcaagcaacaattgcaaatcaagactctcccccaccccccgataaagggaggtagaataaagataaaggcttattgatcccttgtgagtgatctggaccatacatctagattcatctgtattctataactaggaggaagagaaattaggaaggtcactggcaccctctcaacagctcacaacagactgcaaacaaaggcctctgagggccttcttggctcataagttgaccctgataatttagctcacgtttactgagaaccgcctgtttgccaggcactgcgtcaagaccttaatgtatatcagtccattgaggaacagtcgccattccattttcagatgaagaaacaggcttaaagaagttaagtcatttcatttggttagtgagttggtgggaacaggatatggctccaggcagtgtctccttgctttaaggatcagtctgtacaatggataggaaaggccttatgtactctaagactgcattagttgtggttaacctttcagggaagcagtcccctttgagaattgactgaaagttgtcaagtgaatttccagaaaaaaaaaaaaaaaaacaaccagaaggaaagagcattctcataacagttttcataggatttgaggggttcatccactcaggctctccctcctgccttgagaatcctcagctgtctaagcccaagctcttccgtcctttctcacaggactcgtcccaagggaattcggtgtatcagatcgccatggtgcattacatcaaacagaagtacccccacctccaggtgattggggggaacggtgagtgcggggtcgcctcccacccgcctgctcctgcccctccaatgagtaacccttttctgtccttcagcatccctaggtgatggtatggctcctggcatgggtggcagggagcatgatgggctttggtcactgtaggggggttggggggtgctagactggggtcccaagaggctgttgggcaggcaggggcatcccatcctcacattgttcctctgccccatccccacccccagtggtgacagcagcccaggccaagaacctgattgatgctggtgtggacgggctgcgcgtgggcatgggctgcggctccatctgcatcacccaggaaggtgggtgtcaggaggtgagcgagtgcccgctggccccggggcctcgcctttgttccccagatgtatatcaagtactctctctgccaggccctgttctgccatggtaggctccggggtgacccaggcatgggccccaccccatcgggcccactgacttaggggaaggcaggtgtaagcagggtgcaagagctgcagcctgcttctcagagtgcggtcaagggggctctgcctggggcttggggcctggggctggtgtgactgtccatggggcttgttggaacctcagggtttggatttgatttgtgacaaggcagatatttaagacacagagacgacatgtccctgaatatataaagatatgttatacacctgcttcaccatgtggttgggcgtggggagttccacccaattacaaagcccttttgcagggtgggttcctgaacatgaagtgggaaggggggagcctggcatgtgtcccccatgtggttattgaggaggtgctccctggaggctggtatctgacttgtggggtggctgcctggaagacttgggtcctcacttggcctgaggagatgtacccggcccctcctgtgagggcaatttctccaaaacactgagtgatgcatttggcctttcctaccccaaacagctcccccttttggtcctcagagcctctgctatttaggtttgtgcccttcgccttaggtggccaccatggtgaaatgagggccctctctcacccacttaacaaatattcattaggcacctacttgtctcaggcactgttcaaagctttgaggtagagtagggacaaaacaaatgagaggcgccatctctggtttatccagctttgcatccgtccctagacaggtgtggttccttgtagtccccacctaaaacctaacactgaaggaccttggacacttagacttgaagaaatgcaaaccagtatcccaaaggggaccatagtacctaaccctggtaacggtttttgcaaacaaaagccttgaaggggaacttgtgccttgagagcaggtgaggctggggccacctgtctgggggcattgggctctgaaggccgcttctggttcccccgtcagaatcccctgtcatgctcttaggggtggggtggcccagatccctagagtgacactcatcctggtggtatttgccagcacctatgttatgcctcagacacaccatccagccctgtcccttttcctgagtagaggtagtgcacaggaggaagagctgggctggccccgctccaggccccggagttgctgttgactcttctctgccttgtgcaccccaccctcccccagtgatggcctgtggtcggccccagggcactgctgtgtacaaggtggctgagtatgcccggcgctttggtgtgcccatcatagccgatggcggcatccagaccgtgggacacgtggtcaaggccctggcccttggagcctccacaggtgaggggagaatgtgctggggattgggcaggcgagggctggaagctgggggggtggcactagtgggctggaggcactaatcccttgcccactgtagtgatgatgggctccctgctggccgccactacggaggcccctggcgagtacttcttctcagacggggtgcggctcaagaagtaccggggcatgggctcactggatgccatggagaagagcagcagcagccagaaacgatacttcaggttccctgaccctgggccccacctgggcagatcagcccacaacccttcagggcccgctcatgccaccgacttccccagatggcagccagtccccatatggtggttctggaaactgaggcacagggcttaagtagcagacccaggatctgtccctgggccatctgactcagcccagtgaggggtggcctgggggaccttcctgggcggtatcccgtttttgcccttaagaggtggggtggggtcctctgagcttcaagctgctgggctcagtcttccaccctccacgcagcgagggggataaagtgaagatcgcgcagggtgtctcgggctccatccaggacaaaggatccattcagaagttcgtgccctacctcatagcaggcatccaacacggctgccaggatatcggggcccgcagcctgtctgtccttcggtgagtgctgagactgggggtggctcctgcttcctttctctcgctcttctccacccttggtggccctgatctgctccacctaccttcctcctaggtccatgatgtactcaggagagctcaagtttgagaagcggaccatgtcggcccagattgagggtggtgtccatggcctgcactcgtaagtgtggtggcctccttgctgtcacttggaggcagtgggttgggcaggtggggccagggttctgaggtcaagctgaggttccagggaccccatggaccacctgcagcagggacagatgctgctgcaggatggcccctcaccctctcttcgggggcccagccccctgttccttgtcctttagtccccatgcaagcaggccctcccctcccctcgggcctctcccgagcagggcacaggaggtgtggccagtcactgcacctggactcccagcccttgcttgctcaggaagcttggtggctggtggcaggggctgtggtggcaccaggcagccaggcagaagatgcgggtgtgacccctctggcgggtacaagggcagagagatggacgccagggccagcgctggggcaaccgtgggcgggggcagtgctcgttggcagcagtagttgcaggcatgtgccccaccctggtcaggagccctgtccccaggtatcagcgggcgtctaacctgtgtctctttccgccccacccttccgtagctatacctttctgccgtgtaagtaaccgcgctgcccgggccaagcgtagagtagagcaggggcagtctgggtgggacctgggctggaggtgggggtgggtattgggtgggggtaggagggtgctggggtgtaaccatgagatgtggaccctgggtttgggcccccccggccccctaactccaacaccatgatggaggaaaccagcagtgtcccctcatccagctgaaacacatatccctttctggctgcagagagatgcccgtgacctcaggcctaaggctgccccattttagactggacccagtgaccacaagcagcctaggccactgtgcctgcagggctggggctgggtgcggacatgggcagcagaggttcggctccaggttggagtttgctccatgaggatgggccatgcctgcctgagctgtccctccaccctgggcactgaggacatccactcagatgtggcgatggcccaaaggagcatggccatctctgcacccagcatggttcttcagggaatgctggcctgggggaggacagaggcctagggcctgctccaggccctcctcctgcgccgtacggctgagatctcagggcttctcagctctctgttctctcctacatctgggggccctggggaaagggttttgggaaggagcagggtccacacacccactcttgttccccctcttgccttgtccccacagttacgaaaagcggctgtactgaggacagcggtggaggccgaggtggtggaggggatgcaccccagtgtccacttttgggcacagcctccctccataactgagtggtccacagatttgcactacgggttctccagctcctttccaggcagagaggaggggaggtcctgaggggactgctgcccctcactcggcatcccctgcagagtcaggactgctcccggggccaggctgccctgggagcccccctccgagcccagccagccaggctctcaggccctgcgcctgcctcaggtctttcttgctgcagcctgctccagcctggcccccaccccaggggcaggcggcccctcctggcttctcctgtagggcacctccctgcccctagcctcccaggaaatggtgctctcctggccctgcctctggcccttcccgggccgctgcccctcagccatgtggcacttctgagctcctgacctaggccaaggggaggtctctgcccccttccccggccctgggctacccttgggtcctgctcctcaggccgctcccctgtccctggccatgggtaggagactgccctggtcatggccgcctgcctgtcattcctgactcaccaccgtccccaggtgaaccattcctcccttctcctcagctgcagtcgaaggctttaactttgcacacttgggatcacagttgcgtcattgtgtattaaatacttggaataaatcaagcaggtctcaacgcctccacta

SEQ ID NO: 12611 - DNA, 2295 bp, Homo sapiens
catggcggactacctgatcagcggcggcaccggctacgtgcccgaggatgggctcaccgcgcagcagctcttcgccagcgccgacggcctcacctacaacgacttcctgattctcccaggattcatagacttcatagctgatgaggtggacctgacctcagccctgacccggaagatcacgctgaagacgccactgatctcctcccccatggacactgtgacagaggctgacatggccattgccatggctctgatgggaggtattggtttcattcaccacaactgcaccccagagttccaggccaacgaggtgcggaaggtcaagtttgaacagggcttcatcacggaccctgtggtgctgagcccctcgcacactgtgggcgatgtgctggaggccaagatgcggcatggcttctctggcatccccatcactgagacgggcaccatgggcagcaagctggtgggcatcgtcacctcccgagacatcgactttcttgctgagaaggaccacaccaccctcctcagtgaggcaaatgttcctggccccacaggtgatgacgccaaggattgaactggtggtggctccagcaggtgtgacgttgaaagaggcaaatgagatcctgcagcgtagcaagaaagggaagctgcctatcgtcaatgattgcgatgagctggtggccatcatcgcccgcaccgacctgaagaagaaccgagactaccctctggcctccaaggattcccagaagcagctgctctgtggggcagctgtgggcacccgtgaggatgacaaataccgtctggacctgctcacccaggcgggcgtcgacgtcatagtcttggactcgtcccaagggaattcggtgtatcagatcgccatggtgcattacatcaaacagaagtacccccacctccaggtgattggggggaacgtggtgacagcagcccaggccaagaacctgattgatgctggtgtggacgggctgcgcgtgggcatgggctgcggctccatctgcatcacccaggaagtgatggcctgtggtcggccccagggcactgctgtgtacaaggtggctgagtatgcccggcgctttggtgtgcccatcatagccgatggcggcatccagaccgtgggacacgtggtcaaggccctggcccttggagcctccacagtgatgatgggctccctgctggccgccactacggaggcccctggcgagtacttcttctcagacggggtgcggctcaagaagtaccggggcatgggctcactggatgccatggagaagagcagcagcagccagaaacgatacttcagcgagggggataaagtgaagatcgcgcagggtgtctcgggctccatccaggacaaaggatccattcagaagttcgtgccctacctcatagcaggcatccaacacggctgccaggatatcggggcccgcagcctgtctgtccttcggtccatgatgtactcaggagagctcaagtttgagaagcggaccatgtcggcccagattgagggtggtgtccatggcctgcactcttacgaaaagcggctgtactgaggacagcggtggaggccgaggtggtggaggggatgcaccccagtgtccacttttgggcacagcctccctccataactgagtggtccacagatttgcactacgggttctccagctcctttccaggcagagaggaggggaggtcctgaggggactgctgcccctcactcggcatcccctgcagagtcaggactgctcccggggccaggctgccctgggagcccccctccgagcccagccagccaggctctcaggccctgcgcctgcctcaggtctttcttgctgcagcctgctccagcctggcccccaccccaggggcaggcggcccctcctggcttctcctgtagggcacctccctgcccctagcctcccaggaaatggtgctctcctggccctgcctctggcccttcccgggccgctgcccctcagccatgtggcacttctgagctcctgacctaggccaaggggaggtctctgcccccttccccggccctgggctacccttgggtcctgctcctcaggccgctcccctgtccctggccatgggtaggagactgccctggtcatggccgcctgcctgtcattcctgactcaccaccgtccccaggtgaaccattcctcccttctcctcagctgcagtcgaaggctttaactttgcacacttgggatcacagttgcgtcattgtgtattaaatacttggaataaatcaagcaggtctcaacgcctccacta

SEQ ID NO: 12612 - DNA, 13204 bp, Homo sapiens
agtagcagcagcagcagcggcggcagcggcgggcggccgcgcgggtgtttatgtcgggtcgcggggtctcgcggcagcatggcggactacctgatcagcggcggcaccggctacgtgcccgaggatgggctcaccgcgcagcagctcttcgccagcgccgacggcctcacctacaagtaagcgccgggtctcgtacccctaggtgcgcgcatccacgcgccgcgacccccgggccggccctgcacgtgcgcggctcccccggcgttccctgcccggtgcgagtgcctgctgtgggcgctgggggctgggcacgggaaggaaggaggcccgcgccggagcagacggacgtggcacggcgacaccgcggccctcagagccctgacccgtttctggccagatccgggttcggcctgtccccttcctcctctcagcggcatggaggggccctcgggcgtgtgggaactggagatgtgggcattatggggagacttttcccagccgctggtccaggacgccccctcccagcctcaccacgagggcagagggtccccggagccaagcttaagcagccgcttccgcatggccccaggagaggcccagccaggtggttggggtggcttcttttccaactgtctagtccagcgctttttccagttgtgtccctccctgcccacaggttggtattggtgcccctcccaaggcgcgaattattctgtgactgctacccctaagcccaccctacatggggttttggaggaggacacagacccacccgtctgcctctggcttcatttgccttttccgtggtccctaggccagttgccctgcgtgctgcaggcctggcactagctctgcctcctggctgcaggactgtgcccctgccaggaaggagcatcagaaggggcagagtggggatgctggccagtcaaaagcatccctgccttgtctcctgccagccctgccctggcttgtaagcactcctgcttggccagcagtttccctaaacaccaggatacccagtcactcctgaggagtgtctcctcctgcctgcccgtaggcgacgggtgtatagaacacctagaaaatgctatgaggcccagactccagcatttcttctgtggcctctttgctatacagaagaagggctgccaaaggctgggagcagccgaaattctttgtttttttggtggtctttggtgatgagattgaaagcccacctttgatacagttgtcattgaagtcttctaggagaacaccctaggggaacgcctaggagtttctctaggccttagggcagattaatgacccacccccctccaccctgtggcttttccttcctgcgctagggatgcctgctgctttgcttagctcagttcatagtgttcctgaagtgtgggatatttgcttttgggtgtgtctctcaaggcctgctgtgattttagcaggttggggcccctgagctgtgaccctgcacctagatgtacccatgcaggcctgcacttcccttgcggagtttgctgtgaccgtggcccaccctagtgttggtagctgccatgctttggctggggacccagtgtcctggtcccacctctaaggcctctttcctcccctttcccgtcctggccatttctgttctgctctgtcagaacatgccctgcactcagccccctggggtccctccatgctgttccgagccctgtgtgactcagcagcccaggcaccggggcatgcggactgtcctgtgctgggtcatgttcatactgtgttgagcgccacaaaattgttctcaggtttgttcccaatgtttacttattttctctccccatcaagattgagaagttttcaaaggcaggcactgtgtctgctgtgtgtggcgatatgggaacttctgtgtcgcttgacaaactctgagacttaaaggcaatggatattttgggcctattaccttgatggtaccccagtagacctttcgctgtctttggctctagctctgggggctggagtttgccagactctagtgaggtgcacgaggtgggaactgccctgatggggcagtagggatggggggctgtagcctctgctcctctaggcttttctgtacccccctgctgcctcctctggcatggcaggctctgcccctttggggcacccctccccactaataacactcacttctctgtcttcacagcgacttcctgattctcccaggattcatagacttcatagctgatgaggtggtgagtacctcttcctttgacaaggggagggggctgtgtatgtggtggaagaggctgacttcttgctcaggggcagggcatggagagatggagagacttttcttgggaatgggtggataggatatagtcctttttttttttttttttggagacagagtcttgctctgtcacacaggctggagtgcagtggtgtgatctcagctcactgcagcctccacctcccagattcaagtgattctcctgcctcagcctcctgagtaactgggattacaggcacatgccaaaaccccccgataatttttgtgtttttagtggagacggggtttcaccatgttggccaggctggtctcaaactcctgagctcaagtgatccgtccgcctcagcctccgaagacgctgtgattacaggggtgattccacccagctggtatgggtggatatagcctttattgttgccagagaaacaggcagagatcaaagggttatacctgatggggcagaggcagctatgggaacacaggagtgtcctgagtgaggcctggcccagggctgggtggctctctgtcagtgacagagcctgtgggcaggttcagaagaggcctgggaaggggtgggcttgggagtgggaacggtgggcttgggagtggctgccttattgtagagaccataaggattggattttgtctggaatgctgaacaaggacatgatagaagccagtgaaattatggagatttgaaaccggtagacagacttgttcactgatccacaatgtacaagaactggcaagagggtttaaaagagttacattttggataaatacaaggaaacgcagtgccttgctttcccagaggggctcatcagtgagccgaatcaatgaacaattaacatatgataaactcagagaagcccagatgggtagtgatgatggtgtaagtcatttcaagaaaaagtgccatgattcaatgatgaattcatatacattaaaaaaaaaacatttcttttctgttgctattattattgctatttattctggtctgattctcatgaaaggccagagggcctgagtgtgcctggatcacttacatgtgagggaagttcacatccagctggtgtttagccagagctgacccagacagattttcagggggaaattcgaatgattctggttgtttcccttatgacaacaaccaggaagcctgcttggtgcagctgttcagtttaacaaagtttactggccagtgtggctttgtgtcagaccctgggctggctgctaggaagggagggattgaaaagacccctaccagctgggcgtggtggctcatgcctgtaatcccagcattttgggaggctgaggcaggaggatcacctgaggtcaggagtttgagaccagcctggccaacatggtgaaaccccatctctactaaaaatgcaaaaattagctgggcattgtggcgggcatctgtaatcccagctactcgggaggctgaggcaggagaatcacttgaatctgggaggcggaggttgcagtgagtcgggattgcactactgtactctagcctgggtgacagaatgaggctccatcagagagagaaaaaaaaaaaaaccctgcctggccggcaaggatctccttgtcctgtggcttctgtcaggaaggctgtggcccttctgtggcatgacaaaagagaagatggtgttttctagatcatggggccagaggtctgaactagggttagtgatgggtttcagggactttgaatctaaaaaaattacatagcaaagtctgcacaaatgtcttggggactgggatccactactgttggcctgaccctcagaggggtatgtgctctggcctttcctccatgggcaggtggcttttaaatggatacttgcaatcctgaccactctcctgagctccagaccattcgttgcttgctttcctggatgcctaaaagactcttttccatgcctacccccacctcagcccttgtcacccagaatccattctccaccttggagcctgagtgacctttttgaaacataaatcagatcatttctctgtcaagaccctccagtggcttctctccgaatcaaatctgagcttctgtccgtggtcttcacggccatgcatgctgcccctgccttcctcctgcctctcccttccctccactcccctggccttctttttctttcttaagtgtgcctccgaaagaactggaccctgaggcgggtttgcactcagtccctcagccgagagtgacagcccctctgacttctacttaatcggctcccactggtcacctcccaggaaagaggctttccccagtcaccttgttgccagtggtcgcttggcctttttgtttttctctgcagccttcatcctgactgaagtcatcttgagcatatgtcctgtgtctgtcatttttctttccaagtagaacataagctccattagatgagctgggaactcatccaccttgttcactgccatgtccccagggcctgtcctggtgccggtgcatgtaggagctcagtgagtgagtgtccagtgggtgataaactctttacgtgggctgtgcctccatcctcaggacctgacctcagccctgacccggaagatcacgctgaagacgccactgatctcctcccccatggacactgtgacagaggctgacatggccattgccatggctgtgagttacacacctgcatggggactccagggcacacaggaactgaccatggtgggctgtgctgaggggcagggctgaggaggaatgggccccggctctgaccacacttcccttctacatcagctgatgggaggtattggtttcattcaccacaactgcaccccagagttccaggccaacgaggtgcggaaggtcaaggcaagtaccaggcctgtccccagcaagatgccacctggcagtccccacctcagaggccctcccagcctcccctgccagccctgcactgctacactccctgcgtgtccttcctctcagtggagccttggggccgagccctcattttcccactggctcctcatcccactgagggtcctggcttctctgcagcacagctgcatcctctgttccctgtggccagcctggacatcatccctggctttcttccagccttttcctcccccatctctgcccgcagaagtttgaacagggcttcatcacggaccctgtggtgctgagcccctcgcacactgtgggcgatgtgctggaggccaagatgcggcatggcttctctggcatccccatcactgagacgggcaccatgggcagcaagctggtgggcatcgtcacctcccgagacatcgactttcttgctgagaaggaccacaccaccctcctcagtgaggtacctgcagggcaggggaagcagggctgggtgtagagaggaccctcacgctggggcctcagactggtgcctgtgaccagggaccagagggaggcctggctccttctctctcacctgccaacctgcaggcaaatgttcctggccccacaggtgatgacgccaaggattgaactggtggtggctccagcaggtgtgacgttgaaagaggcaaatgagatcctgcagcgtagcaagaaaggtaccagggagctagttgaaaactcaacccccagcctgactccctgtccacagtcccgttgttccttcacagccttacaggttatcccagcaaccagactgagccctggggaaggttcgaataacctcaggcaggccagagcacaactcctgccatccttctcttagcttagggaagcttgcccctagtgcagcatcttcatagtatgtttcccaaaactagtcctatgcgatgctcatcagaaaaaaatcctgagcaataactcctttctctatcccctatcttgcataaagaattgcacattcacttattaaaggctctcagaagtcctgcagttaaatttatttgacactagagctgtttttataatattttccagctagaaacaactttagcttttttttttttgagacagagtctcactttctcacccaggctggagtacagtggcgcaatgtcagctcactgcaaccctcgcctcctgggttcaagcaattctcatgcctcagccttctgagtagccaggattacaggcatgtgctactataccagctaattttttttttttttttgtatttttagtagagatggggtttcaccatgttggccaggctggtcttgaactcctggcctcaagtgatctgccctcctgggcctcccaaagtgctggaattacaggcgtgaaccaccatgccctgccacaactttggcttctatttatttatttttgagacagagtcttgctctctcatccaggctggagtgcagtggtgtgatcttggctcactgcaatctctgcctcctgggttcaagcaagtctcctacctcagcctcccgagtagttgggacaacaggcacacaccaacacacccaggtaatttttttgtatttttagtagagatggggtttcaccatattggccgggctgttcttgaactcctggcctcaagtgatccacctgcctcggcctcccaaagtgaggaagctgtgagccaccacacccggccaactttcgcttgttagaaaaaaaaaggaaaaattaaatattcaccaggtccctgttggctatactgggaaatgcttccctggtccatactggagggttctttggtgtctgtattggacagggcacatgcttctccctgcaggacagcatcactcctggctaggagatttcggccactgtggcccagcaggtgaaaggctgccagtgctcgggctgcccatcccaggccacggggatgcccatccacagacccccaggaacctgctgggctgaaagatttctttgctccctgttccttgggaagagggctaggtccctaggaacacttcctgggggcggtgctgtcacctagtggctgactggggtacttcagtggaatctctggagtggtccactttcatcttcaccctcctaaacatctcccaaacttctccccaccaagcctgcttcatttcacccctgcattccttgtcagggaagctgcctatcgtcaatgattgcgatgagctggtggccatcatcgcccgcaccgacctgaagaagaaccgagactaccctctggcctccaaggattcccagaagcagctgctctgtggggcagctgtgggcacccgtgaggatgacaaataccgtctggacctgctcacccaggcgggcgtcgacgtcatagtcttggtaaggcccccgcctgagtggtgggggagatggatgagtggttcagcagagtggaggtttatgaggacccaggttcacctctgattaagcctgtgcccctcccttgctactcttcctctctctttctgagtgctccctggtgtcagaattaggagggtggcagcaggattgcctgagctcagaggttcaaggtcacagtgagctaggatcgtgccactgcactccagccctggggacagaacgagaccctttctcaaaaaacaaacaatggtttgtgtcatctgagatacaaagaaagaaaacaaacaagttaaaattctccagtggcacagccataagaaagaatgaaatcctgtcctttgcagcaacatggacagagctagaagccattatccttagtgaactaactccaaagcagaaaaccaaatactgcatgccctcacttataagtaggagctaaacagagagtacacatgttcataaagatggaaataatagacgctggggactccaaaatgggagagggtgggaggggaacgaaggatgaaaaattggctatcagacacagttttcgatatgtgggtattaggtacacttgaagcccaattctcaccagtatgcagtattccatttaagcaacaagcacatgtacccactgaatccttaaaaaaaaaattgacaaattgttgcaagcaacaattgcaaatcaagactctcccccaccccccgataaagggaggtagaataaagataaaggcttattgatcccttgtgagtgatctggaccatacatctagattcatctgtattctataactaggaggaagagaaattaggaaggtcactggcaccctctcaacagctcacaacagactgcaaacaaaggcctctgagggccttcttggctcataagttgaccctgataatttagctcacgtttactgagaaccgcctgtttgccaggcactgcgtcaagaccttaatgtatatcagtccattgaggaacagtcgccattccattttcagatgaagaaacaggcttaaagaagttaagtcatttcatttggttagtgagttggtgggaacaggatatggctccaggcagtgtctccttgctttaaggatcagtctgtacaatggataggaaaggccttatgtactctaagactgcattagttgtggttaacctttcagggaagcagtcccctttgagaattgactgaaagttgtcaagtgaatttccagaaaaaaaaaaaaaaaaacaaccagaaggaaagagcattctcataacagttttcataggatttgaggggttcatccactcaggctctccctcctgccttgagaatcctcagctgtctaagcccaagctcttccgtcctttctcacaggactcgtcccaagggaattcggtgtatcagatcgccatggtgcattacatcaaacagaagtacccccacctccaggtgattggggggaacggtgagtgcggggtcgcctcccacccgcctgctcctgcccctccaatgagtaacccttttctgtccttcagcatccctaggtgatggtatggctcctggcatgggtggcagggagcatgatgggctttggtcactgtaggggggttggggggtgctagactggggtcccaagaggctgttgggcaggcaggggcatcccatcctcacattgttcctctgccccatccccacccccagtggtgacagcagcccaggccaagaacctgattgatgctggtgtggacgggctgcgcgtgggcatgggctgcggctccatctgcatcacccaggaaggtgggtgtcaggaggtgagcgagtgcccgctggccccggggcctcgcctttgttccccagatgtatatcaagtactctctctgccaggccctgttctgccatggtaggctccggggtgacccaggcatgggccccaccccatcgggcccactgacttaggggaaggcaggtgtaagcagggtgcaagagctgcagcctgcttctcagagtgcggtcaagggggctctgcctggggcttggggcctggggctggtgtgactgtccatggggcttgttggaacctcagggtttggatttgatttgtgacaaggcagatatttaagacacagagacgacatgtccctgaatatataaagatatgttatacacctgcttcaccatgtggttgggcgtggggagttccacccaattacaaagcccttttgcagggtgggttcctgaacatgaagtgggaaggggggagcctggcatgtgtcccccatgtggttattgaggaggtgctccctggaggctggtatctgacttgtggggtggctgcctggaagacttgggtcctcacttggcctgaggagatgtacccggcccctcctgtgagggcaatttctccaaaacactgagtgatgcatttggcctttcctaccccaaacagctcccccttttggtcctcagagcctctgctatttaggtttgtgcccttcgccttaggtggccaccatggtgaaatgagggccctctctcacccacttaacaaatattcattaggcacctacttgtctcaggcactgttcaaagctttgaggtagagtagggacaaaacaaatgagaggcgccatctctggtttatccagctttgcatccgtccctagacaggtgtggttccttgtagtccccacctaaaacctaacactgaaggaccttggacacttagacttgaagaaatgcaaaccagtatcccaaaggggaccatagtacctaaccctggtaacggtttttgcaaacaaaagccttgaaggggaacttgtgccttgagagcaggtgaggctggggccacctgtctgggggcattgggctctgaaggccgcttctggttcccccgtcagaatcccctgtcatgctcttaggggtggggtggcccagatccctagagtgacactcatcctggtggtatttgccagcacctatgttatgcctcagacacaccatccagccctgtcccttttcctgagtagaggtagtgcacaggaggaagagctgggctggccccgctccaggccccggagttgctgttgactcttctctgccttgtgcaccccaccctcccccagtgatggcctgtggtcggccccagggcactgctgtgtacaaggtggctgagtatgcccggcgctttggtgtgcccatcatagccgatggcggcatccagaccgtgggacacgtggtcaaggccctggcccttggagcctccacaggtgaggggagaatgtgctggggattgggcaggcgagggctggaagctgggggggtggcactagtgggctggaggcactaatcccttgcccactgtagtgatgatgggctccctgctggccgccactacggaggcccctggcgagtacttcttctcagacggggtgcggctcaagaagtaccggggcatgggctcactggatgccatggagaagagcagcagcagccagaaacgatacttcaggttccctgaccctgggccccacctgggcagatcagcccacaacccttcagggcccgctcatgccaccgacttccccagatggcagccagtccccatatggtggttctggaaactgaggcacagggcttaagtagcagacccaggatctgtccctgggccatctgactcagcccagtgaggggtggcctgggggaccttcctgggcggtatcccgtttttgcccttaagaggtggggtggggtcctctgagcttcaagctgctgggctcagtcttccaccctccacgcagcgagggggataaagtgaagatcgcgcagggtgtctcgggctccatccaggacaaaggatccattcagaagttcgtgccctacctcatagcaggcatccaacacggctgccaggatatcggggcccgcagcctgtctgtccttcggtgagtgctgagactgggggtggctcctgcttcctttctctcgctcttctccacccttggtggccctgatctgctccacctaccttcctcctaggtccatgatgtactcaggagagctcaagtttgagaagcggaccatgtcggcccagattgagggtggtgtccatggcctgcactcgtaagtgtggtggcctccttgctgtcacttggaggcagtgggttgggcaggtggggccagggttctgaggtcaagctgaggttccagggaccccatggaccacctgcagcagggacagatgctgctgcaggatggcccctcaccctctcttcgggggcccagccccctgttccttgtcctttagtccccatgcaagcaggccctcccctcccctcgggcctctcccgagcagggcacaggaggtgtggccagtcactgcacctggactcccagcccttgcttgctcaggaagcttggtggctggtggcaggggctgtggtggcaccaggcagccaggcagaagatgcgggtgtgacccctctggcgggtacaagggcagagagatggacgccagggccagcgctggggcaaccgtgggcgggggcagtgctcgttggcagcagtagttgcaggcatgtgccccaccctggtcaggagccctgtccccaggtatcagcgggcgtctaacctgtgtctctttccgccccacccttccgtagctatacctttctgccgtgtaagtaaccgcgctgcccgggccaagcgtagagtagagcaggggcagtctgggtgggacctgggctggaggtgggggtgggtattgggtgggggtaggagggtgctggggtgtaaccatgagatgtggaccctgggtttgggcccccccggccccctaactccaacaccatgatggaggaaaccagcagtgtcccctcatccagctgaaacacatatccctttctggctgcagagagatgcccgtgacctcaggcctaaggctgccccattttagactggacccagtgaccacaagcagcctaggccactgtgcctgcagggctggggctgggtgcggacatgggcagcagaggttcggctccaggttggagtttgctccatgaggatgggccatgcctgcctgagctgtccctccaccctgggcactgaggacatccactcagatgtggcgatggcccaaaggagcatggccatctctgcacccagcatggttcttcagggaatgctggcctgggggaggacagaggcctagggcctgctccaggccctcctcctgcgccgtacggctgagatctcagggcttctcagctctctgttctctcctacatctgggggccctggggaaagggttttgggaaggagcagggtccacacacccactcttgttccccctcttgccttgtccccacagttacgaaaagcggctgtactgaggacagcggtggaggccgaggtggtggaggggatgcaccccagtgtccacttttgggcacagcctccctccataactgagtggtccacagatttgcactacgggttctccagctcctttccaggcagagaggaggggaggtcctgaggggactgctgcccctcactcggcatcccctgcagagtcaggactgctcccggggccaggctgccctgggagcccccctccgagcccagccagccaggctctcaggccctgcgcctgcctca

SEQ ID NO: 12613 - DNA, 1888 bp, Homo sapiens
agtagcagcagcagcagcggcggcagcggcgggcggccgcgcgggtgtttatgtcgggtcgcggggtctcgcggcagcatggcggactacctgatcagcggcggcaccggctacgtgcccgaggatgggctcaccgcgcagcagctcttcgccagcgccgacggcctcacctacaacgacttcctgattctcccaggattcatagacttcatagctgatgaggtggacctgacctcagccctgacccggaagatcacgctgaagacgccactgatctcctcccccatggacactgtgacagaggctgacatggccattgccatggctctgatgggaggtattggtttcattcaccacaactgcaccccagagttccaggccaacgaggtgcggaaggtcaagtttgaacagggcttcatcacggaccctgtggtgctgagcccctcgcacactgtgggcgatgtgctggaggccaagatgcggcatggcttctctggcatccccatcactgagacgggcaccatgggcagcaagctggtgggcatcgtcacctcccgagacatcgactttcttgctgagaaggaccacaccaccctcctcagtgaggtgatgacgccaaggattgaactggtggtggctccagcaggtgtgacgttgaaagaggcaaatgagatcctgcagcgtagcaagaaagggaagctgcctatcgtcaatgattgcgatgagctggtggccatcatcgcccgcaccgacctgaagaagaaccgagactaccctctggcctccaaggattcccagaagcagctgctctgtggggcagctgtgggcacccgtgaggatgacaaataccgtctggacctgctcacccaggcgggcgtcgacgtcatagtcttggactcgtcccaagggaattcggtgtatcagatcgccatggtgcattacatcaaacagaagtacccccacctccaggtgattggggggaacgtggtgacagcagcccaggccaagaacctgattgatgctggtgtggacgggctgcgcgtgggcatgggctgcggctccatctgcatcacccaggaagtgatggcctgtggtcggccccagggcactgctgtgtacaaggtggctgagtatgcccggcgctttggtgtgcccatcatagccgatggcggcatccagaccgtgggacacgtggtcaaggccctggcccttggagcctccacagtgatgatgggctccctgctggccgccactacggaggcccctggcgagtacttcttctcagacggggtgcggctcaagaagtaccggggcatgggctcactggatgccatggagaagagcagcagcagccagaaacgatacttcagcgagggggataaagtgaagatcgcgcagggtgtctcgggctccatccaggacaaaggatccattcagaagttcgtgccctacctcatagcaggcatccaacacggctgccaggatatcggggcccgcagcctgtctgtccttcggtccatgatgtactcaggagagctcaagtttgagaagcggaccatgtcggcccagattgagggtggtgtccatggcctgcactcttacgaaaagcggctgtactgaggacagcggtggaggccgaggtggtggaggggatgcaccccagtgtccacttttgggcacagcctccctccataactgagtggtccacagatttgcactacgggttctccagctcctttccaggcagagaggaggggaggtcctgaggggactgctgcccctcactcggcatcccctgcagagtcaggactgctcccggggccaggctgccctgggagcccccctccgagcccagccagccaggctctcaggccctgcgcctgcctca

SEQ ID NO: 12614 - DNA, 9140 bp, Homo sapiens
actcgaccgggctgcgctcactgcccagccggggccccgggagcctccaggctcccgcccgccctgagctgcggcctccgcatggaggggccactcactccaccaccgctgcagggaggcggagccgccgctgttccggagcccggagcccggcaacacccgggacacgagacggcggcgcagcggtacagcgcccgactgctgcaggccggctacgagcccgagaggtgacgcccagggcagagcgcgcggggcgcatccggggcgggcggccgaggagggcgcggcggctccgggaacccggcgacgctgcgggggaggggcaggccccacaaacccttcccctattaccgcctcagcctctaacttcccgaaacgccacgctcccggctttggttgggggatgcagacgggcactgtgcgaagggttaggtgcttcgttgcacgggggagcggaggagagggaacaggtcgtaaaaaccttccctaaaatcttagccctagattggacctcgctacacacccgacgacaccccgttcaggtggctccaactcctggggttcaaacagtgcttgctggagtcctgtccgactgacttggcttacccctccttagctgtttcctcctagaactatcttcagtggtcttactggcaggtgttggtgtccagatggatcgccttcgcagggctaggtgaggacactctcccctcctcaccatgcactgagatctgagaggctgccagtgcagctcacctcaaggtctctccgaagacgcaggcccccatgctggggtctgtaggggaatgagggacactggaggaagagtagggtagtgagctgggccccagggggactggctgaaaaggagacagcagctaatctctggattgtatcgcagcttgaaatgcaatcccactgtccttccggtccagaggatttggacttctttctctgcccatctgctggtgttcagcagcttggggaggtgacctggcagctgggttagatgggggtggtctgggggaattagcccggcagctctgcccaggggttggccgcttatgtaagaacttttaacggcttaaggggctcctcggcagtggggctgctgagttaggcccccctgtcctggcaggctgcctctctagaattgactcaggcttaggcaactcccagcctttctcctgtcctagaaatccagctcctggggttcaggccgcagggcgatagggaggggccacaggggctgaatgagccggttggggcttgacagaggcagtgcttggttagagtaggggttgcaaacataatgtttcagagctcaggccggagccatgtgagtgcatcctttctccagattgcacttctgcatcaaggggccatccctacccccacccccaaccgacccgcaccccccacttgggctcagggagcctgtgtaaacctgagccccagccaggtggtgtagtgagattcaaaacctgctggccagacctccacctgccttcgccaacctggagctgtgggaagaggacaggattctgtgagcagtcctgggtttgaatccagtgttattgctctctggcttgaacttggacaggctatgcccccgacccagctcaacagtgctaatgttactaccttttctgcccttcccccatcttcccctcaagagtgttttgaaatcttgttccttcaaatagccccaggcctgatagagccctcggggttccctgcctggacctcagtacccagctgggcactgttgccctgctaccctgaggaaggggcttggacctgccttcctatccccacagctgctaggtgggggtctcagggaacaacagcccttcctcggcttcggaggccgactggttgcctcggtgtctcctccccatggaggaagcagctggggaagatcaggaagagggtgtatgagagtgggggttgagggtggattagcggagtctctggaaaagcacagcctaacccagggctgagcccagcagcttagagtgatgaggagcccaacacaggttaaagtgggaggtgtgtaggggagcaggagaggggagtggggccatgaagtctgtaatcactgggaaggtgaccctccccatgcctcagccaggcagcctaagaaggctggggcagatgtcacagtcaggtcacctgagatggtaaaatccagctgctctcctgggccctggctctggttgaatcctgaatagtactctagccattcctaactcatactgtaggggacagtgacccagagcaggtcctttagtgacccagtaacccagagagaccactgggctggtctctgctgtgtgccaatctctgctctgtgcctgcagttggcatgatagctctgttcttctgtggccagaaaggtaccccagagcagctctgaatggtcaggcactttctgtggctggtctcactgctctgctccacgtggccagtgaaaggtcctagtgctggtgctcctcaggacgctcccctggtcccccatgtggcccgggctccctgcatgagcccaagaatgctgaaggttcagaggtgcttcccacacatcgctggcaatccggccccagcctcccctctgcacacagatggaacagtctgtgttttcctggcagggtcccgggggcatcaatgggggaggctgggcatcccagggaacctcgtggcttggaggccaagcctcccctgggcctagctgccatcacactgctgagaagtaaataaacccagcctcccagggccacagccagccaccaagccagggaggggactgtgtcccacaccaccttattctcttctccccaagtgagctgtgggagccacaggaggacacagggaggaggctgtggagtctgggtggggggacccactcttggtctgggaagagcactggcagttctggtcccataagagggaaggggatctacttcctaccaccccacctttccccatgtgaacctatctgtacccagtcactgcccccatgtagaaatctggatcttgctgggcacccagggccaccaacttctgctttggggatttttcagaagttccctagcccctgttcttatttgtatgcacacttgtctaagccaggcttatgatcctcccccatcttcccaccgcaggaccctcccaaataacaaaccgctctctgagattaaaagccctggtaccaacaccattttctcagccggagatagggcggtgagccgaagcactgggccatgaatcagaagcagtacccctcccttcctttccgaactatagattttgcctctgtcaagggaatgggtacccaatacttgtcaattaatagattgtggagttaatgtgctcatttatgaaaaatgctttgtaaactgcagagggccccaaggccacccaaaggtcaaggagtgtcattatgaagaatgccggctccctaggatgtcgggatggggcatagcgatccaacctcaaagtccttagtgctgggtagctgagagcccagaccggtttctcagggctccgggccttgatcagggtccgcggaagagtattggggattggggaacggcagaaccgtgttagaggtgccctggggagaagggcaaggtgggtggccccggctgggggagaactcgggggtggggggggtggggggtgtgggggtgtgggggggtggggcctctgctggggggtcctgggtggctggatgtagagcggcggagggggcgtgtcccggcctgacccggtactctcccccgcagccccacacctcctacccggtccgggcttgcggggtcgcagcgccgctgcaggcagctgggggcgtgcgcgcggcgcggctgagccctttgtgcggcgcgggcggaggcggcggtttccgcgggaggggcgagaagggcgggaggggcgggaggacagggcggcgccctggcccgccctgccgctgccgcagcccccgcccccgcccccggcccgcccggcccgcggcagcagcgtggccgcggcgcggcgtcagcagtagcagcagcagcagcggcggcagcggcgggcggccgcgcgggtgtttatgtcgggtcgcggggtctcgcggcagcatggcggactacctgatcagcggcggcaccggctacgtgcccgaggatgggctcaccgcgcagcagctcttcgccagcgccgacggcctcacctacaagtaagcgccgggtctcgtacccctaggtgcgcgcatccacgcgccgcgacccccgggccggccctgcacgtgcgcggctcccccggcgttccctgcccggtgcgagtgcctgctgtgggcgctgggggctgggcacgggaaggaaggaggcccgcgccggagcagacggacgtggcacggcgacaccgcggccctcagagccctgacccgtttctggccagatccgggttcggcctgtccccttcctcctctcagcggcatggaggggccctcgggcgtgtgggaactggagatgtgggcattatggggagacttttcccagccgctggtccaggacgccccctcccagcctcaccacgagggcagagggtccccggagccaagcttaagcagccgcttccgcatggccccaggagaggcccagccaggtggttggggtggcttcttttccaactgtctagtccagcgctttttccagttgtgtccctccctgcccacaggttggtattggtgcccctcccaaggcgcgaattattctgtgactgctacccctaagcccaccctacatggggttttggaggaggacacagacccacccgtctgcctctggcttcatttgccttttccgtggtccctaggccagttgccctgcgtgctgcaggcctggcactagctctgcctcctggctgcaggactgtgcccctgccaggaaggagcatcagaaggggcagagtggggatgctggccagtcaaaagcatccctgccttgtctcctgccagccctgccctggcttgtaagcactcctgcttggccagcagtttccctaaacaccaggatacccagtcactcctgaggagtgtctcctcctgcctgcccgtaggcgacgggtgtatagaacacctagaaaatgctatgaggcccagactccagcatttcttctgtggcctctttgctatacagaagaagggctgccaaaggctgggagcagccgaaattctttgtttttttggtggtctttggtgatgagattgaaagcccacctttgatacagttgtcattgaagtcttctaggagaacaccctaggggaacgcctaggagtttctctaggccttagggcagattaatgacccacccccctccaccctgtggcttttccttcctgcgctagggatgcctgctgctttgcttagctcagttcatagtgttcctgaagtgtgggatatttgcttttgggtgtgtctctcaaggcctgctgtgattttagcaggttggggcccctgagctgtgaccctgcacctagatgtacccatgcaggcctgcacttcccttgcggagtttgctgtgaccgtggcccaccctagtgttggtagctgccatgctttggctggggacccagtgtcctggtcccacctctaaggcctctttcctcccctttcccgtcctggccatttctgttctgctctgtcagaacatgccctgcactcagccccctggggtccctccatgctgttccgagccctgtgtgactcagcagcccaggcaccggggcatgcggactgtcctgtgctgggtcatgttcatactgtgttgagcgccacaaaattgttctcaggtttgttcccaatgtttacttattttctctccccatcaagattgagaagttttcaaaggcaggcactgtgtctgctgtgtgtggcgatatgggaacttctgtgtcgcttgacaaactctgagacttaaaggcaatggatattttgggcctattaccttgatggtaccccagtagacctttcgctgtctttggctctagctctgggggctggagtttgccagactctagtgaggtgcacgaggtgggaactgccctgatggggcagtagggatggggggctgtagcctctgctcctctaggcttttctgtacccccctgctgcctcctctggcatggcaggctctgcccctttggggcacccctccccactaataacactcacttctctgtcttcacagcgacttcctgattctcccaggattcatagacttcatagctgatgaggtggtgagtacctcttcctttgacaaggggagggggctgtgtatgtggtggaagaggctgacttcttgctcaggggcagggcatggagagatggagagacttttcttgggaatgggtggataggatatagtcctttttttttttttttttggagacagagtcttgctctgtcacacaggctggagtgcagtggtgtgatctcagctcactgcagcctccacctcccagattcaagtgattctcctgcctcagcctcctgagtaactgggattacaggcacatgccaaaaccccccgataatttttgtgtttttagtggagacggggtttcaccatgttggccaggctggtctcaaactcctgagctcaagtgatccgtccgcctcagcctccgaagacgctgtgattacaggggtgattccacccagctggtatgggtggatatagcctttattgttgccagagaaacaggcagagatcaaagggttatacctgatggggcagaggcagctatgggaacacaggagtgtcctgagtgaggcctggcccagggctgggtggctctctgtcagtgacagagcctgtgggcaggttcagaagaggcctgggaaggggtgggcttgggagtgggaacggtgggcttgggagtggctgccttattgtagagaccataaggattggattttgtctggaatgctgaacaaggacatgatagaagccagtgaaattatggagatttgaaaccggtagacagacttgttcactgatccacaatgtacaagaactggcaagagggtttaaaagagttacattttggataaatacaaggaaacgcagtgccttgctttcccagaggggctcatcagtgagccgaatcaatgaacaattaacatatgataaactcagagaagcccagatgggtagtgatgatggtgtaagtcatttcaagaaaaagtgccatgattcaatgatgaattcatatacattaaaaaaaaaacatttcttttctgttgctattattattgctatttattctggtctgattctcatgaaaggccagagggcctgagtgtgcctggatcacttacatgtgagggaagttcacatccagctggtgtttagccagagctgacccagacagattttcagggggaaattcgaatgattctggttgtttcccttatgacaacaaccaggaagcctgcttggtgcagctgttcagtttaacaaagtttactggccagtgtggctttgtgtcagaccctgggctggctgctaggaagggagggattgaaaagacccctaccagctgggcgtggtggctcatgcctgtaatcccagcattttgggaggctgaggcaggaggatcacctgaggtcaggagtttgagaccagcctggccaacatggtgaaaccccatctctactaaaaatgcaaaaattagctgggcattgtggcgggcatctgtaatcccagctactcgggaggctgaggcaggagaatcacttgaatctgggaggcggaggttgcagtgagtcgggattgcactactgtactctagcctgggtgacagaatgaggctccatcagagagagaaaaaaaaaaaaaccctgcctggccggcaaggatctccttgtcctgtggcttctgtcaggaaggctgtggcccttctgtggcatgacaaaagagaagatggtgttttctagatcatggggccagaggtctgaactagggttagtgatgggtttcagggactttgaatctaaaaaaattacatagcaaagtctgcacaaatgtcttggggactgggatccactactgttggcctgaccctcagaggggtatgtgctctggcctttcctccatgggcaggtggcttttaaatggatacttgcaatcctgaccactctcctgagctccagaccattcgttgcttgctttcctggatgcctaaaagactcttttccatgcctacccccacctcagcccttgtcacccagaatccattctccaccttggagcctgagtgacctttttgaaacataaatcagatcatttctctgtcaagaccctccagtggcttctctccgaatcaaatctgagcttctgtccgtggtcttcacggccatgcatgctgcccctgccttcctcctgcctctcccttccctccactcccctggccttctttttctttcttaagtgtgcctccgaaagaactggaccctgaggcgggtttgcactcagtccctcagccgagagtgacagcccctctgacttctacttaatcggctcccactggtcacctcccaggaaagaggctttccccagtcaccttgttgccagtggtcgcttggcctttttgtttttctctgcagccttcatcctgactgaagtcatcttgagcatatgtcctgtgtctgtcatttttctttccaagtagaacataagctccattagatgagctgggaactcatccaccttgttcactgccatgtccccagggcctgtcctggtgccggtgcatgtaggagctcagtgagtgagtgtccagtgggtgataaactctttacgtgggctgtgcctccatcctcaggacctgacctcagccctgacccggaagatcacgctgaagacgccactgatctcctcccccatggacactgtgacagaggctgacatggccattgccatggctgtgagttacacacctgcatggggactccagggcacacaggaactgaccatggtgggctgtgctgaggggcagggctgaggaggaatgggccccggctctgaccacacttcccttctacatcagctgatgggaggtattggtttcattcaccacaactgcaccccagagttcc

SEQ ID NO: 12615 - DNA, 590 bp, Homo sapiens
actcgaccgggctgcgctcactgcccagccggggccccgggagcctccaggctcccgcccgccctgagctgcggcctccgcatggaggggccactcactccaccaccgctgcagggaggcggagccgccgctgttccggagcccggagcccggcaacacccgggacacgagacggcggcgcagcggtacagcgcccgactgctgcaggccggctacgagcccgagagaactatcttcagtggtcttactggcaggtgttggtgtccagatggatcgccttcgcagggctagcatggcggactacctgatcagcggcggcaccggctacgtgcccgaggatgggctcaccgcgcagcagctcttcgccagcgccgacggcctcacctacaacgacttcctgattctcccaggattcatagacttcatagctgatgaggtggacctgacctcagccctgacccggaagatcacgctgaagacgccactgatctcctcccccatggacactgtgacagaggctgacatggccattgccatggctctgatgggaggtattggtttcattcaccacaactgcaccccagagttcc

SEQ ID NO: 12616 - DNA, 13093 bp, Homo sapiens
agtagcagcagcagcagcggcggcagcggcgggcggccgcgcgggtgtttatgtcgggtcgcggggtctcgcggcagcatggcggactacctgatcagcggcggcaccggctacgtgcccgaggatgggctcaccgcgcagcagctcttcgccagcgccgacggcctcacctacaagtaagcgccgggtctcgtacccctaggtgcgcgcatccacgcgccgcgacccccgggccggccctgcacgtgcgcggctcccccggcgttccctgcccggtgcgagtgcctgctgtgggcgctgggggctgggcacgggaaggaaggaggcccgcgccggagcagacggacgtggcacggcgacaccgcggccctcagagccctgacccgtttctggccagatccgggttcggcctgtccccttcctcctctcagcggcatggaggggccctcgggcgtgtgggaactggagatgtgggcattatggggagacttttcccagccgctggtccaggacgccccctcccagcctcaccacgagggcagagggtccccggagccaagcttaagcagccgcttccgcatggccccaggagaggcccagccaggtggttggggtggcttcttttccaactgtctagtccagcgctttttccagttgtgtccctccctgcccacaggttggtattggtgcccctcccaaggcgcgaattattctgtgactgctacccctaagcccaccctacatggggttttggaggaggacacagacccacccgtctgcctctggcttcatttgccttttccgtggtccctaggccagttgccctgcgtgctgcaggcctggcactagctctgcctcctggctgcaggactgtgcccctgccaggaaggagcatcagaaggggcagagtggggatgctggccagtcaaaagcatccctgccttgtctcctgccagccctgccctggcttgtaagcactcctgcttggccagcagtttccctaaacaccaggatacccagtcactcctgaggagtgtctcctcctgcctgcccgtaggcgacgggtgtatagaacacctagaaaatgctatgaggcccagactccagcatttcttctgtggcctctttgctatacagaagaagggctgccaaaggctgggagcagccgaaattctttgtttttttggtggtctttggtgatgagattgaaagcccacctttgatacagttgtcattgaagtcttctaggagaacaccctaggggaacgcctaggagtttctctaggccttagggcagattaatgacccacccccctccaccctgtggcttttccttcctgcgctagggatgcctgctgctttgcttagctcagttcatagtgttcctgaagtgtgggatatttgcttttgggtgtgtctctcaaggcctgctgtgattttagcaggttggggcccctgagctgtgaccctgcacctagatgtacccatgcaggcctgcacttcccttgcggagtttgctgtgaccgtggcccaccctagtgttggtagctgccatgctttggctggggacccagtgtcctggtcccacctctaaggcctctttcctcccctttcccgtcctggccatttctgttctgctctgtcagaacatgccctgcactcagccccctggggtccctccatgctgttccgagccctgtgtgactcagcagcccaggcaccggggcatgcggactgtcctgtgctgggtcatgttcatactgtgttgagcgccacaaaattgttctcaggtttgttcccaatgtttacttattttctctccccatcaagattgagaagttttcaaaggcaggcactgtgtctgctgtgtgtggcgatatgggaacttctgtgtcgcttgacaaactctgagacttaaaggcaatggatattttgggcctattaccttgatggtaccccagtagacctttcgctgtctttggctctagctctgggggctggagtttgccagactctagtgaggtgcacgaggtgggaactgccctgatggggcagtagggatggggggctgtagcctctgctcctctaggcttttctgtacccccctgctgcctcctctggcatggcaggctctgcccctttggggcacccctccccactaataacactcacttctctgtcttcacagcgacttcctgattctcccaggattcatagacttcatagctgatgaggtggtgagtacctcttcctttgacaaggggagggggctgtgtatgtggtggaagaggctgacttcttgctcaggggcagggcatggagagatggagagacttttcttgggaatgggtggataggatatagtcctttttttttttttttttggagacagagtcttgctctgtcacacaggctggagtgcagtggtgtgatctcagctcactgcagcctccacctcccagattcaagtgattctcctgcctcagcctcctgagtaactgggattacaggcacatgccaaaaccccccgataatttttgtgtttttagtggagacggggtttcaccatgttggccaggctggtctcaaactcctgagctcaagtgatccgtccgcctcagcctccgaagacgctgtgattacaggggtgattccacccagctggtatgggtggatatagcctttattgttgccagagaaacaggcagagatcaaagggttatacctgatggggcagaggcagctatgggaacacaggagtgtcctgagtgaggcctggcccagggctgggtggctctctgtcagtgacagagcctgtgggcaggttcagaagaggcctgggaaggggtgggcttgggagtgggaacggtgggcttgggagtggctgccttattgtagagaccataaggattggattttgtctggaatgctgaacaaggacatgatagaagccagtgaaattatggagatttgaaaccggtagacagacttgttcactgatccacaatgtacaagaactggcaagagggtttaaaagagttacattttggataaatacaaggaaacgcagtgccttgctttcccagaggggctcatcagtgagccgaatcaatgaacaattaacatatgataaactcagagaagcccagatgggtagtgatgatggtgtaagtcatttcaagaaaaagtgccatgattcaatgatgaattcatatacattaaaaaaaaaacatttcttttctgttgctattattattgctatttattctggtctgattctcatgaaaggccagagggcctgagtgtgcctggatcacttacatgtgagggaagttcacatccagctggtgtttagccagagctgacccagacagattttcagggggaaattcgaatgattctggttgtttcccttatgacaacaaccaggaagcctgcttggtgcagctgttcagtttaacaaagtttactggccagtgtggctttgtgtcagaccctgggctggctgctaggaagggagggattgaaaagacccctaccagctgggcgtggtggctcatgcctgtaatcccagcattttgggaggctgaggcaggaggatcacctgaggtcaggagtttgagaccagcctggccaacatggtgaaaccccatctctactaaaaatgcaaaaattagctgggcattgtggcgggcatctgtaatcccagctactcgggaggctgaggcaggagaatcacttgaatctgggaggcggaggttgcagtgagtcgggattgcactactgtactctagcctgggtgacagaatgaggctccatcagagagagaaaaaaaaaaaaaccctgcctggccggcaaggatctccttgtcctgtggcttctgtcaggaaggctgtggcccttctgtggcatgacaaaagagaagatggtgttttctagatcatggggccagaggtctgaactagggttagtgatgggtttcagggactttgaatctaaaaaaattacatagcaaagtctgcacaaatgtcttggggactgggatccactactgttggcctgaccctcagaggggtatgtgctctggcctttcctccatgggcaggtggcttttaaatggatacttgcaatcctgaccactctcctgagctccagaccattcgttgcttgctttcctggatgcctaaaagactcttttccatgcctacccccacctcagcccttgtcacccagaatccattctccaccttggagcctgagtgacctttttgaaacataaatcagatcatttctctgtcaagaccctccagtggcttctctccgaatcaaatctgagcttctgtccgtggtcttcacggccatgcatgctgcccctgccttcctcctgcctctcccttccctccactcccctggccttctttttctttcttaagtgtgcctccgaaagaactggaccctgaggcgggtttgcactcagtccctcagccgagagtgacagcccctctgacttctacttaatcggctcccactggtcacctcccaggaaagaggctttccccagtcaccttgttgccagtggtcgcttggcctttttgtttttctctgcagccttcatcctgactgaagtcatcttgagcatatgtcctgtgtctgtcatttttctttccaagtagaacataagctccattagatgagctgggaactcatccaccttgttcactgccatgtccccagggcctgtcctggtgccggtgcatgtaggagctcagtgagtgagtgtccagtgggtgataaactctttacgtgggctgtgcctccatcctcaggacctgacctcagccctgacccggaagatcacgctgaagacgccactgatctcctcccccatggacactgtgacagaggctgacatggccattgccatggctgtgagttacacacctgcatggggactccagggcacacaggaactgaccatggtgggctgtgctgaggggcagggctgaggaggaatgggccccggctctgaccacacttcccttctacatcagctgatgggaggtattggtttcattcaccacaactgcaccccagagttccaggccaacgaggtgcggaaggtcaaggcaagtaccaggcctgtccccagcaagatgccacctggcagtccccacctcagaggccctcccagcctcccctgccagccctgcactgctacactccctgcgtgtccttcctctcagtggagccttggggccgagccctcattttcccactggctcctcatcccactgagggtcctggcttctctgcagcacagctgcatcctctgttccctgtggccagcctggacatcatccctggctttcttccagccttttcctcccccatctctgcccgcagaagtttgaacagggcttcatcacggaccctgtggtgctgagcccctcgcacactgtgggcgatgtgctggaggccaagatgcggcatggcttctctggcatccccatcactgagacgggcaccatgggcagcaagctggtgggcatcgtcacctcccgagacatcgactttcttgctgagaaggaccacaccaccctcctcagtgaggtacctgcagggcaggggaagcagggctgggtgtagagaggaccctcacgctggggcctcagactggtgcctgtgaccagggaccagagggaggcctggctccttctctctcacctgccaacctgcaggcaaatgttcctggccccacaggtgatgacgccaaggattgaactggtggtggctccagcaggtgtgacgttgaaagaggcaaatgagatcctgcagcgtagcaagaaaggtaccagggagctagttgaaaactcaacccccagcctgactccctgtccacagtcccgttgttccttcacagccttacaggttatcccagcaaccagactgagccctggggaaggttcgaataacctcaggcaggccagagcacaactcctgccatccttctcttagcttagggaagcttgcccctagtgcagcatcttcatagtatgtttcccaaaactagtcctatgcgatgctcatcagaaaaaaatcctgagcaataactcctttctctatcccctatcttgcataaagaattgcacattcacttattaaaggctctcagaagtcctgcagttaaatttatttgacactagagctgtttttataatattttccagctagaaacaactttagcttttttttttttgagacagagtctcactttctcacccaggctggagtacagtggcgcaatgtcagctcactgcaaccctcgcctcctgggttcaagcaattctcatgcctcagccttctgagtagccaggattacaggcatgtgctactataccagctaattttttttttttttttgtatttttagtagagatggggtttcaccatgttggccaggctggtcttgaactcctggcctcaagtgatctgccctcctgggcctcccaaagtgctggaattacaggcgtgaaccaccatgccctgccacaactttggcttctatttatttatttttgagacagagtcttgctctctcatccaggctggagtgcagtggtgtgatcttggctcactgcaatctctgcctcctgggttcaagcaagtctcctacctcagcctcccgagtagttgggacaacaggcacacaccaacacacccaggtaatttttttgtatttttagtagagatggggtttcaccatattggccgggctgttcttgaactcctggcctcaagtgatccacctgcctcggcctcccaaagtgaggaagctgtgagccaccacacccggccaactttcgcttgttagaaaaaaaaaggaaaaattaaatattcaccaggtccctgttggctatactgggaaatgcttccctggtccatactggagggttctttggtgtctgtattggacagggcacatgcttctccctgcaggacagcatcactcctggctaggagatttcggccactgtggcccagcaggtgaaaggctgccagtgctcgggctgcccatcccaggccacggggatgcccatccacagacccccaggaacctgctgggctgaaagatttctttgctccctgttccttgggaagagggctaggtccctaggaacacttcctgggggcggtgctgtcacctagtggctgactggggtacttcagtggaatctctggagtggtccactttcatcttcaccctcctaaacatctcccaaacttctccccaccaagcctgcttcatttcacccctgcattccttgtcagggaagctgcctatcgtcaatgattgcgatgagctggtggccatcatcgcccgcaccgacctgaagaagaaccgagactaccctctggcctccaaggattcccagaagcagctgctctgtggggcagctgtgggcacccgtgaggatgacaaataccgtctggacctgctcacccaggcgggcgtcgacgtcatagtcttggtaaggcccccgcctgagtggtgggggagatggatgagtggttcagcagagtggaggtttatgaggacccaggttcacctctgattaagcctgtgcccctcccttgctactcttcctctctctttctgagtgctccctggtgtcagaattaggagggtggcagcaggattgcctgagctcagaggttcaaggtcacagtgagctaggatcgtgccactgcactccagccctggggacagaacgagaccctttctcaaaaaacaaacaatggtttgtgtcatctgagatacaaagaaagaaaacaaacaagttaaaattctccagtggcacagccataagaaagaatgaaatcctgtcctttgcagcaacatggacagagctagaagccattatccttagtgaactaactccaaagcagaaaaccaaatactgcatgccctcacttataagtaggagctaaacagagagtacacatgttcataaagatggaaataatagacgctggggactccaaaatgggagagggtgggaggggaacgaaggatgaaaaattggctatcagacacagttttcgatatgtgggtattaggtacacttgaagcccaattctcaccagtatgcagtattccatttaagcaacaagcacatgtacccactgaatccttaaaaaaaaaattgacaaattgttgcaagcaacaattgcaaatcaagactctcccccaccccccgataaagggaggtagaataaagataaaggcttattgatcccttgtgagtgatctggaccatacatctagattcatctgtattctataactaggaggaagagaaattaggaaggtcactggcaccctctcaacagctcacaacagactgcaaacaaaggcctctgagggccttcttggctcataagttgaccctgataatttagctcacgtttactgagaaccgcctgtttgccaggcactgcgtcaagaccttaatgtatatcagtccattgaggaacagtcgccattccattttcagatgaagaaacaggcttaaagaagttaagtcatttcatttggttagtgagttggtgggaacaggatatggctccaggcagtgtctccttgctttaaggatcagtctgtacaatggataggaaaggccttatgtactctaagactgcattagttgtggttaacctttcagggaagcagtcccctttgagaattgactgaaagttgtcaagtgaatttccagaaaaaaaaaaaaaaaaacaaccagaaggaaagagcattctcataacagttttcataggatttgaggggttcatccactcaggctctccctcctgccttgagaatcctcagctgtctaagcccaagctcttccgtcctttctcacaggactcgtcccaagggaattcggtgtatcagatcgccatggtgcattacatcaaacagaagtacccccacctccaggtgattggggggaacggtgagtgcggggtcgcctcccacccgcctgctcctgcccctccaatgagtaacccttttctgtccttcagcatccctaggtgatggtatggctcctggcatgggtggcagggagcatgatgggctttggtcactgtaggggggttggggggtgctagactggggtcccaagaggctgttgggcaggcaggggcatcccatcctcacattgttcctctgccccatccccacccccagtggtgacagcagcccaggccaagaacctgattgatgctggtgtggacgggctgcgcgtgggcatgggctgcggctccatctgcatcacccaggaaggtgggtgtcaggaggtgagcgagtgcccgctggccccggggcctcgcctttgttccccagatgtatatcaagtactctctctgccaggccctgttctgccatggtaggctccggggtgacccaggcatgggccccaccccatcgggcccactgacttaggggaaggcaggtgtaagcagggtgcaagagctgcagcctgcttctcagagtgcggtcaagggggctctgcctggggcttggggcctggggctggtgtgactgtccatggggcttgttggaacctcagggtttggatttgatttgtgacaaggcagatatttaagacacagagacgacatgtccctgaatatataaagatatgttatacacctgcttcaccatgtggttgggcgtggggagttccacccaattacaaagcccttttgcagggtgggttcctgaacatgaagtgggaaggggggagcctggcatgtgtcccccatgtggttattgaggaggtgctccctggaggctggtatctgacttgtggggtggctgcctggaagacttgggtcctcacttggcctgaggagatgtacccggcccctcctgtgagggcaatttctccaaaacactgagtgatgcatttggcctttcctaccccaaacagctcccccttttggtcctcagagcctctgctatttaggtttgtgcccttcgccttaggtggccaccatggtgaaatgagggccctctctcacccacttaacaaatattcattaggcacctacttgtctcaggcactgttcaaagctttgaggtagagtagggacaaaacaaatgagaggcgccatctctggtttatccagctttgcatccgtccctagacaggtgtggttccttgtagtccccacctaaaacctaacactgaaggaccttggacacttagacttgaagaaatgcaaaccagtatcccaaaggggaccatagtacctaaccctggtaacggtttttgcaaacaaaagccttgaaggggaacttgtgccttgagagcaggtgaggctggggccacctgtctgggggcattgggctctgaaggccgcttctggttcccccgtcagaatcccctgtcatgctcttaggggtggggtggcccagatccctagagtgacactcatcctggtggtatttgccagcacctatgttatgcctcagacacaccatccagccctgtcccttttcctgagtagaggtagtgcacaggaggaagagctgggctggccccgctccaggccccggagttgctgttgactcttctctgccttgtgcaccccaccctcccccagtgatggcctgtggtcggccccagggcactgctgtgtacaaggtggctgagtatgcccggcgctttggtgtgcccatcatagccgatggcggcatccagaccgtgggacacgtggtcaaggccctggcccttggagcctccacaggtgaggggagaatgtgctggggattgggcaggcgagggctggaagctgggggggtggcactagtgggctggaggcactaatcccttgcccactgtagtgatgatgggctccctgctggccgccactacggaggcccctggcgagtacttcttctcagacggggtgcggctcaagaagtaccggggcatgggctcactggatgccatggagaagagcagcagcagccagaaacgatacttcaggttccctgaccctgggccccacctgggcagatcagcccacaacccttcagggcccgctcatgccaccgacttccccagatggcagccagtccccatatggtggttctggaaactgaggcacagggcttaagtagcagacccaggatctgtccctgggccatctgactcagcccagtgaggggtggcctgggggaccttcctgggcggtatcccgtttttgcccttaagaggtggggtggggtcctctgagcttcaagctgctgggctcagtcttccaccctccacgcagcgagggggataaagtgaagatcgcgcagggtgtctcgggctccatccaggacaaaggatccattcagaagttcgtgccctacctcatagcaggcatccaacacggctgccaggatatcggggcccgcagcctgtctgtccttcggtgagtgctgagactgggggtggctcctgcttcctttctctcgctcttctccacccttggtggccctgatctgctccacctaccttcctcctaggtccatgatgtactcaggagagctcaagtttgagaagcggaccatgtcggcccagattgagggtggtgtccatggcctgcactcgtaagtgtggtggcctccttgctgtcacttggaggcagtgggttgggcaggtggggccagggttctgaggtcaagctgaggttccagggaccccatggaccacctgcagcagggacagatgctgctgcaggatggcccctcaccctctcttcgggggcccagccccctgttccttgtcctttagtccccatgcaagcaggccctcccctcccctcgggcctctcccgagcagggcacaggaggtgtggccagtcactgcacctggactcccagcccttgcttgctcaggaagcttggtggctggtggcaggggctgtggtggcaccaggcagccaggcagaagatgcgggtgtgacccctctggcgggtacaagggcagagagatggacgccagggccagcgctggggcaaccgtgggcgggggcagtgctcgttggcagcagtagttgcaggcatgtgccccaccctggtcaggagccctgtccccaggtatcagcgggcgtctaacctgtgtctctttccgccccacccttccgtagctatacctttctgccgtgtaagtaaccgcgctgcccgggccaagcgtagagtagagcaggggcagtctgggtgggacctgggctggaggtgggggtgggtattgggtgggggtaggagggtgctggggtgtaaccatgagatgtggaccctgggtttgggcccccccggccccctaactccaacaccatgatggaggaaaccagcagtgtcccctcatccagctgaaacacatatccctttctggctgcagagagatgcccgtgacctcaggcctaaggctgccccattttagactggacccagtgaccacaagcagcctaggccactgtgcctgcagggctggggctgggtgcggacatgggcagcagaggttcggctccaggttggagtttgctccatgaggatgggccatgcctgcctgagctgtccctccaccctgggcactgaggacatccactcagatgtggcgatggcccaaaggagcatggccatctctgcacccagcatggttcttcagggaatgctggcctgggggaggacagaggcctagggcctgctccaggccctcctcctgcgccgtacggctgagatctcagggcttctcagctctctgttctctcctacatctgggggccctggggaaagggttttgggaaggagcagggtccacacacccactcttgttccccctcttgccttgtccccacagttacgaaaagcggctgtactgaggacagcggtggaggccgaggtggtggaggggatgcaccccagtgtccacttttgggcacagcctccctccataactgagtggtccacagatttgcactacgggttctccagctcctttccaggcagagaggaggggaggtcctgaggggactgctg

SEQ ID NO: 12617 - DNA, 1765 bp, Homo sapiens
agtagcagcagcagcagcggcggcagcggcgggcggccgcgcgggtgtttatgtcgggtcgcggggtctcgcggcagcatggcggactacctgatcagcggcggcaccggctacgtgcccgaggatgggctcaccgcgcagcagctcttcgccagcgccgacggcctcacctacaacgacttcctgattctcccaggattcatagacttcatagctgatgaggtggacctgacctcagccctgacccggaagatcacgctgaagacgccactgatctcctcccccatggacactgtgacagaggctgacatggccattgccatggctctgatgggaggtattggtttcattcaccacaactgcaccccagagttccaggccaacgagaagtttgaacagggcttcatcacggaccctgtggtgctgagcccctcgcacactgtgggcgatgtgctggaggccaagatgcggcatggcttctctggcatccccatcactgagacgggcaccatgggcagcaagctggtgggcatcgtcacctcccgagacatcgactttcttgctgagaaggaccacaccaccctcctcagtgaggtgatgacgccaaggattgaactggtggtggctccagcaggtgtgacgttgaaagaggcaaatgagatcctgcagcgtagcaagaaagggaagctgcctatcgtcaatgattgcgatgagctggtggccatcatcgcccgcaccgacctgaagaagaaccgagactaccctctggcctccaaggattcccagaagcagctgctctgtggggcagctgtgggcacccgtgaggatgacaaataccgtctggacctgctcacccaggcgggcgtcgacgtcatagtcttggactcgtcccaagggaattcggtgtatcagatcgccatggtgcattacatcaaacagaagtacccccacctccaggtgattggggggaacgtggtgacagcagcccaggccaagaacctgattgatgctggtgtggacgggctgcgcgtgggcatgggctgcggctccatctgcatcacccaggaagtgatggcctgtggtcggccccagggcactgctgtgtacaaggtggctgagtatgcccggcgctttggtgtgcccatcatagccgatggcggcatccagaccgtgggacacgtggtcaaggccctggcccttggagcctccacagtgatgatgggctccctgctggccgccactacggaggcccctggcgagtacttcttctcagacggggtgcggctcaagaagtaccggggcatgggctcactggatgccatggagaagagcagcagcagccagaaacgatacttcagcgagggggataaagtgaagatcgcgcagggtgtctcgggctccatccaggacaaaggatccattcagaagttcgtgccctacctcatagcaggcatccaacacggctgccaggatatcggggcccgcagcctgtctgtccttcggtccatgatgtactcaggagagctcaagtttgagaagcggaccatgtcggcccagattgagggtggtgtccatggcctgcactcttacgaaaagcggctgtactgaggacagcggtggaggccgaggtggtggaggggatgcaccccagtgtccacttttgggcacagcctccctccataactgagtggtccacagatttgcactacgggttctccagctcctttccaggcagagaggaggggaggtcctgaggggactgctg

SEQ ID NO: 12618 - DNA, 17210 bp, Homo sapiens
agccctagattggacctcgctacacacccgacgacaccccgttcaggtggctccaactcctggggttcaaacagtgcttgctggagtcctgtccgactgacttggcttacccctccttagctgtttcctcctagaactatcttcagtggtcttactggcaggtgttggtgtccagatggatcgccttcgcagggctaggtgaggacactctcccctcctcaccatgcactgagatctgagaggctgccagtgcagctcacctcaaggtctctccgaagacgcaggcccccatgctggggtctgtaggggaatgagggacactggaggaagagtagggtagtgagctgggccccagggggactggctgaaaaggagacagcagctaatctctggattgtatcgcagcttgaaatgcaatcccactgtccttccggtccagaggatttggacttctttctctgcccatctgctggtgttcagcagcttggggaggtgacctggcagctgggttagatgggggtggtctgggggaattagcccggcagctctgcccaggggttggccgcttatgtaagaacttttaacggcttaaggggctcctcggcagtggggctgctgagttaggcccccctgtcctggcaggctgcctctctagaattgactcaggcttaggcaactcccagcctttctcctgtcctagaaatccagctcctggggttcaggccgcagggcgatagggaggggccacaggggctgaatgagccggttggggcttgacagaggcagtgcttggttagagtaggggttgcaaacataatgtttcagagctcaggccggagccatgtgagtgcatcctttctccagattgcacttctgcatcaaggggccatccctacccccacccccaaccgacccgcaccccccacttgggctcagggagcctgtgtaaacctgagccccagccaggtggtgtagtgagattcaaaacctgctggccagacctccacctgccttcgccaacctggagctgtgggaagaggacaggattctgtgagcagtcctgggtttgaatccagtgttattgctctctggcttgaacttggacaggctatgcccccgacccagctcaacagtgctaatgttactaccttttctgcccttcccccatcttcccctcaagagtgttttgaaatcttgttccttcaaatagccccaggcctgatagagccctcggggttccctgcctggacctcagtacccagctgggcactgttgccctgctaccctgaggaaggggcttggacctgccttcctatccccacagctgctaggtgggggtctcagggaacaacagcccttcctcggcttcggaggccgactggttgcctcggtgtctcctccccatggaggaagcagctggggaagatcaggaagagggtgtatgagagtgggggttgagggtggattagcggagtctctggaaaagcacagcctaacccagggctgagcccagcagcttagagtgatgaggagcccaacacaggttaaagtgggaggtgtgtaggggagcaggagaggggagtggggccatgaagtctgtaatcactgggaaggtgaccctccccatgcctcagccaggcagcctaagaaggctggggcagatgtcacagtcaggtcacctgagatggtaaaatccagctgctctcctgggccctggctctggttgaatcctgaatagtactctagccattcctaactcatactgtaggggacagtgacccagagcaggtcctttagtgacccagtaacccagagagaccactgggctggtctctgctgtgtgccaatctctgctctgtgcctgcagttggcatgatagctctgttcttctgtggccagaaaggtaccccagagcagctctgaatggtcaggcactttctgtggctggtctcactgctctgctccacgtggccagtgaaaggtcctagtgctggtgctcctcaggacgctcccctggtcccccatgtggcccgggctccctgcatgagcccaagaatgctgaaggttcagaggtgcttcccacacatcgctggcaatccggccccagcctcccctctgcacacagatggaacagtctgtgttttcctggcagggtcccgggggcatcaatgggggaggctgggcatcccagggaacctcgtggcttggaggccaagcctcccctgggcctagctgccatcacactgctgagaagtaaataaacccagcctcccagggccacagccagccaccaagccagggaggggactgtgtcccacaccaccttattctcttctccccaagtgagctgtgggagccacaggaggacacagggaggaggctgtggagtctgggtggggggacccactcttggtctgggaagagcactggcagttctggtcccataagagggaaggggatctacttcctaccaccccacctttccccatgtgaacctatctgtacccagtcactgcccccatgtagaaatctggatcttgctgggcacccagggccaccaacttctgctttggggatttttcagaagttccctagcccctgttcttatttgtatgcacacttgtctaagccaggcttatgatcctcccccatcttcccaccgcaggaccctcccaaataacaaaccgctctctgagattaaaagccctggtaccaacaccattttctcagccggagatagggcggtgagccgaagcactgggccatgaatcagaagcagtacccctcccttcctttccgaactatagattttgcctctgtcaagggaatgggtacccaatacttgtcaattaatagattgtggagttaatgtgctcatttatgaaaaatgctttgtaaactgcagagggccccaaggccacccaaaggtcaaggagtgtcattatgaagaatgccggctccctaggatgtcgggatggggcatagcgatccaacctcaaagtccttagtgctgggtagctgagagcccagaccggtttctcagggctccgggccttgatcagggtccgcggaagagtattggggattggggaacggcagaaccgtgttagaggtgccctggggagaagggcaaggtgggtggccccggctgggggagaactcgggggtggggggggtggggggtgtgggggtgtgggggggtggggcctctgctggggggtcctgggtggctggatgtagagcggcggagggggcgtgtcccggcctgacccggtactctcccccgcagccccacacctcctacccggtccgggcttgcggggtcgcagcgccgctgcaggcagctgggggcgtgcgcgcggcgcggctgagccctttgtgcggcgcgggcggaggcggcggtttccgcgggaggggcgagaagggcgggaggggcgggaggacagggcggcgccctggcccgccctgccgctgccgcagcccccgcccccgcccccggcccgcccggcccgcggcagcagcgtggccgcggcgcggcgtcagcagtagcagcagcagcagcggcggcagcggcgggcggccgcgcgggtgtttatgtcgggtcgcggggtctcgcggcagcatggcggactacctgatcagcggcggcaccggctacgtgcccgaggatgggctcaccgcgcagcagctcttcgccagcgccgacggcctcacctacaagtaagcgccgggtctcgtacccctaggtgcgcgcatccacgcgccgcgacccccgggccggccctgcacgtgcgcggctcccccggcgttccctgcccggtgcgagtgcctgctgtgggcgctgggggctgggcacgggaaggaaggaggcccgcgccggagcagacggacgtggcacggcgacaccgcggccctcagagccctgacccgtttctggccagatccgggttcggcctgtccccttcctcctctcagcggcatggaggggccctcgggcgtgtgggaactggagatgtgggcattatggggagacttttcccagccgctggtccaggacgccccctcccagcctcaccacgagggcagagggtccccggagccaagcttaagcagccgcttccgcatggccccaggagaggcccagccaggtggttggggtggcttcttttccaactgtctagtccagcgctttttccagttgtgtccctccctgcccacaggttggtattggtgcccctcccaaggcgcgaattattctgtgactgctacccctaagcccaccctacatggggttttggaggaggacacagacccacccgtctgcctctggcttcatttgccttttccgtggtccctaggccagttgccctgcgtgctgcaggcctggcactagctctgcctcctggctgcaggactgtgcccctgccaggaaggagcatcagaaggggcagagtggggatgctggccagtcaaaagcatccctgccttgtctcctgccagccctgccctggcttgtaagcactcctgcttggccagcagtttccctaaacaccaggatacccagtcactcctgaggagtgtctcctcctgcctgcccgtaggcgacgggtgtatagaacacctagaaaatgctatgaggcccagactccagcatttcttctgtggcctctttgctatacagaagaagggctgccaaaggctgggagcagccgaaattctttgtttttttggtggtctttggtgatgagattgaaagcccacctttgatacagttgtcattgaagtcttctaggagaacaccctaggggaacgcctaggagtttctctaggccttagggcagattaatgacccacccccctccaccctgtggcttttccttcctgcgctagggatgcctgctgctttgcttagctcagttcatagtgttcctgaagtgtgggatatttgcttttgggtgtgtctctcaaggcctgctgtgattttagcaggttggggcccctgagctgtgaccctgcacctagatgtacccatgcaggcctgcacttcccttgcggagtttgctgtgaccgtggcccaccctagtgttggtagctgccatgctttggctggggacccagtgtcctggtcccacctctaaggcctctttcctcccctttcccgtcctggccatttctgttctgctctgtcagaacatgccctgcactcagccccctggggtccctccatgctgttccgagccctgtgtgactcagcagcccaggcaccggggcatgcggactgtcctgtgctgggtcatgttcatactgtgttgagcgccacaaaattgttctcaggtttgttcccaatgtttacttattttctctccccatcaagattgagaagttttcaaaggcaggcactgtgtctgctgtgtgtggcgatatgggaacttctgtgtcgcttgacaaactctgagacttaaaggcaatggatattttgggcctattaccttgatggtaccccagtagacctttcgctgtctttggctctagctctgggggctggagtttgccagactctagtgaggtgcacgaggtgggaactgccctgatggggcagtagggatggggggctgtagcctctgctcctctaggcttttctgtacccccctgctgcctcctctggcatggcaggctctgcccctttggggcacccctccccactaataacactcacttctctgtcttcacagcgacttcctgattctcccaggattcatagacttcatagctgatgaggtggtgagtacctcttcctttgacaaggggagggggctgtgtatgtggtggaagaggctgacttcttgctcaggggcagggcatggagagatggagagacttttcttgggaatgggtggataggatatagtcctttttttttttttttttggagacagagtcttgctctgtcacacaggctggagtgcagtggtgtgatctcagctcactgcagcctccacctcccagattcaagtgattctcctgcctcagcctcctgagtaactgggattacaggcacatgccaaaaccccccgataatttttgtgtttttagtggagacggggtttcaccatgttggccaggctggtctcaaactcctgagctcaagtgatccgtccgcctcagcctccgaagacgctgtgattacaggggtgattccacccagctggtatgggtggatatagcctttattgttgccagagaaacaggcagagatcaaagggttatacctgatggggcagaggcagctatgggaacacaggagtgtcctgagtgaggcctggcccagggctgggtggctctctgtcagtgacagagcctgtgggcaggttcagaagaggcctgggaaggggtgggcttgggagtgggaacggtgggcttgggagtggctgccttattgtagagaccataaggattggattttgtctggaatgctgaacaaggacatgatagaagccagtgaaattatggagatttgaaaccggtagacagacttgttcactgatccacaatgtacaagaactggcaagagggtttaaaagagttacattttggataaatacaaggaaacgcagtgccttgctttcccagaggggctcatcagtgagccgaatcaatgaacaattaacatatgataaactcagagaagcccagatgggtagtgatgatggtgtaagtcatttcaagaaaaagtgccatgattcaatgatgaattcatatacattaaaaaaaaaacatttcttttctgttgctattattattgctatttattctggtctgattctcatgaaaggccagagggcctgagtgtgcctggatcacttacatgtgagggaagttcacatccagctggtgtttagccagagctgacccagacagattttcagggggaaattcgaatgattctggttgtttcccttatgacaacaaccaggaagcctgcttggtgcagctgttcagtttaacaaagtttactggccagtgtggctttgtgtcagaccctgggctggctgctaggaagggagggattgaaaagacccctaccagctgggcgtggtggctcatgcctgtaatcccagcattttgggaggctgaggcaggaggatcacctgaggtcaggagtttgagaccagcctggccaacatggtgaaaccccatctctactaaaaatgcaaaaattagctgggcattgtggcgggcatctgtaatcccagctactcgggaggctgaggcaggagaatcacttgaatctgggaggcggaggttgcagtgagtcgggattgcactactgtactctagcctgggtgacagaatgaggctccatcagagagagaaaaaaaaaaaaaccctgcctggccggcaaggatctccttgtcctgtggcttctgtcaggaaggctgtggcccttctgtggcatgacaaaagagaagatggtgttttctagatcatggggccagaggtctgaactagggttagtgatgggtttcagggactttgaatctaaaaaaattacatagcaaagtctgcacaaatgtcttggggactgggatccactactgttggcctgaccctcagaggggtatgtgctctggcctttcctccatgggcaggtggcttttaaatggatacttgcaatcctgaccactctcctgagctccagaccattcgttgcttgctttcctggatgcctaaaagactcttttccatgcctacccccacctcagcccttgtcacccagaatccattctccaccttggagcctgagtgacctttttgaaacataaatcagatcatttctctgtcaagaccctccagtggcttctctccgaatcaaatctgagcttctgtccgtggtcttcacggccatgcatgctgcccctgccttcctcctgcctctcccttccctccactcccctggccttctttttctttcttaagtgtgcctccgaaagaactggaccctgaggcgggtttgcactcagtccctcagccgagagtgacagcccctctgacttctacttaatcggctcccactggtcacctcccaggaaagaggctttccccagtcaccttgttgccagtggtcgcttggcctttttgtttttctctgcagccttcatcctgactgaagtcatcttgagcatatgtcctgtgtctgtcatttttctttccaagtagaacataagctccattagatgagctgggaactcatccaccttgttcactgccatgtccccagggcctgtcctggtgccggtgcatgtaggagctcagtgagtgagtgtccagtgggtgataaactctttacgtgggctgtgcctccatcctcaggacctgacctcagccctgacccggaagatcacgctgaagacgccactgatctcctcccccatggacactgtgacagaggctgacatggccattgccatggctgtgagttacacacctgcatggggactccagggcacacaggaactgaccatggtgggctgtgctgaggggcagggctgaggaggaatgggccccggctctgaccacacttcccttctacatcagctgatgggaggtattggtttcattcaccacaactgcaccccagagttccaggccaacgaggtgcggaaggtcaaggcaagtaccaggcctgtccccagcaagatgccacctggcagtccccacctcagaggccctcccagcctcccctgccagccctgcactgctacactccctgcgtgtccttcctctcagtggagccttggggccgagccctcattttcccactggctcctcatcccactgagggtcctggcttctctgcagcacagctgcatcctctgttccctgtggccagcctggacatcatccctggctttcttccagccttttcctcccccatctctgcccgcagaagtttgaacagggcttcatcacggaccctgtggtgctgagcccctcgcacactgtgggcgatgtgctggaggccaagatgcggcatggcttctctggcatccccatcactgagacgggcaccatgggcagcaagctggtgggcatcgtcacctcccgagacatcgactttcttgctgagaaggaccacaccaccctcctcagtgaggtacctgcagggcaggggaagcagggctgggtgtagagaggaccctcacgctggggcctcagactggtgcctgtgaccagggaccagagggaggcctggctccttctctctcacctgccaacctgcaggcaaatgttcctggccccacaggtgatgacgccaaggattgaactggtggtggctccagcaggtgtgacgttgaaagaggcaaatgagatcctgcagcgtagcaagaaaggtaccagggagctagttgaaaactcaacccccagcctgactccctgtccacagtcccgttgttccttcacagccttacaggttatcccagcaaccagactgagccctggggaaggttcgaataacctcaggcaggccagagcacaactcctgccatccttctcttagcttagggaagcttgcccctagtgcagcatcttcatagtatgtttcccaaaactagtcctatgcgatgctcatcagaaaaaaatcctgagcaataactcctttctctatcccctatcttgcataaagaattgcacattcacttattaaaggctctcagaagtcctgcagttaaatttatttgacactagagctgtttttataatattttccagctagaaacaactttagcttttttttttttgagacagagtctcactttctcacccaggctggagtacagtggcgcaatgtcagctcactgcaaccctcgcctcctgggttcaagcaattctcatgcctcagccttctgagtagccaggattacaggcatgtgctactataccagctaattttttttttttttttgtatttttagtagagatggggtttcaccatgttggccaggctggtcttgaactcctggcctcaagtgatctgccctcctgggcctcccaaagtgctggaattacaggcgtgaaccaccatgccctgccacaactttggcttctatttatttatttttgagacagagtcttgctctctcatccaggctggagtgcagtggtgtgatcttggctcactgcaatctctgcctcctgggttcaagcaagtctcctacctcagcctcccgagtagttgggacaacaggcacacaccaacacacccaggtaatttttttgtatttttagtagagatggggtttcaccatattggccgggctgttcttgaactcctggcctcaagtgatccacctgcctcggcctcccaaagtgaggaagctgtgagccaccacacccggccaactttcgcttgttagaaaaaaaaaggaaaaattaaatattcaccaggtccctgttggctatactgggaaatgcttccctggtccatactggagggttctttggtgtctgtattggacagggcacatgcttctccctgcaggacagcatcactcctggctaggagatttcggccactgtggcccagcaggtgaaaggctgccagtgctcgggctgcccatcccaggccacggggatgcccatccacagacccccaggaacctgctgggctgaaagatttctttgctccctgttccttgggaagagggctaggtccctaggaacacttcctgggggcggtgctgtcacctagtggctgactggggtacttcagtggaatctctggagtggtccactttcatcttcaccctcctaaacatctcccaaacttctccccaccaagcctgcttcatttcacccctgcattccttgtcagggaagctgcctatcgtcaatgattgcgatgagctggtggccatcatcgcccgcaccgacctgaagaagaaccgagactaccctctggcctccaaggattcccagaagcagctgctctgtggggcagctgtgggcacccgtgaggatgacaaataccgtctggacctgctcacccaggcgggcgtcgacgtcatagtcttggtaaggcccccgcctgagtggtgggggagatggatgagtggttcagcagagtggaggtttatgaggacccaggttcacctctgattaagcctgtgcccctcccttgctactcttcctctctctttctgagtgctccctggtgtcagaattaggagggtggcagcaggattgcctgagctcagaggttcaaggtcacagtgagctaggatcgtgccactgcactccagccctggggacagaacgagaccctttctcaaaaaacaaacaatggtttgtgtcatctgagatacaaagaaagaaaacaaacaagttaaaattctccagtggcacagccataagaaagaatgaaatcctgtcctttgcagcaacatggacagagctagaagccattatccttagtgaactaactccaaagcagaaaaccaaatactgcatgccctcacttataagtaggagctaaacagagagtacacatgttcataaagatggaaataatagacgctggggactccaaaatgggagagggtgggaggggaacgaaggatgaaaaattggctatcagacacagttttcgatatgtgggtattaggtacacttgaagcccaattctcaccagtatgcagtattccatttaagcaacaagcacatgtacccactgaatccttaaaaaaaaaattgacaaattgttgcaagcaacaattgcaaatcaagactctcccccaccccccgataaagggaggtagaataaagataaaggcttattgatcccttgtgagtgatctggaccatacatctagattcatctgtattctataactaggaggaagagaaattaggaaggtcactggcaccctctcaacagctcacaacagactgcaaacaaaggcctctgagggccttcttggctcataagttgaccctgataatttagctcacgtttactgagaaccgcctgtttgccaggcactgcgtcaagaccttaatgtatatcagtccattgaggaacagtcgccattccattttcagatgaagaaacaggcttaaagaagttaagtcatttcatttggttagtgagttggtgggaacaggatatggctccaggcagtgtctccttgctttaaggatcagtctgtacaatggataggaaaggccttatgtactctaagactgcattagttgtggttaacctttcagggaagcagtcccctttgagaattgactgaaagttgtcaagtgaatttccagaaaaaaaaaaaaaaaaacaaccagaaggaaagagcattctcataacagttttcataggatttgaggggttcatccactcaggctctccctcctgccttgagaatcctcagctgtctaagcccaagctcttccgtcctttctcacaggactcgtcccaagggaattcggtgtatcagatcgccatggtgcattacatcaaacagaagtacccccacctccaggtgattggggggaacggtgagtgcggggtcgcctcccacccgcctgctcctgcccctccaatgagtaacccttttctgtccttcagcatccctaggtgatggtatggctcctggcatgggtggcagggagcatgatgggctttggtcactgtaggggggttggggggtgctagactggggtcccaagaggctgttgggcaggcaggggcatcccatcctcacattgttcctctgccccatccccacccccagtggtgacagcagcccaggccaagaacctgattgatgctggtgtggacgggctgcgcgtgggcatgggctgcggctccatctgcatcacccaggaaggtgggtgtcaggaggtgagcgagtgcccgctggccccggggcctcgcctttgttccccagatgtatatcaagtactctctctgccaggccctgttctgccatggtaggctccggggtgacccaggcatgggccccaccccatcgggcccactgacttaggggaaggcaggtgtaagcagggtgcaagagctgcagcctgcttctcagagtgcggtcaagggggctctgcctggggcttggggcctggggctggtgtgactgtccatggggcttgttggaacctcagggtttggatttgatttgtgacaaggcagatatttaagacacagagacgacatgtccctgaatatataaagatatgttatacacctgcttcaccatgtggttgggcgtggggagttccacccaattacaaagcccttttgcagggtgggttcctgaacatgaagtgggaaggggggagcctggcatgtgtcccccatgtggttattgaggaggtgctccctggaggctggtatctgacttgtggggtggctgcctggaagacttgggtcctcacttggcctgaggagatgtacccggcccctcctgtgagggcaatttctccaaaacactgagtgatgcatttggcctttcctaccccaaacagctcccccttttggtcctcagagcctctgctatttaggtttgtgcccttcgccttaggtggccaccatggtgaaatgagggccctctctcacccacttaacaaatattcattaggcacctacttgtctcaggcactgttcaaagctttgaggtagagtagggacaaaacaaatgagaggcgccatctctggtttatccagctttgcatccgtccctagacaggtgtggttccttgtagtccccacctaaaacctaacactgaaggaccttggacacttagacttgaagaaatgcaaaccagtatcccaaaggggaccatagtacctaaccctggtaacggtttttgcaaacaaaagccttgaaggggaacttgtgccttgagagcaggtgaggctggggccacctgtctgggggcattgggctctgaaggccgcttctggttcccccgtcagaatcccctgtcatgctcttaggggtggggtggcccagatccctagagtgacactcatcctggtggtatttgccagcacctatgttatgcctcagacacaccatccagccctgtcccttttcctgagtagaggtagtgcacaggaggaagagctgggctggccccgctccaggccccggagttgctgttgactcttctctgccttgtgcaccccaccctcccccagtgatggcctgtggtcggccccagggcactgctgtgtacaaggtggctgagtatgcccggcgctttggtgtgcccatcatagccgatggcggcatccagaccgtgggacacgtggtcaaggccctggcccttggagcctccacaggtgaggggagaatgtgctggggattgggcaggcgagggctggaagctgggggggtggcactagtgggctggaggcactaatcccttgcccactgtagtgatgatgggctccctgctggccgccactacggaggcccctggcgagtacttcttctcagacggggtgcggctcaagaagtaccggggcatgggctcactggatgccatggagaagagcagcagcagccagaaacgatacttcaggttccctgaccctgggccccacctgggcagatcagcccacaacccttcagggcccgctcatgccaccgacttccccagatggcagccagtccccatatggtggttctggaaactgaggcacagggcttaagtagcagacccaggatctgtccctgggccatctgactcagcccagtgaggggtggcctgggggaccttcctgggcggtatcccgtttttgcccttaagaggtggggtggggtcctctgagcttcaagctgctgggctcagtcttccaccctccacgcagcgagggggataaagtgaagatcgcgcagggtgtctcgggctccatccaggacaaaggatccattcagaagttcgtgccctacctcatagcaggcatccaacacggctgccaggatatcggggcccgcagcctgtctgtccttcggtgagtgctgagactgggggtggctcctgcttcctttctctcgctcttctccacccttggtggccctgatctgctccacctaccttcctcctaggtccatgatgtactcaggagagctcaagtttgagaagcggaccatgtcggcccagattgagggtggtgtccatggcctgcactcgtaagtgtggtggcctccttgctgtcacttggaggcagtgggttgggcaggtggggccagggttctgaggtcaagctgaggttccagggaccccatggaccacctgcagcagggacagatgctgctgcaggatggcccctcaccctctcttcgggggcccagccccctgttccttgtcctttagtccccatgcaagcaggccctcccctcccctcgggcctctcccgagcagggcacaggaggtgtggccagtcactgcacctggactcccagcccttgcttgctcaggaagcttggtggctggtggcaggggctgtggtggcaccaggcagccaggcagaagatgcgggtgtgacccctctggcgggtacaagggcagagagatggacgccagggccagcgctggggcaaccgtgggcgggggcagtgctcgttggcagcagtagttgcaggcatgtgccccaccctggtcaggagccctgtccccaggtatcagcgggcgtctaacctgtgtctctttccgccccacccttccgtagctatacctttctgccgtgtaagtaaccgcgctgcccgggccaagcgtagagtagagcaggggcagtctgggtgggacctgggctggaggtgggggtgggtattgggtgggggtaggagggtgctggggtgtaaccatgagatgtggaccctgggtttgggcccccccggccccctaactccaacaccatgatggaggaaaccagcagtgtcccctcatccagctgaaacacatatccctttctggctgcagagagatgcccgtgacctcaggcctaaggctgccccattttagactggacccagtgaccacaagcagcctaggccactgtgcctgcagggctggggctgggtgcggacatgggcagcagaggttcggctccaggttggagtttgctccatgaggatgggccatgcctgcctgagctgtccctccaccctgggcactgaggacatccactcagatgtggcgatggcccaaaggagcatggccatctctgcacccagcatggttcttcagggaatgctggcctgggggaggacagaggcctagggcctgctccaggccctcctcctgcgccgtacggctgagatctcagggcttctcagctctctgttctctcctacatctgggggccctggggaaagggttttgggaaggagcagggtccacacacccactcttgttccccctcttgccttgtccccacagttacgaaaagcggctgtactgaggacagcggtggaggccgaggtggtggaggggatgcaccccagtgtccacttttgggcacagcctccctccataactgagtggtccacagatttgcactacgggttctccagctcctttccaggcagagaggaggggaggtcctgaggggactgctgcccctcactcggcatcccctgcagagtcaggactgctcccggggccaggctgccctgggagcccccctccgagcccagccagccaggctctcaggccctgcgcctgcctcaggtctttcttgctgcagcctgctccagcctggcccccaccccaggggcaggcggcccctcctggcttctcctgtagggcacctccctgcccctagcctcccaggaaatggtgctctcctggccctgcctctggcccttcccgggccgctgcccctcagccatgtggcacttctgagctcctgacctaggccaaggggaggtctctgcccccttccccggccctgggctacccttgggtcctgctcctcaggccgctcccctgtccctggccatgggtaggagactgccctggtcatggccgcctgcctgtcattcctgactcaccaccgtccccaggtgaaccattcctcccttctcctcagctgcagtcgaaggctttaactttgcacacttgggatcacagttgcgtcattgtgtattaaatacttggaataaatcaagcaggtctcaacgcctccacta

SEQ ID NO: 12619 - DNA, 2422 bp, Homo sapiens
agccctagattggacctcgctacacacccgacgacaccccgttcagaactatcttcagtggtcttactggcaggtgttggtgtccagatggatcgccttcgcagggctagcatggcggactacctgatcagcggcggcaccggctacgtgcccgaggatgggctcaccgcgcagcagctcttcgccagcgccgacggcctcacctacaacgacttcctgattctcccaggattcatagacttcatagctgatgaggtggacctgacctcagccctgacccggaagatcacgctgaagacgccactgatctcctcccccatggacactgtgacagaggctgacatggccattgccatggctctgatgggaggtattggtttcattcaccacaactgcaccccagagttccaggccaacgaggtgcggaaggtcaagtttgaacagggcttcatcacggaccctgtggtgctgagcccctcgcacactgtgggcgatgtgctggaggccaagatgcggcatggcttctctggcatccccatcactgagacgggcaccatgggcagcaagctggtgggcatcgtcacctcccgagacatcgactttcttgctgagaaggaccacaccaccctcctcagtgaggcaaatgttcctggccccacaggtgatgacgccaaggattgaactggtggtggctccagcaggtgtgacgttgaaagaggcaaatgagatcctgcagcgtagcaagaaagggaagctgcctatcgtcaatgattgcgatgagctggtggccatcatcgcccgcaccgacctgaagaagaaccgagactaccctctggcctccaaggattcccagaagcagctgctctgtggggcagctgtgggcacccgtgaggatgacaaataccgtctggacctgctcacccaggcgggcgtcgacgtcatagtcttggactcgtcccaagggaattcggtgtatcagatcgccatggtgcattacatcaaacagaagtacccccacctccaggtgattggggggaacgtggtgacagcagcccaggccaagaacctgattgatgctggtgtggacgggctgcgcgtgggcatgggctgcggctccatctgcatcacccaggaagtgatggcctgtggtcggccccagggcactgctgtgtacaaggtggctgagtatgcccggcgctttggtgtgcccatcatagccgatggcggcatccagaccgtgggacacgtggtcaaggccctggcccttggagcctccacagtgatgatgggctccctgctggccgccactacggaggcccctggcgagtacttcttctcagacggggtgcggctcaagaagtaccggggcatgggctcactggatgccatggagaagagcagcagcagccagaaacgatacttcagcgagggggataaagtgaagatcgcgcagggtgtctcgggctccatccaggacaaaggatccattcagaagttcgtgccctacctcatagcaggcatccaacacggctgccaggatatcggggcccgcagcctgtctgtccttcggtccatgatgtactcaggagagctcaagtttgagaagcggaccatgtcggcccagattgagggtggtgtccatggcctgcactcctatacctttctgccgtttacgaaaagcggctgtactgaggacagcggtggaggccgaggtggtggaggggatgcaccccagtgtccacttttgggcacagcctccctccataactgagtggtccacagatttgcactacgggttctccagctcctttccaggcagagaggaggggaggtcctgaggggactgctgcccctcactcggcatcccctgcagagtcaggactgctcccggggccaggctgccctgggagcccccctccgagcccagccagccaggctctcaggccctgcgcctgcctcaggtctttcttgctgcagcctgctccagcctggcccccaccccaggggcaggcggcccctcctggcttctcctgtagggcacctccctgcccctagcctcccaggaaatggtgctctcctggccctgcctctggcccttcccgggccgctgcccctcagccatgtggcacttctgagctcctgacctaggccaaggggaggtctctgcccccttccccggccctgggctacccttgggtcctgctcctcaggccgctcccctgtccctggccatgggtaggagactgccctggtcatggccgcctgcctgtcattcctgactcaccaccgtccccaggtgaaccattcctcccttctcctcagctgcagtcgaaggctttaactttgcacacttgggatcacagttgcgtcattgtgtattaaatacttggaataaatcaagcaggtctcaacgcctccacta

SEQ ID NO: 12620 - DNA, 9813 bp, Homo sapiens
cccgggagcctccaggctcccgcccgccctgagctgcggcctccgcatggaggggccactcactccaccaccgctgcagggaggcggagccgccgctgttccggagcccggagcccggcaacacccgggacacgagacggcggcgcagcggtacagcgcccgactgctgcaggccggctacgagcccgagaggtgacgcccagggcagagcgcgcggggcgcatccggggcgggcggccgaggagggcgcggcggctccgggaacccggcgacgctgcgggggaggggcaggccccacaaacccttcccctattaccgcctcagcctctaacttcccgaaacgccacgctcccggctttggttgggggatgcagacgggcactgtgcgaagggttaggtgcttcgttgcacgggggagcggaggagagggaacaggtcgtaaaaaccttccctaaaatcttagccctagattggacctcgctacacacccgacgacaccccgttcaggtggctccaactcctggggttcaaacagtgcttgctggagtcctgtccgactgacttggcttacccctccttagctgtttcctcctagaactatcttcagtggtcttactggcaggtgttggtgtccagatggatcgccttcgcagggctaggtgaggacactctcccctcctcaccatgcactgagatctgagaggctgccagtgcagctcacctcaaggtctctccgaagacgcaggcccccatgctggggtctgtaggggaatgagggacactggaggaagagtagggtagtgagctgggccccagggggactggctgaaaaggagacagcagctaatctctggattgtatcgcagcttgaaatgcaatcccactgtccttccggtccagaggatttggacttctttctctgcccatctgctggtgttcagcagcttggggaggtgacctggcagctgggttagatgggggtggtctgggggaattagcccggcagctctgcccaggggttggccgcttatgtaagaacttttaacggcttaaggggctcctcggcagtggggctgctgagttaggcccccctgtcctggcaggctgcctctctagaattgactcaggcttaggcaactcccagcctttctcctgtcctagaaatccagctcctggggttcaggccgcagggcgatagggaggggccacaggggctgaatgagccggttggggcttgacagaggcagtgcttggttagagtaggggttgcaaacataatgtttcagagctcaggccggagccatgtgagtgcatcctttctccagattgcacttctgcatcaaggggccatccctacccccacccccaaccgacccgcaccccccacttgggctcagggagcctgtgtaaacctgagccccagccaggtggtgtagtgagattcaaaacctgctggccagacctccacctgccttcgccaacctggagctgtgggaagaggacaggattctgtgagcagtcctgggtttgaatccagtgttattgctctctggcttgaacttggacaggctatgcccccgacccagctcaacagtgctaatgttactaccttttctgcccttcccccatcttcccctcaagagtgttttgaaatcttgttccttcaaatagccccaggcctgatagagccctcggggttccctgcctggacctcagtacccagctgggcactgttgccctgctaccctgaggaaggggcttggacctgccttcctatccccacagctgctaggtgggggtctcagggaacaacagcccttcctcggcttcggaggccgactggttgcctcggtgtctcctccccatggaggaagcagctggggaagatcaggaagagggtgtatgagagtgggggttgagggtggattagcggagtctctggaaaagcacagcctaacccagggctgagcccagcagcttagagtgatgaggagcccaacacaggttaaagtgggaggtgtgtaggggagcaggagaggggagtggggccatgaagtctgtaatcactgggaaggtgaccctccccatgcctcagccaggcagcctaagaaggctggggcagatgtcacagtcaggtcacctgagatggtaaaatccagctgctctcctgggccctggctctggttgaatcctgaatagtactctagccattcctaactcatactgtaggggacagtgacccagagcaggtcctttagtgacccagtaacccagagagaccactgggctggtctctgctgtgtgccaatctctgctctgtgcctgcagttggcatgatagctctgttcttctgtggccagaaaggtaccccagagcagctctgaatggtcaggcactttctgtggctggtctcactgctctgctccacgtggccagtgaaaggtcctagtgctggtgctcctcaggacgctcccctggtcccccatgtggcccgggctccctgcatgagcccaagaatgctgaaggttcagaggtgcttcccacacatcgctggcaatccggccccagcctcccctctgcacacagatggaacagtctgtgttttcctggcagggtcccgggggcatcaatgggggaggctgggcatcccagggaacctcgtggcttggaggccaagcctcccctgggcctagctgccatcacactgctgagaagtaaataaacccagcctcccagggccacagccagccaccaagccagggaggggactgtgtcccacaccaccttattctcttctccccaagtgagctgtgggagccacaggaggacacagggaggaggctgtggagtctgggtggggggacccactcttggtctgggaagagcactggcagttctggtcccataagagggaaggggatctacttcctaccaccccacctttccccatgtgaacctatctgtacccagtcactgcccccatgtagaaatctggatcttgctgggcacccagggccaccaacttctgctttggggatttttcagaagttccctagcccctgttcttatttgtatgcacacttgtctaagccaggcttatgatcctcccccatcttcccaccgcaggaccctcccaaataacaaaccgctctctgagattaaaagccctggtaccaacaccattttctcagccggagatagggcggtgagccgaagcactgggccatgaatcagaagcagtacccctcccttcctttccgaactatagattttgcctctgtcaagggaatgggtacccaatacttgtcaattaatagattgtggagttaatgtgctcatttatgaaaaatgctttgtaaactgcagagggccccaaggccacccaaaggtcaaggagtgtcattatgaagaatgccggctccctaggatgtcgggatggggcatagcgatccaacctcaaagtccttagtgctgggtagctgagagcccagaccggtttctcagggctccgggccttgatcagggtccgcggaagagtattggggattggggaacggcagaaccgtgttagaggtgccctggggagaagggcaaggtgggtggccccggctgggggagaactcgggggtggggggggtggggggtgtgggggtgtgggggggtggggcctctgctggggggtcctgggtggctggatgtagagcggcggagggggcgtgtcccggcctgacccggtactctcccccgcagccccacacctcctacccggtccgggcttgcggggtcgcagcgccgctgcaggcagctgggggcgtgcgcgcggcgcggctgagccctttgtgcggcgcgggcggaggcggcggtttccgcgggaggggcgagaagggcgggaggggcgggaggacagggcggcgccctggcccgccctgccgctgccgcagcccccgcccccgcccccggcccgcccggcccgcggcagcagcgtggccgcggcgcggcgtcagcagtagcagcagcagcagcggcggcagcggcgggcggccgcgcgggtgtttatgtcgggtcgcggggtctcgcggcagcatggcggactacctgatcagcggcggcaccggctacgtgcccgaggatgggctcaccgcgcagcagctcttcgccagcgccgacggcctcacctacaagtaagcgccgggtctcgtacccctaggtgcgcgcatccacgcgccgcgacccccgggccggccctgcacgtgcgcggctcccccggcgttccctgcccggtgcgagtgcctgctgtgggcgctgggggctgggcacgggaaggaaggaggcccgcgccggagcagacggacgtggcacggcgacaccgcggccctcagagccctgacccgtttctggccagatccgggttcggcctgtccccttcctcctctcagcggcatggaggggccctcgggcgtgtgggaactggagatgtgggcattatggggagacttttcccagccgctggtccaggacgccccctcccagcctcaccacgagggcagagggtccccggagccaagcttaagcagccgcttccgcatggccccaggagaggcccagccaggtggttggggtggcttcttttccaactgtctagtccagcgctttttccagttgtgtccctccctgcccacaggttggtattggtgcccctcccaaggcgcgaattattctgtgactgctacccctaagcccaccctacatggggttttggaggaggacacagacccacccgtctgcctctggcttcatttgccttttccgtggtccctaggccagttgccctgcgtgctgcaggcctggcactagctctgcctcctggctgcaggactgtgcccctgccaggaaggagcatcagaaggggcagagtggggatgctggccagtcaaaagcatccctgccttgtctcctgccagccctgccctggcttgtaagcactcctgcttggccagcagtttccctaaacaccaggatacccagtcactcctgaggagtgtctcctcctgcctgcccgtaggcgacgggtgtatagaacacctagaaaatgctatgaggcccagactccagcatttcttctgtggcctctttgctatacagaagaagggctgccaaaggctgggagcagccgaaattctttgtttttttggtggtctttggtgatgagattgaaagcccacctttgatacagttgtcattgaagtcttctaggagaacaccctaggggaacgcctaggagtttctctaggccttagggcagattaatgacccacccccctccaccctgtggcttttccttcctgcgctagggatgcctgctgctttgcttagctcagttcatagtgttcctgaagtgtgggatatttgcttttgggtgtgtctctcaaggcctgctgtgattttagcaggttggggcccctgagctgtgaccctgcacctagatgtacccatgcaggcctgcacttcccttgcggagtttgctgtgaccgtggcccaccctagtgttggtagctgccatgctttggctggggacccagtgtcctggtcccacctctaaggcctctttcctcccctttcccgtcctggccatttctgttctgctctgtcagaacatgccctgcactcagccccctggggtccctccatgctgttccgagccctgtgtgactcagcagcccaggcaccggggcatgcggactgtcctgtgctgggtcatgttcatactgtgttgagcgccacaaaattgttctcaggtttgttcccaatgtttacttattttctctccccatcaagattgagaagttttcaaaggcaggcactgtgtctgctgtgtgtggcgatatgggaacttctgtgtcgcttgacaaactctgagacttaaaggcaatggatattttgggcctattaccttgatggtaccccagtagacctttcgctgtctttggctctagctctgggggctggagtttgccagactctagtgaggtgcacgaggtgggaactgccctgatggggcagtagggatggggggctgtagcctctgctcctctaggcttttctgtacccccctgctgcctcctctggcatggcaggctctgcccctttggggcacccctccccactaataacactcacttctctgtcttcacagcgacttcctgattctcccaggattcatagacttcatagctgatgaggtggtgagtacctcttcctttgacaaggggagggggctgtgtatgtggtggaagaggctgacttcttgctcaggggcagggcatggagagatggagagacttttcttgggaatgggtggataggatatagtcctttttttttttttttttggagacagagtcttgctctgtcacacaggctggagtgcagtggtgtgatctcagctcactgcagcctccacctcccagattcaagtgattctcctgcctcagcctcctgagtaactgggattacaggcacatgccaaaaccccccgataatttttgtgtttttagtggagacggggtttcaccatgttggccaggctggtctcaaactcctgagctcaagtgatccgtccgcctcagcctccgaagacgctgtgattacaggggtgattccacccagctggtatgggtggatatagcctttattgttgccagagaaacaggcagagatcaaagggttatacctgatggggcagaggcagctatgggaacacaggagtgtcctgagtgaggcctggcccagggctgggtggctctctgtcagtgacagagcctgtgggcaggttcagaagaggcctgggaaggggtgggcttgggagtgggaacggtgggcttgggagtggctgccttattgtagagaccataaggattggattttgtctggaatgctgaacaaggacatgatagaagccagtgaaattatggagatttgaaaccggtagacagacttgttcactgatccacaatgtacaagaactggcaagagggtttaaaagagttacattttggataaatacaaggaaacgcagtgccttgctttcccagaggggctcatcagtgagccgaatcaatgaacaattaacatatgataaactcagagaagcccagatgggtagtgatgatggtgtaagtcatttcaagaaaaagtgccatgattcaatgatgaattcatatacattaaaaaaaaaacatttcttttctgttgctattattattgctatttattctggtctgattctcatgaaaggccagagggcctgagtgtgcctggatcacttacatgtgagggaagttcacatccagctggtgtttagccagagctgacccagacagattttcagggggaaattcgaatgattctggttgtttcccttatgacaacaaccaggaagcctgcttggtgcagctgttcagtttaacaaagtttactggccagtgtggctttgtgtcagaccctgggctggctgctaggaagggagggattgaaaagacccctaccagctgggcgtggtggctcatgcctgtaatcccagcattttgggaggctgaggcaggaggatcacctgaggtcaggagtttgagaccagcctggccaacatggtgaaaccccatctctactaaaaatgcaaaaattagctgggcattgtggcgggcatctgtaatcccagctactcgggaggctgaggcaggagaatcacttgaatctgggaggcggaggttgcagtgagtcgggattgcactactgtactctagcctgggtgacagaatgaggctccatcagagagagaaaaaaaaaaaaaccctgcctggccggcaaggatctccttgtcctgtggcttctgtcaggaaggctgtggcccttctgtggcatgacaaaagagaagatggtgttttctagatcatggggccagaggtctgaactagggttagtgatgggtttcagggactttgaatctaaaaaaattacatagcaaagtctgcacaaatgtcttggggactgggatccactactgttggcctgaccctcagaggggtatgtgctctggcctttcctccatgggcaggtggcttttaaatggatacttgcaatcctgaccactctcctgagctccagaccattcgttgcttgctttcctggatgcctaaaagactcttttccatgcctacccccacctcagcccttgtcacccagaatccattctccaccttggagcctgagtgacctttttgaaacataaatcagatcatttctctgtcaagaccctccagtggcttctctccgaatcaaatctgagcttctgtccgtggtcttcacggccatgcatgctgcccctgccttcctcctgcctctcccttccctccactcccctggccttctttttctttcttaagtgtgcctccgaaagaactggaccctgaggcgggtttgcactcagtccctcagccgagagtgacagcccctctgacttctacttaatcggctcccactggtcacctcccaggaaagaggctttccccagtcaccttgttgccagtggtcgcttggcctttttgtttttctctgcagccttcatcctgactgaagtcatcttgagcatatgtcctgtgtctgtcatttttctttccaagtagaacataagctccattagatgagctgggaactcatccaccttgttcactgccatgtccccagggcctgtcctggtgccggtgcatgtaggagctcagtgagtgagtgtccagtgggtgataaactctttacgtgggctgtgcctccatcctcaggacctgacctcagccctgacccggaagatcacgctgaagacgccactgatctcctcccccatggacactgtgacagaggctgacatggccattgccatggctgtgagttacacacctgcatggggactccagggcacacaggaactgaccatggtgggctgtgctgaggggcagggctgaggaggaatgggccccggctctgaccacacttcccttctacatcagctgatgggaggtattggtttcattcaccacaactgcaccccagagttccaggccaacgaggtgcggaaggtcaaggcaagtaccaggcctgtccccagcaagatgccacctggcagtccccacctcagaggccctcccagcctcccctgccagccctgcactgctacactccctgcgtgtccttcctctcagtggagccttggggccgagccctcattttcccactggctcctcatcccactgagggtcctggcttctctgcagcacagctgcatcctctgttccctgtggccagcctggacatcatccctggctttcttccagccttttcctcccccatctctgcccgcagaagtttgaacagggcttcatcacggaccctgtggtgctgagcccctcgcacactgtgggcgatgtgctggaggccaagatgcggcatggcttctctggcatccccatcactgagacgggcaccatgggcagcaagctggtgggcatcgtcacctcccgagacatcgactttcttgctgagaaggaccacaccaccctcctcagtgaggtacctgcagggcaggggaagcagggctgggtgtagagaggaccctcacgctggggcctcagactggtgcctgtgaccagggaccagagggaggcctggctccttctctctcacctgccaacctgcaggcaaatgttcctggccccacaggtgatgacgccaaggattgaactggtggtggctccagcaggtgtgacg

SEQ ID NO: 12621 - DNA, 598 bp, Homo sapiens
cccgggagcctccaggctcccgcccgccctgagctgcggcctccgcatggaggggccactcactccaccaccgctgcagggaggcggagccgccgctgttccggagcccggagcccggcaacacccgggacacgagacggcggcgcagcggtacagcgcccgactgctgcaggccggctacgagcccgagagcgacttcctgattctcccaggattcatagacttcatagctgatgaggtggacctgacctcagccctgacccggaagatcacgctgaagacgccactgatctcctcccccatggacactgtgacagaggctgacatggccattgccatggctaagtttgaacagggcttcatcacggaccctgtggtgctgagcccctcgcacactgtgggcgatgtgctggaggccaagatgcggcatggcttctctggcatccccatcactgagacgggcaccatgggcagcaagctggtgggcatcgtcacctcccgagacatcgactttcttgctgagaaggaccacaccaccctcctcagtgaggtgatgacgccaaggattgaactggtggtggctccagcaggtgtgacg

SEQ ID NO: 12622 - DNA, 9166 bp, Homo sapiens
actcgaccgggctgcgctcactgcccagccggggccccgggagcctccaggctcccgcccgccctgagctgcggcctccgcatggaggggccactcactccaccaccgctgcagggaggcggagccgccgctgttccggagcccggagcccggcaacacccgggacacgagacggcggcgcagcggtacagcgcccgactgctgcaggccggctacgagcccgagaggtgacgcccagggcagagcgcgcggggcgcatccggggcgggcggccgaggagggcgcggcggctccgggaacccggcgacgctgcgggggaggggcaggccccacaaacccttcccctattaccgcctcagcctctaacttcccgaaacgccacgctcccggctttggttgggggatgcagacgggcactgtgcgaagggttaggtgcttcgttgcacgggggagcggaggagagggaacaggtcgtaaaaaccttccctaaaatcttagccctagattggacctcgctacacacccgacgacaccccgttcaggtggctccaactcctggggttcaaacagtgcttgctggagtcctgtccgactgacttggcttacccctccttagctgtttcctcctagaactatcttcagtggtcttactggcaggtgttggtgtccagatggatcgccttcgcagggctaggtgaggacactctcccctcctcaccatgcactgagatctgagaggctgccagtgcagctcacctcaaggtctctccgaagacgcaggcccccatgctggggtctgtaggggaatgagggacactggaggaagagtagggtagtgagctgggccccagggggactggctgaaaaggagacagcagctaatctctggattgtatcgcagcttgaaatgcaatcccactgtccttccggtccagaggatttggacttctttctctgcccatctgctggtgttcagcagcttggggaggtgacctggcagctgggttagatgggggtggtctgggggaattagcccggcagctctgcccaggggttggccgcttatgtaagaacttttaacggcttaaggggctcctcggcagtggggctgctgagttaggcccccctgtcctggcaggctgcctctctagaattgactcaggcttaggcaactcccagcctttctcctgtcctagaaatccagctcctggggttcaggccgcagggcgatagggaggggccacaggggctgaatgagccggttggggcttgacagaggcagtgcttggttagagtaggggttgcaaacataatgtttcagagctcaggccggagccatgtgagtgcatcctttctccagattgcacttctgcatcaaggggccatccctacccccacccccaaccgacccgcaccccccacttgggctcagggagcctgtgtaaacctgagccccagccaggtggtgtagtgagattcaaaacctgctggccagacctccacctgccttcgccaacctggagctgtgggaagaggacaggattctgtgagcagtcctgggtttgaatccagtgttattgctctctggcttgaacttggacaggctatgcccccgacccagctcaacagtgctaatgttactaccttttctgcccttcccccatcttcccctcaagagtgttttgaaatcttgttccttcaaatagccccaggcctgatagagccctcggggttccctgcctggacctcagtacccagctgggcactgttgccctgctaccctgaggaaggggcttggacctgccttcctatccccacagctgctaggtgggggtctcagggaacaacagcccttcctcggcttcggaggccgactggttgcctcggtgtctcctccccatggaggaagcagctggggaagatcaggaagagggtgtatgagagtgggggttgagggtggattagcggagtctctggaaaagcacagcctaacccagggctgagcccagcagcttagagtgatgaggagcccaacacaggttaaagtgggaggtgtgtaggggagcaggagaggggagtggggccatgaagtctgtaatcactgggaaggtgaccctccccatgcctcagccaggcagcctaagaaggctggggcagatgtcacagtcaggtcacctgagatggtaaaatccagctgctctcctgggccctggctctggttgaatcctgaatagtactctagccattcctaactcatactgtaggggacagtgacccagagcaggtcctttagtgacccagtaacccagagagaccactgggctggtctctgctgtgtgccaatctctgctctgtgcctgcagttggcatgatagctctgttcttctgtggccagaaaggtaccccagagcagctctgaatggtcaggcactttctgtggctggtctcactgctctgctccacgtggccagtgaaaggtcctagtgctggtgctcctcaggacgctcccctggtcccccatgtggcccgggctccctgcatgagcccaagaatgctgaaggttcagaggtgcttcccacacatcgctggcaatccggccccagcctcccctctgcacacagatggaacagtctgtgttttcctggcagggtcccgggggcatcaatgggggaggctgggcatcccagggaacctcgtggcttggaggccaagcctcccctgggcctagctgccatcacactgctgagaagtaaataaacccagcctcccagggccacagccagccaccaagccagggaggggactgtgtcccacaccaccttattctcttctccccaagtgagctgtgggagccacaggaggacacagggaggaggctgtggagtctgggtggggggacccactcttggtctgggaagagcactggcagttctggtcccataagagggaaggggatctacttcctaccaccccacctttccccatgtgaacctatctgtacccagtcactgcccccatgtagaaatctggatcttgctgggcacccagggccaccaacttctgctttggggatttttcagaagttccctagcccctgttcttatttgtatgcacacttgtctaagccaggcttatgatcctcccccatcttcccaccgcaggaccctcccaaataacaaaccgctctctgagattaaaagccctggtaccaacaccattttctcagccggagatagggcggtgagccgaagcactgggccatgaatcagaagcagtacccctcccttcctttccgaactatagattttgcctctgtcaagggaatgggtacccaatacttgtcaattaatagattgtggagttaatgtgctcatttatgaaaaatgctttgtaaactgcagagggccccaaggccacccaaaggtcaaggagtgtcattatgaagaatgccggctccctaggatgtcgggatggggcatagcgatccaacctcaaagtccttagtgctgggtagctgagagcccagaccggtttctcagggctccgggccttgatcagggtccgcggaagagtattggggattggggaacggcagaaccgtgttagaggtgccctggggagaagggcaaggtgggtggccccggctgggggagaactcgggggtggggggggtggggggtgtgggggtgtgggggggtggggcctctgctggggggtcctgggtggctggatgtagagcggcggagggggcgtgtcccggcctgacccggtactctcccccgcagccccacacctcctacccggtccgggcttgcggggtcgcagcgccgctgcaggcagctgggggcgtgcgcgcggcgcggctgagccctttgtgcggcgcgggcggaggcggcggtttccgcgggaggggcgagaagggcgggaggggcgggaggacagggcggcgccctggcccgccctgccgctgccgcagcccccgcccccgcccccggcccgcccggcccgcggcagcagcgtggccgcggcgcggcgtcagcagtagcagcagcagcagcggcggcagcggcgggcggccgcgcgggtgtttatgtcgggtcgcggggtctcgcggcagcatggcggactacctgatcagcggcggcaccggctacgtgcccgaggatgggctcaccgcgcagcagctcttcgccagcgccgacggcctcacctacaagtaagcgccgggtctcgtacccctaggtgcgcgcatccacgcgccgcgacccccgggccggccctgcacgtgcgcggctcccccggcgttccctgcccggtgcgagtgcctgctgtgggcgctgggggctgggcacgggaaggaaggaggcccgcgccggagcagacggacgtggcacggcgacaccgcggccctcagagccctgacccgtttctggccagatccgggttcggcctgtccccttcctcctctcagcggcatggaggggccctcgggcgtgtgggaactggagatgtgggcattatggggagacttttcccagccgctggtccaggacgccccctcccagcctcaccacgagggcagagggtccccggagccaagcttaagcagccgcttccgcatggccccaggagaggcccagccaggtggttggggtggcttcttttccaactgtctagtccagcgctttttccagttgtgtccctccctgcccacaggttggtattggtgcccctcccaaggcgcgaattattctgtgactgctacccctaagcccaccctacatggggttttggaggaggacacagacccacccgtctgcctctggcttcatttgccttttccgtggtccctaggccagttgccctgcgtgctgcaggcctggcactagctctgcctcctggctgcaggactgtgcccctgccaggaaggagcatcagaaggggcagagtggggatgctggccagtcaaaagcatccctgccttgtctcctgccagccctgccctggcttgtaagcactcctgcttggccagcagtttccctaaacaccaggatacccagtcactcctgaggagtgtctcctcctgcctgcccgtaggcgacgggtgtatagaacacctagaaaatgctatgaggcccagactccagcatttcttctgtggcctctttgctatacagaagaagggctgccaaaggctgggagcagccgaaattctttgtttttttggtggtctttggtgatgagattgaaagcccacctttgatacagttgtcattgaagtcttctaggagaacaccctaggggaacgcctaggagtttctctaggccttagggcagattaatgacccacccccctccaccctgtggcttttccttcctgcgctagggatgcctgctgctttgcttagctcagttcatagtgttcctgaagtgtgggatatttgcttttgggtgtgtctctcaaggcctgctgtgattttagcaggttggggcccctgagctgtgaccctgcacctagatgtacccatgcaggcctgcacttcccttgcggagtttgctgtgaccgtggcccaccctagtgttggtagctgccatgctttggctggggacccagtgtcctggtcccacctctaaggcctctttcctcccctttcccgtcctggccatttctgttctgctctgtcagaacatgccctgcactcagccccctggggtccctccatgctgttccgagccctgtgtgactcagcagcccaggcaccggggcatgcggactgtcctgtgctgggtcatgttcatactgtgttgagcgccacaaaattgttctcaggtttgttcccaatgtttacttattttctctccccatcaagattgagaagttttcaaaggcaggcactgtgtctgctgtgtgtggcgatatgggaacttctgtgtcgcttgacaaactctgagacttaaaggcaatggatattttgggcctattaccttgatggtaccccagtagacctttcgctgtctttggctctagctctgggggctggagtttgccagactctagtgaggtgcacgaggtgggaactgccctgatggggcagtagggatggggggctgtagcctctgctcctctaggcttttctgtacccccctgctgcctcctctggcatggcaggctctgcccctttggggcacccctccccactaataacactcacttctctgtcttcacagcgacttcctgattctcccaggattcatagacttcatagctgatgaggtggtgagtacctcttcctttgacaaggggagggggctgtgtatgtggtggaagaggctgacttcttgctcaggggcagggcatggagagatggagagacttttcttgggaatgggtggataggatatagtcctttttttttttttttttggagacagagtcttgctctgtcacacaggctggagtgcagtggtgtgatctcagctcactgcagcctccacctcccagattcaagtgattctcctgcctcagcctcctgagtaactgggattacaggcacatgccaaaaccccccgataatttttgtgtttttagtggagacggggtttcaccatgttggccaggctggtctcaaactcctgagctcaagtgatccgtccgcctcagcctccgaagacgctgtgattacaggggtgattccacccagctggtatgggtggatatagcctttattgttgccagagaaacaggcagagatcaaagggttatacctgatggggcagaggcagctatgggaacacaggagtgtcctgagtgaggcctggcccagggctgggtggctctctgtcagtgacagagcctgtgggcaggttcagaagaggcctgggaaggggtgggcttgggagtgggaacggtgggcttgggagtggctgccttattgtagagaccataaggattggattttgtctggaatgctgaacaaggacatgatagaagccagtgaaattatggagatttgaaaccggtagacagacttgttcactgatccacaatgtacaagaactggcaagagggtttaaaagagttacattttggataaatacaaggaaacgcagtgccttgctttcccagaggggctcatcagtgagccgaatcaatgaacaattaacatatgataaactcagagaagcccagatgggtagtgatgatggtgtaagtcatttcaagaaaaagtgccatgattcaatgatgaattcatatacattaaaaaaaaaacatttcttttctgttgctattattattgctatttattctggtctgattctcatgaaaggccagagggcctgagtgtgcctggatcacttacatgtgagggaagttcacatccagctggtgtttagccagagctgacccagacagattttcagggggaaattcgaatgattctggttgtttcccttatgacaacaaccaggaagcctgcttggtgcagctgttcagtttaacaaagtttactggccagtgtggctttgtgtcagaccctgggctggctgctaggaagggagggattgaaaagacccctaccagctgggcgtggtggctcatgcctgtaatcccagcattttgggaggctgaggcaggaggatcacctgaggtcaggagtttgagaccagcctggccaacatggtgaaaccccatctctactaaaaatgcaaaaattagctgggcattgtggcgggcatctgtaatcccagctactcgggaggctgaggcaggagaatcacttgaatctgggaggcggaggttgcagtgagtcgggattgcactactgtactctagcctgggtgacagaatgaggctccatcagagagagaaaaaaaaaaaaaccctgcctggccggcaaggatctccttgtcctgtggcttctgtcaggaaggctgtggcccttctgtggcatgacaaaagagaagatggtgttttctagatcatggggccagaggtctgaactagggttagtgatgggtttcagggactttgaatctaaaaaaattacatagcaaagtctgcacaaatgtcttggggactgggatccactactgttggcctgaccctcagaggggtatgtgctctggcctttcctccatgggcaggtggcttttaaatggatacttgcaatcctgaccactctcctgagctccagaccattcgttgcttgctttcctggatgcctaaaagactcttttccatgcctacccccacctcagcccttgtcacccagaatccattctccaccttggagcctgagtgacctttttgaaacataaatcagatcatttctctgtcaagaccctccagtggcttctctccgaatcaaatctgagcttctgtccgtggtcttcacggccatgcatgctgcccctgccttcctcctgcctctcccttccctccactcccctggccttctttttctttcttaagtgtgcctccgaaagaactggaccctgaggcgggtttgcactcagtccctcagccgagagtgacagcccctctgacttctacttaatcggctcccactggtcacctcccaggaaagaggctttccccagtcaccttgttgccagtggtcgcttggcctttttgtttttctctgcagccttcatcctgactgaagtcatcttgagcatatgtcctgtgtctgtcatttttctttccaagtagaacataagctccattagatgagctgggaactcatccaccttgttcactgccatgtccccagggcctgtcctggtgccggtgcatgtaggagctcagtgagtgagtgtccagtgggtgataaactctttacgtgggctgtgcctccatcctcaggacctgacctcagccctgacccggaagatcacgctgaagacgccactgatctcctcccccatggacactgtgacagaggctgacatggccattgccatggctgtgagttacacacctgcatggggactccagggcacacaggaactgaccatggtgggctgtgctgaggggcagggctgaggaggaatgggccccggctctgaccacacttcccttctacatcagctgatgggaggtattggtttcattcaccacaactgcaccccagagttccaggccaacgaggtgcggaaggtcaag

SEQ ID NO: 12623 - DNA, 748 bp, Homo sapiens
actcgaccgggctgcgctcactgcccagccggggccccgggagcctccaggctcccgcccgccctgagctgcggcctccgcatggaggggccactcactccaccaccgctgcagggaggcggagccgccgctgttccggagcccggagcccggcaacacccgggacacgagacggcggcgcagcggtacagcgcccgactgctgcaggccggctacgagcccgagagccctagattggacctcgctacacacccgacgacaccccgttcaggtggctccaactcctggggttcaaacagtgcttgctggagtcctgtccgactgacttggcttacccctccttagctgtttcctcctagaactatcttcagtggtcttactggcaggtgttggtgtccagatggatcgccttcgcagggctagcatggcggactacctgatcagcggcggcaccggctacgtgcccgaggatgggctcaccgcgcagcagctcttcgccagcgccgacggcctcacctacaacgacttcctgattctcccaggattcatagacttcatagctgatgaggtggacctgacctcagccctgacccggaagatcacgctgaagacgccactgatctcctcccccatggacactgtgacagaggctgacatggccattgccatggctctgatgggaggtattggtttcattcaccacaactgcaccccagagttccaggccaacgaggtgcggaaggtcaag

SEQ ID NO: 12624 - DNA, 13671 bp, Homo sapiens
gtcagcagtagcagcagcagcagcggcggcagcggcgggcggccgcgcgggtgtttatgtcgggtcgcggggtctcgcggcagcatggcggactacctgatcagcggcggcaccggctacgtgcccgaggatgggctcaccgcgcagcagctcttcgccagcgccgacggcctcacctacaagtaagcgccgggtctcgtacccctaggtgcgcgcatccacgcgccgcgacccccgggccggccctgcacgtgcgcggctcccccggcgttccctgcccggtgcgagtgcctgctgtgggcgctgggggctgggcacgggaaggaaggaggcccgcgccggagcagacggacgtggcacggcgacaccgcggccctcagagccctgacccgtttctggccagatccgggttcggcctgtccccttcctcctctcagcggcatggaggggccctcgggcgtgtgggaactggagatgtgggcattatggggagacttttcccagccgctggtccaggacgccccctcccagcctcaccacgagggcagagggtccccggagccaagcttaagcagccgcttccgcatggccccaggagaggcccagccaggtggttggggtggcttcttttccaactgtctagtccagcgctttttccagttgtgtccctccctgcccacaggttggtattggtgcccctcccaaggcgcgaattattctgtgactgctacccctaagcccaccctacatggggttttggaggaggacacagacccacccgtctgcctctggcttcatttgccttttccgtggtccctaggccagttgccctgcgtgctgcaggcctggcactagctctgcctcctggctgcaggactgtgcccctgccaggaaggagcatcagaaggggcagagtggggatgctggccagtcaaaagcatccctgccttgtctcctgccagccctgccctggcttgtaagcactcctgcttggccagcagtttccctaaacaccaggatacccagtcactcctgaggagtgtctcctcctgcctgcccgtaggcgacgggtgtatagaacacctagaaaatgctatgaggcccagactccagcatttcttctgtggcctctttgctatacagaagaagggctgccaaaggctgggagcagccgaaattctttgtttttttggtggtctttggtgatgagattgaaagcccacctttgatacagttgtcattgaagtcttctaggagaacaccctaggggaacgcctaggagtttctctaggccttagggcagattaatgacccacccccctccaccctgtggcttttccttcctgcgctagggatgcctgctgctttgcttagctcagttcatagtgttcctgaagtgtgggatatttgcttttgggtgtgtctctcaaggcctgctgtgattttagcaggttggggcccctgagctgtgaccctgcacctagatgtacccatgcaggcctgcacttcccttgcggagtttgctgtgaccgtggcccaccctagtgttggtagctgccatgctttggctggggacccagtgtcctggtcccacctctaaggcctctttcctcccctttcccgtcctggccatttctgttctgctctgtcagaacatgccctgcactcagccccctggggtccctccatgctgttccgagccctgtgtgactcagcagcccaggcaccggggcatgcggactgtcctgtgctgggtcatgttcatactgtgttgagcgccacaaaattgttctcaggtttgttcccaatgtttacttattttctctccccatcaagattgagaagttttcaaaggcaggcactgtgtctgctgtgtgtggcgatatgggaacttctgtgtcgcttgacaaactctgagacttaaaggcaatggatattttgggcctattaccttgatggtaccccagtagacctttcgctgtctttggctctagctctgggggctggagtttgccagactctagtgaggtgcacgaggtgggaactgccctgatggggcagtagggatggggggctgtagcctctgctcctctaggcttttctgtacccccctgctgcctcctctggcatggcaggctctgcccctttggggcacccctccccactaataacactcacttctctgtcttcacagcgacttcctgattctcccaggattcatagacttcatagctgatgaggtggtgagtacctcttcctttgacaaggggagggggctgtgtatgtggtggaagaggctgacttcttgctcaggggcagggcatggagagatggagagacttttcttgggaatgggtggataggatatagtcctttttttttttttttttggagacagagtcttgctctgtcacacaggctggagtgcagtggtgtgatctcagctcactgcagcctccacctcccagattcaagtgattctcctgcctcagcctcctgagtaactgggattacaggcacatgccaaaaccccccgataatttttgtgtttttagtggagacggggtttcaccatgttggccaggctggtctcaaactcctgagctcaagtgatccgtccgcctcagcctccgaagacgctgtgattacaggggtgattccacccagctggtatgggtggatatagcctttattgttgccagagaaacaggcagagatcaaagggttatacctgatggggcagaggcagctatgggaacacaggagtgtcctgagtgaggcctggcccagggctgggtggctctctgtcagtgacagagcctgtgggcaggttcagaagaggcctgggaaggggtgggcttgggagtgggaacggtgggcttgggagtggctgccttattgtagagaccataaggattggattttgtctggaatgctgaacaaggacatgatagaagccagtgaaattatggagatttgaaaccggtagacagacttgttcactgatccacaatgtacaagaactggcaagagggtttaaaagagttacattttggataaatacaaggaaacgcagtgccttgctttcccagaggggctcatcagtgagccgaatcaatgaacaattaacatatgataaactcagagaagcccagatgggtagtgatgatggtgtaagtcatttcaagaaaaagtgccatgattcaatgatgaattcatatacattaaaaaaaaaacatttcttttctgttgctattattattgctatttattctggtctgattctcatgaaaggccagagggcctgagtgtgcctggatcacttacatgtgagggaagttcacatccagctggtgtttagccagagctgacccagacagattttcagggggaaattcgaatgattctggttgtttcccttatgacaacaaccaggaagcctgcttggtgcagctgttcagtttaacaaagtttactggccagtgtggctttgtgtcagaccctgggctggctgctaggaagggagggattgaaaagacccctaccagctgggcgtggtggctcatgcctgtaatcccagcattttgggaggctgaggcaggaggatcacctgaggtcaggagtttgagaccagcctggccaacatggtgaaaccccatctctactaaaaatgcaaaaattagctgggcattgtggcgggcatctgtaatcccagctactcgggaggctgaggcaggagaatcacttgaatctgggaggcggaggttgcagtgagtcgggattgcactactgtactctagcctgggtgacagaatgaggctccatcagagagagaaaaaaaaaaaaaccctgcctggccggcaaggatctccttgtcctgtggcttctgtcaggaaggctgtggcccttctgtggcatgacaaaagagaagatggtgttttctagatcatggggccagaggtctgaactagggttagtgatgggtttcagggactttgaatctaaaaaaattacatagcaaagtctgcacaaatgtcttggggactgggatccactactgttggcctgaccctcagaggggtatgtgctctggcctttcctccatgggcaggtggcttttaaatggatacttgcaatcctgaccactctcctgagctccagaccattcgttgcttgctttcctggatgcctaaaagactcttttccatgcctacccccacctcagcccttgtcacccagaatccattctccaccttggagcctgagtgacctttttgaaacataaatcagatcatttctctgtcaagaccctccagtggcttctctccgaatcaaatctgagcttctgtccgtggtcttcacggccatgcatgctgcccctgccttcctcctgcctctcccttccctccactcccctggccttctttttctttcttaagtgtgcctccgaaagaactggaccctgaggcgggtttgcactcagtccctcagccgagagtgacagcccctctgacttctacttaatcggctcccactggtcacctcccaggaaagaggctttccccagtcaccttgttgccagtggtcgcttggcctttttgtttttctctgcagccttcatcctgactgaagtcatcttgagcatatgtcctgtgtctgtcatttttctttccaagtagaacataagctccattagatgagctgggaactcatccaccttgttcactgccatgtccccagggcctgtcctggtgccggtgcatgtaggagctcagtgagtgagtgtccagtgggtgataaactctttacgtgggctgtgcctccatcctcaggacctgacctcagccctgacccggaagatcacgctgaagacgccactgatctcctcccccatggacactgtgacagaggctgacatggccattgccatggctgtgagttacacacctgcatggggactccagggcacacaggaactgaccatggtgggctgtgctgaggggcagggctgaggaggaatgggccccggctctgaccacacttcccttctacatcagctgatgggaggtattggtttcattcaccacaactgcaccccagagttccaggccaacgaggtgcggaaggtcaaggcaagtaccaggcctgtccccagcaagatgccacctggcagtccccacctcagaggccctcccagcctcccctgccagccctgcactgctacactccctgcgtgtccttcctctcagtggagccttggggccgagccctcattttcccactggctcctcatcccactgagggtcctggcttctctgcagcacagctgcatcctctgttccctgtggccagcctggacatcatccctggctttcttccagccttttcctcccccatctctgcccgcagaagtttgaacagggcttcatcacggaccctgtggtgctgagcccctcgcacactgtgggcgatgtgctggaggccaagatgcggcatggcttctctggcatccccatcactgagacgggcaccatgggcagcaagctggtgggcatcgtcacctcccgagacatcgactttcttgctgagaaggaccacaccaccctcctcagtgaggtacctgcagggcaggggaagcagggctgggtgtagagaggaccctcacgctggggcctcagactggtgcctgtgaccagggaccagagggaggcctggctccttctctctcacctgccaacctgcaggcaaatgttcctggccccacaggtgatgacgccaaggattgaactggtggtggctccagcaggtgtgacgttgaaagaggcaaatgagatcctgcagcgtagcaagaaaggtaccagggagctagttgaaaactcaacccccagcctgactccctgtccacagtcccgttgttccttcacagccttacaggttatcccagcaaccagactgagccctggggaaggttcgaataacctcaggcaggccagagcacaactcctgccatccttctcttagcttagggaagcttgcccctagtgcagcatcttcatagtatgtttcccaaaactagtcctatgcgatgctcatcagaaaaaaatcctgagcaataactcctttctctatcccctatcttgcataaagaattgcacattcacttattaaaggctctcagaagtcctgcagttaaatttatttgacactagagctgtttttataatattttccagctagaaacaactttagcttttttttttttgagacagagtctcactttctcacccaggctggagtacagtggcgcaatgtcagctcactgcaaccctcgcctcctgggttcaagcaattctcatgcctcagccttctgagtagccaggattacaggcatgtgctactataccagctaattttttttttttttttgtatttttagtagagatggggtttcaccatgttggccaggctggtcttgaactcctggcctcaagtgatctgccctcctgggcctcccaaagtgctggaattacaggcgtgaaccaccatgccctgccacaactttggcttctatttatttatttttgagacagagtcttgctctctcatccaggctggagtgcagtggtgtgatcttggctcactgcaatctctgcctcctgggttcaagcaagtctcctacctcagcctcccgagtagttgggacaacaggcacacaccaacacacccaggtaatttttttgtatttttagtagagatggggtttcaccatattggccgggctgttcttgaactcctggcctcaagtgatccacctgcctcggcctcccaaagtgaggaagctgtgagccaccacacccggccaactttcgcttgttagaaaaaaaaaggaaaaattaaatattcaccaggtccctgttggctatactgggaaatgcttccctggtccatactggagggttctttggtgtctgtattggacagggcacatgcttctccctgcaggacagcatcactcctggctaggagatttcggccactgtggcccagcaggtgaaaggctgccagtgctcgggctgcccatcccaggccacggggatgcccatccacagacccccaggaacctgctgggctgaaagatttctttgctccctgttccttgggaagagggctaggtccctaggaacacttcctgggggcggtgctgtcacctagtggctgactggggtacttcagtggaatctctggagtggtccactttcatcttcaccctcctaaacatctcccaaacttctccccaccaagcctgcttcatttcacccctgcattccttgtcagggaagctgcctatcgtcaatgattgcgatgagctggtggccatcatcgcccgcaccgacctgaagaagaaccgagactaccctctggcctccaaggattcccagaagcagctgctctgtggggcagctgtgggcacccgtgaggatgacaaataccgtctggacctgctcacccaggcgggcgtcgacgtcatagtcttggtaaggcccccgcctgagtggtgggggagatggatgagtggttcagcagagtggaggtttatgaggacccaggttcacctctgattaagcctgtgcccctcccttgctactcttcctctctctttctgagtgctccctggtgtcagaattaggagggtggcagcaggattgcctgagctcagaggttcaaggtcacagtgagctaggatcgtgccactgcactccagccctggggacagaacgagaccctttctcaaaaaacaaacaatggtttgtgtcatctgagatacaaagaaagaaaacaaacaagttaaaattctccagtggcacagccataagaaagaatgaaatcctgtcctttgcagcaacatggacagagctagaagccattatccttagtgaactaactccaaagcagaaaaccaaatactgcatgccctcacttataagtaggagctaaacagagagtacacatgttcataaagatggaaataatagacgctggggactccaaaatgggagagggtgggaggggaacgaaggatgaaaaattggctatcagacacagttttcgatatgtgggtattaggtacacttgaagcccaattctcaccagtatgcagtattccatttaagcaacaagcacatgtacccactgaatccttaaaaaaaaaattgacaaattgttgcaagcaacaattgcaaatcaagactctcccccaccccccgataaagggaggtagaataaagataaaggcttattgatcccttgtgagtgatctggaccatacatctagattcatctgtattctataactaggaggaagagaaattaggaaggtcactggcaccctctcaacagctcacaacagactgcaaacaaaggcctctgagggccttcttggctcataagttgaccctgataatttagctcacgtttactgagaaccgcctgtttgccaggcactgcgtcaagaccttaatgtatatcagtccattgaggaacagtcgccattccattttcagatgaagaaacaggcttaaagaagttaagtcatttcatttggttagtgagttggtgggaacaggatatggctccaggcagtgtctccttgctttaaggatcagtctgtacaatggataggaaaggccttatgtactctaagactgcattagttgtggttaacctttcagggaagcagtcccctttgagaattgactgaaagttgtcaagtgaatttccagaaaaaaaaaaaaaaaaacaaccagaaggaaagagcattctcataacagttttcataggatttgaggggttcatccactcaggctctccctcctgccttgagaatcctcagctgtctaagcccaagctcttccgtcctttctcacaggactcgtcccaagggaattcggtgtatcagatcgccatggtgcattacatcaaacagaagtacccccacctccaggtgattggggggaacggtgagtgcggggtcgcctcccacccgcctgctcctgcccctccaatgagtaacccttttctgtccttcagcatccctaggtgatggtatggctcctggcatgggtggcagggagcatgatgggctttggtcactgtaggggggttggggggtgctagactggggtcccaagaggctgttgggcaggcaggggcatcccatcctcacattgttcctctgccccatccccacccccagtggtgacagcagcccaggccaagaacctgattgatgctggtgtggacgggctgcgcgtgggcatgggctgcggctccatctgcatcacccaggaaggtgggtgtcaggaggtgagcgagtgcccgctggccccggggcctcgcctttgttccccagatgtatatcaagtactctctctgccaggccctgttctgccatggtaggctccggggtgacccaggcatgggccccaccccatcgggcccactgacttaggggaaggcaggtgtaagcagggtgcaagagctgcagcctgcttctcagagtgcggtcaagggggctctgcctggggcttggggcctggggctggtgtgactgtccatggggcttgttggaacctcagggtttggatttgatttgtgacaaggcagatatttaagacacagagacgacatgtccctgaatatataaagatatgttatacacctgcttcaccatgtggttgggcgtggggagttccacccaattacaaagcccttttgcagggtgggttcctgaacatgaagtgggaaggggggagcctggcatgtgtcccccatgtggttattgaggaggtgctccctggaggctggtatctgacttgtggggtggctgcctggaagacttgggtcctcacttggcctgaggagatgtacccggcccctcctgtgagggcaatttctccaaaacactgagtgatgcatttggcctttcctaccccaaacagctcccccttttggtcctcagagcctctgctatttaggtttgtgcccttcgccttaggtggccaccatggtgaaatgagggccctctctcacccacttaacaaatattcattaggcacctacttgtctcaggcactgttcaaagctttgaggtagagtagggacaaaacaaatgagaggcgccatctctggtttatccagctttgcatccgtccctagacaggtgtggttccttgtagtccccacctaaaacctaacactgaaggaccttggacacttagacttgaagaaatgcaaaccagtatcccaaaggggaccatagtacctaaccctggtaacggtttttgcaaacaaaagccttgaaggggaacttgtgccttgagagcaggtgaggctggggccacctgtctgggggcattgggctctgaaggccgcttctggttcccccgtcagaatcccctgtcatgctcttaggggtggggtggcccagatccctagagtgacactcatcctggtggtatttgccagcacctatgttatgcctcagacacaccatccagccctgtcccttttcctgagtagaggtagtgcacaggaggaagagctgggctggccccgctccaggccccggagttgctgttgactcttctctgccttgtgcaccccaccctcccccagtgatggcctgtggtcggccccagggcactgctgtgtacaaggtggctgagtatgcccggcgctttggtgtgcccatcatagccgatggcggcatccagaccgtgggacacgtggtcaaggccctggcccttggagcctccacaggtgaggggagaatgtgctggggattgggcaggcgagggctggaagctgggggggtggcactagtgggctggaggcactaatcccttgcccactgtagtgatgatgggctccctgctggccgccactacggaggcccctggcgagtacttcttctcagacggggtgcggctcaagaagtaccggggcatgggctcactggatgccatggagaagagcagcagcagccagaaacgatacttcaggttccctgaccctgggccccacctgggcagatcagcccacaacccttcagggcccgctcatgccaccgacttccccagatggcagccagtccccatatggtggttctggaaactgaggcacagggcttaagtagcagacccaggatctgtccctgggccatctgactcagcccagtgaggggtggcctgggggaccttcctgggcggtatcccgtttttgcccttaagaggtggggtggggtcctctgagcttcaagctgctgggctcagtcttccaccctccacgcagcgagggggataaagtgaagatcgcgcagggtgtctcgggctccatccaggacaaaggatccattcagaagttcgtgccctacctcatagcaggcatccaacacggctgccaggatatcggggcccgcagcctgtctgtccttcggtgagtgctgagactgggggtggctcctgcttcctttctctcgctcttctccacccttggtggccctgatctgctccacctaccttcctcctaggtccatgatgtactcaggagagctcaagtttgagaagcggaccatgtcggcccagattgagggtggtgtccatggcctgcactcgtaagtgtggtggcctccttgctgtcacttggaggcagtgggttgggcaggtggggccagggttctgaggtcaagctgaggttccagggaccccatggaccacctgcagcagggacagatgctgctgcaggatggcccctcaccctctcttcgggggcccagccccctgttccttgtcctttagtccccatgcaagcaggccctcccctcccctcgggcctctcccgagcagggcacaggaggtgtggccagtcactgcacctggactcccagcccttgcttgctcaggaagcttggtggctggtggcaggggctgtggtggcaccaggcagccaggcagaagatgcgggtgtgacccctctggcgggtacaagggcagagagatggacgccagggccagcgctggggcaaccgtgggcgggggcagtgctcgttggcagcagtagttgcaggcatgtgccccaccctggtcaggagccctgtccccaggtatcagcgggcgtctaacctgtgtctctttccgccccacccttccgtagctatacctttctgccgtgtaagtaaccgcgctgcccgggccaagcgtagagtagagcaggggcagtctgggtgggacctgggctggaggtgggggtgggtattgggtgggggtaggagggtgctggggtgtaaccatgagatgtggaccctgggtttgggcccccccggccccctaactccaacaccatgatggaggaaaccagcagtgtcccctcatccagctgaaacacatatccctttctggctgcagagagatgcccgtgacctcaggcctaaggctgccccattttagactggacccagtgaccacaagcagcctaggccactgtgcctgcagggctggggctgggtgcggacatgggcagcagaggttcggctccaggttggagtttgctccatgaggatgggccatgcctgcctgagctgtccctccaccctgggcactgaggacatccactcagatgtggcgatggcccaaaggagcatggccatctctgcacccagcatggttcttcagggaatgctggcctgggggaggacagaggcctagggcctgctccaggccctcctcctgcgccgtacggctgagatctcagggcttctcagctctctgttctctcctacatctgggggccctggggaaagggttttgggaaggagcagggtccacacacccactcttgttccccctcttgccttgtccccacagttacgaaaagcggctgtactgaggacagcggtggaggccgaggtggtggaggggatgcaccccagtgtccacttttgggcacagcctccctccataactgagtggtccacagatttgcactacgggttctccagctcctttccaggcagagaggaggggaggtcctgaggggactgctgcccctcactcggcatcccctgcagagtcaggactgctcccggggccaggctgccctgggagcccccctccgagcccagccagccaggctctcaggccctgcgcctgcctcaggtctttcttgctgcagcctgctccagcctggcccccaccccaggggcaggcggcccctcctggcttctcctgtagggcacctccctgcccctagcctcccaggaaatggtgctctcctggccctgcctctggcccttcccgggccgctgcccctcagccatgtggcacttctgagctcctgacctaggccaaggggaggtctctgcccccttccccggccctgggctacccttgggtcctgctcctcaggccgctcccctgtccctggccatgggtaggagactgccctggtcatggccgcctgcctgtcattcctgactcaccaccgtccccaggtgaaccattcctcccttctcctcagctgcagtcgaaggctttaactttgcacacttgggatcacagttgcgtcattgtgtattaaatacttggaataaatcaagcaggtctcaacgcctccact

SEQ ID NO: 12625 - DNA, 2283 bp, Homo sapiens
gtcagcagtagcagcagcagcagcggcggcagcggcgggcggccgcgcgggtgtttatgtcgggtcgcggggtctcgcggcagcatggcggactacctgatcagcggcggcaccggctacgtgcccgaggatgggctcaccgcgcagcagctcttcgccagcgccgacggcctcacctacaacgacttcctgattctcccaggattcatagacttcatagctgatgaggtggacctgacctcagccctgacccggaagatcacgctgaagacgccactgatctcctcccccatggacactgtgacagaggctgacatggccattgccatggctaagtttgaacagggcttcatcacggaccctgtggtgctgagcccctcgcacactgtgggcgatgtgctggaggccaagatgcggcatggcttctctggcatccccatcactgagacgggcaccatgggcagcaagctggtgggcatcgtcacctcccgagacatcgactttcttgctgagaaggaccacaccaccctcctcagtgaggtgatgacgccaaggattgaactggtggtggctccagcaggtgtgacgttgaaagaggcaaatgagatcctgcagcgtagcaagaaagggaagctgcctatcgtcaatgattgcgatgagctggtggccatcatcgcccgcaccgacctgaagaagaaccgagactaccctctggcctccaaggattcccagaagcagctgctctgtggggcagctgtgggcacccgtgaggatgacaaataccgtctggacctgctcacccaggcgggcgtcgacgtcatagtcttggactcgtcccaagggaattcggtgtatcagatcgccatggtgcattacatcaaacagaagtacccccacctccaggtgattggggggaacgtggtgacagcagcccaggccaagaacctgattgatgctggtgtggacgggctgcgcgtgggcatgggctgcggctccatctgcatcacccaggaagtgatggcctgtggtcggccccagggcactgctgtgtacaaggtggctgagtatgcccggcgctttggtgtgcccatcatagccgatggcggcatccagaccgtgggacacgtggtcaaggccctggcccttggagcctccacagtgatgatgggctccctgctggccgccactacggaggcccctggcgagtacttcttctcagacggggtgcggctcaagaagtaccggggcatgggctcactggatgccatggagaagagcagcagcagccagaaacgatacttcagcgagggggataaagtgaagatcgcgcagggtgtctcgggctccatccaggacaaaggatccattcagaagttcgtgccctacctcatagcaggcatccaacacggctgccaggatatcggggcccgcagcctgtctgtccttcggtccatgatgtactcaggagagctcaagtttgagaagcggaccatgtcggcccagattgagggtggtgtccatggcctgcactcttacgaaaagcggctgtactgaggacagcggtggaggccgaggtggtggaggggatgcaccccagtgtccacttttgggcacagcctccctccataactgagtggtccacagatttgcactacgggttctccagctcctttccaggcagagaggaggggaggtcctgaggggactgctgcccctcactcggcatcccctgcagagtcaggactgctcccggggccaggctgccctgggagcccccctccgagcccagccagccaggctctcaggccctgcgcctgcctcaggtctttcttgctgcagcctgctccagcctggcccccaccccaggggcaggcggcccctcctggcttctcctgtagggcacctccctgcccctagcctcccaggaaatggtgctctcctggccctgcctctggcccttcccgggccgctgcccctcagccatgtggcacttctgagctcctgacctaggccaaggggaggtctctgcccccttccccggccctgggctacccttgggtcctgctcctcaggccgctcccctgtccctggccatgggtaggagactgccctggtcatggccgcctgcctgtcattcctgactcaccaccgtccccaggtgaaccattcctcccttctcctcagctgcagtcgaaggctttaactttgcacacttgggatcacagttgcgtcattgtgtattaaatacttggaataaatcaagcaggtctcaacgcctccact

SEQ ID NO: 12626 - DNA, 5268 bp, Homo sapiens
agcagcagcagcagcggcggcagcggcgggcggccgcgcgggtgtttatgtcgggtcgcggggtctcgcggcagcatggcggactacctgatcagcggcggcaccggctacgtgcccgaggatgggctcaccgcgcagcagctcttcgccagcgccgacggcctcacctacaagtaagcgccgggtctcgtacccctaggtgcgcgcatccacgcgccgcgacccccgggccggccctgcacgtgcgcggctcccccggcgttccctgcccggtgcgagtgcctgctgtgggcgctgggggctgggcacgggaaggaaggaggcccgcgccggagcagacggacgtggcacggcgacaccgcggccctcagagccctgacccgtttctggccagatccgggttcggcctgtccccttcctcctctcagcggcatggaggggccctcgggcgtgtgggaactggagatgtgggcattatggggagacttttcccagccgctggtccaggacgccccctcccagcctcaccacgagggcagagggtccccggagccaagcttaagcagccgcttccgcatggccccaggagaggcccagccaggtggttggggtggcttcttttccaactgtctagtccagcgctttttccagttgtgtccctccctgcccacaggttggtattggtgcccctcccaaggcgcgaattattctgtgactgctacccctaagcccaccctacatggggttttggaggaggacacagacccacccgtctgcctctggcttcatttgccttttccgtggtccctaggccagttgccctgcgtgctgcaggcctggcactagctctgcctcctggctgcaggactgtgcccctgccaggaaggagcatcagaaggggcagagtggggatgctggccagtcaaaagcatccctgccttgtctcctgccagccctgccctggcttgtaagcactcctgcttggccagcagtttccctaaacaccaggatacccagtcactcctgaggagtgtctcctcctgcctgcccgtaggcgacgggtgtatagaacacctagaaaatgctatgaggcccagactccagcatttcttctgtggcctctttgctatacagaagaagggctgccaaaggctgggagcagccgaaattctttgtttttttggtggtctttggtgatgagattgaaagcccacctttgatacagttgtcattgaagtcttctaggagaacaccctaggggaacgcctaggagtttctctaggccttagggcagattaatgacccacccccctccaccctgtggcttttccttcctgcgctagggatgcctgctgctttgcttagctcagttcatagtgttcctgaagtgtgggatatttgcttttgggtgtgtctctcaaggcctgctgtgattttagcaggttggggcccctgagctgtgaccctgcacctagatgtacccatgcaggcctgcacttcccttgcggagtttgctgtgaccgtggcccaccctagtgttggtagctgccatgctttggctggggacccagtgtcctggtcccacctctaaggcctctttcctcccctttcccgtcctggccatttctgttctgctctgtcagaacatgccctgcactcagccccctggggtccctccatgctgttccgagccctgtgtgactcagcagcccaggcaccggggcatgcggactgtcctgtgctgggtcatgttcatactgtgttgagcgccacaaaattgttctcaggtttgttcccaatgtttacttattttctctccccatcaagattgagaagttttcaaaggcaggcactgtgtctgctgtgtgtggcgatatgggaacttctgtgtcgcttgacaaactctgagacttaaaggcaatggatattttgggcctattaccttgatggtaccccagtagacctttcgctgtctttggctctagctctgggggctggagtttgccagactctagtgaggtgcacgaggtgggaactgccctgatggggcagtagggatggggggctgtagcctctgctcctctaggcttttctgtacccccctgctgcctcctctggcatggcaggctctgcccctttggggcacccctccccactaataacactcacttctctgtcttcacagcgacttcctgattctcccaggattcatagacttcatagctgatgaggtggtgagtacctcttcctttgacaaggggagggggctgtgtatgtggtggaagaggctgacttcttgctcaggggcagggcatggagagatggagagacttttcttgggaatgggtggataggatatagtcctttttttttttttttttggagacagagtcttgctctgtcacacaggctggagtgcagtggtgtgatctcagctcactgcagcctccacctcccagattcaagtgattctcctgcctcagcctcctgagtaactgggattacaggcacatgccaaaaccccccgataatttttgtgtttttagtggagacggggtttcaccatgttggccaggctggtctcaaactcctgagctcaagtgatccgtccgcctcagcctccgaagacgctgtgattacaggggtgattccacccagctggtatgggtggatatagcctttattgttgccagagaaacaggcagagatcaaagggttatacctgatggggcagaggcagctatgggaacacaggagtgtcctgagtgaggcctggcccagggctgggtggctctctgtcagtgacagagcctgtgggcaggttcagaagaggcctgggaaggggtgggcttgggagtgggaacggtgggcttgggagtggctgccttattgtagagaccataaggattggattttgtctggaatgctgaacaaggacatgatagaagccagtgaaattatggagatttgaaaccggtagacagacttgttcactgatccacaatgtacaagaactggcaagagggtttaaaagagttacattttggataaatacaaggaaacgcagtgccttgctttcccagaggggctcatcagtgagccgaatcaatgaacaattaacatatgataaactcagagaagcccagatgggtagtgatgatggtgtaagtcatttcaagaaaaagtgccatgattcaatgatgaattcatatacattaaaaaaaaaacatttcttttctgttgctattattattgctatttattctggtctgattctcatgaaaggccagagggcctgagtgtgcctggatcacttacatgtgagggaagttcacatccagctggtgtttagccagagctgacccagacagattttcagggggaaattcgaatgattctggttgtttcccttatgacaacaaccaggaagcctgcttggtgcagctgttcagtttaacaaagtttactggccagtgtggctttgtgtcagaccctgggctggctgctaggaagggagggattgaaaagacccctaccagctgggcgtggtggctcatgcctgtaatcccagcattttgggaggctgaggcaggaggatcacctgaggtcaggagtttgagaccagcctggccaacatggtgaaaccccatctctactaaaaatgcaaaaattagctgggcattgtggcgggcatctgtaatcccagctactcgggaggctgaggcaggagaatcacttgaatctgggaggcggaggttgcagtgagtcgggattgcactactgtactctagcctgggtgacagaatgaggctccatcagagagagaaaaaaaaaaaaaccctgcctggccggcaaggatctccttgtcctgtggcttctgtcaggaaggctgtggcccttctgtggcatgacaaaagagaagatggtgttttctagatcatggggccagaggtctgaactagggttagtgatgggtttcagggactttgaatctaaaaaaattacatagcaaagtctgcacaaatgtcttggggactgggatccactactgttggcctgaccctcagaggggtatgtgctctggcctttcctccatgggcaggtggcttttaaatggatacttgcaatcctgaccactctcctgagctccagaccattcgttgcttgctttcctggatgcctaaaagactcttttccatgcctacccccacctcagcccttgtcacccagaatccattctccaccttggagcctgagtgacctttttgaaacataaatcagatcatttctctgtcaagaccctccagtggcttctctccgaatcaaatctgagcttctgtccgtggtcttcacggccatgcatgctgcccctgccttcctcctgcctctcccttccctccactcccctggccttctttttctttcttaagtgtgcctccgaaagaactggaccctgaggcgggtttgcactcagtccctcagccgagagtgacagcccctctgacttctacttaatcggctcccactggtcacctcccaggaaagaggctttccccagtcaccttgttgccagtggtcgcttggcctttttgtttttctctgcagccttcatcctgactgaagtcatcttgagcatatgtcctgtgtctgtcatttttctttccaagtagaacataagctccattagatgagctgggaactcatccaccttgttcactgccatgtccccagggcctgtcctggtgccggtgcatgtaggagctcagtgagtgagtgtccagtgggtgataaactctttacgtgggctgtgcctccatcctcaggacctgacctcagccctgacccggaagatcacgctgaagacgccactgatctcctcccccatggacactgtgacagaggctgacatggccattgccatggctgtgagttacacacctgcatggggactccagggcacacaggaactgaccatggtgggctgtgctgaggggcagggctgaggaggaatgggccccggctctgaccacacttcccttctacatcagctgatgggaggtattggtttcattcaccacaactgcaccccagagttccaggccaacgaggtgcggaaggtcaaggcaagtaccaggcctgtccccagcaagatgccacctggcagtccccacctcagaggccctcccagcctcccctgccagccctgcactgctacactccctgcgtgtccttcctctcagtggagccttggggccgagccctcatttt

SEQ ID NO: 12627 - DNA, 544 bp, Homo sapiens
agcagcagcagcagcggcggcagcggcgggcggccgcgcgggtgtttatgtcgggtcgcggggtctcgcggcagcatggcggactacctgatcagcggcggcaccggctacgtgcccgaggatgggctcaccgcgcagcagctcttcgccagcgccgacggcctcacctacaacgacttcctgattctcccaggattcatagacttcatagctgatgaggtggacctgacctcagccctgacccggaagatcacgctgaagacgccactgatctcctcccccatggacactgtgacagaggctgacatggccattgccatggctctgatgggaggtattggtttcattcaccacaactgcaccccagagttccaggccaacgaggtgcggaaggtcaaggcaagtaccaggcctgtccccagcaagatgccacctggcagtccccacctcagaggccctcccagcctcccctgccagccctgcactgctacactccctgcgtgtccttcctctcagtggagccttggggccgagccctcatttt

SEQ ID NO: 12628 - DNA, 11573 bp, Homo sapiens
cgggactcgaccgggctgcgctcactgcccagccggggccccgggagcctccaggctcccgcccgccctgagctgcggcctccgcatggaggggccactcactccaccaccgctgcagggaggcggagccgccgctgttccggagcccggagcccggcaacacccgggacacgagacggcggcgcagcggtacagcgcccgactgctgcaggccggctacgagcccgagaggtgacgcccagggcagagcgcgcggggcgcatccggggcgggcggccgaggagggcgcggcggctccgggaacccggcgacgctgcgggggaggggcaggccccacaaacccttcccctattaccgcctcagcctctaacttcccgaaacgccacgctcccggctttggttgggggatgcagacgggcactgtgcgaagggttaggtgcttcgttgcacgggggagcggaggagagggaacaggtcgtaaaaaccttccctaaaatcttagccctagattggacctcgctacacacccgacgacaccccgttcaggtggctccaactcctggggttcaaacagtgcttgctggagtcctgtccgactgacttggcttacccctccttagctgtttcctcctagaactatcttcagtggtcttactggcaggtgttggtgtccagatggatcgccttcgcagggctaggtgaggacactctcccctcctcaccatgcactgagatctgagaggctgccagtgcagctcacctcaaggtctctccgaagacgcaggcccccatgctggggtctgtaggggaatgagggacactggaggaagagtagggtagtgagctgggccccagggggactggctgaaaaggagacagcagctaatctctggattgtatcgcagcttgaaatgcaatcccactgtccttccggtccagaggatttggacttctttctctgcccatctgctggtgttcagcagcttggggaggtgacctggcagctgggttagatgggggtggtctgggggaattagcccggcagctctgcccaggggttggccgcttatgtaagaacttttaacggcttaaggggctcctcggcagtggggctgctgagttaggcccccctgtcctggcaggctgcctctctagaattgactcaggcttaggcaactcccagcctttctcctgtcctagaaatccagctcctggggttcaggccgcagggcgatagggaggggccacaggggctgaatgagccggttggggcttgacagaggcagtgcttggttagagtaggggttgcaaacataatgtttcagagctcaggccggagccatgtgagtgcatcctttctccagattgcacttctgcatcaaggggccatccctacccccacccccaaccgacccgcaccccccacttgggctcagggagcctgtgtaaacctgagccccagccaggtggtgtagtgagattcaaaacctgctggccagacctccacctgccttcgccaacctggagctgtgggaagaggacaggattctgtgagcagtcctgggtttgaatccagtgttattgctctctggcttgaacttggacaggctatgcccccgacccagctcaacagtgctaatgttactaccttttctgcccttcccccatcttcccctcaagagtgttttgaaatcttgttccttcaaatagccccaggcctgatagagccctcggggttccctgcctggacctcagtacccagctgggcactgttgccctgctaccctgaggaaggggcttggacctgccttcctatccccacagctgctaggtgggggtctcagggaacaacagcccttcctcggcttcggaggccgactggttgcctcggtgtctcctccccatggaggaagcagctggggaagatcaggaagagggtgtatgagagtgggggttgagggtggattagcggagtctctggaaaagcacagcctaacccagggctgagcccagcagcttagagtgatgaggagcccaacacaggttaaagtgggaggtgtgtaggggagcaggagaggggagtggggccatgaagtctgtaatcactgggaaggtgaccctccccatgcctcagccaggcagcctaagaaggctggggcagatgtcacagtcaggtcacctgagatggtaaaatccagctgctctcctgggccctggctctggttgaatcctgaatagtactctagccattcctaactcatactgtaggggacagtgacccagagcaggtcctttagtgacccagtaacccagagagaccactgggctggtctctgctgtgtgccaatctctgctctgtgcctgcagttggcatgatagctctgttcttctgtggccagaaaggtaccccagagcagctctgaatggtcaggcactttctgtggctggtctcactgctctgctccacgtggccagtgaaaggtcctagtgctggtgctcctcaggacgctcccctggtcccccatgtggcccgggctccctgcatgagcccaagaatgctgaaggttcagaggtgcttcccacacatcgctggcaatccggccccagcctcccctctgcacacagatggaacagtctgtgttttcctggcagggtcccgggggcatcaatgggggaggctgggcatcccagggaacctcgtggcttggaggccaagcctcccctgggcctagctgccatcacactgctgagaagtaaataaacccagcctcccagggccacagccagccaccaagccagggaggggactgtgtcccacaccaccttattctcttctccccaagtgagctgtgggagccacaggaggacacagggaggaggctgtggagtctgggtggggggacccactcttggtctgggaagagcactggcagttctggtcccataagagggaaggggatctacttcctaccaccccacctttccccatgtgaacctatctgtacccagtcactgcccccatgtagaaatctggatcttgctgggcacccagggccaccaacttctgctttggggatttttcagaagttccctagcccctgttcttatttgtatgcacacttgtctaagccaggcttatgatcctcccccatcttcccaccgcaggaccctcccaaataacaaaccgctctctgagattaaaagccctggtaccaacaccattttctcagccggagatagggcggtgagccgaagcactgggccatgaatcagaagcagtacccctcccttcctttccgaactatagattttgcctctgtcaagggaatgggtacccaatacttgtcaattaatagattgtggagttaatgtgctcatttatgaaaaatgctttgtaaactgcagagggccccaaggccacccaaaggtcaaggagtgtcattatgaagaatgccggctccctaggatgtcgggatggggcatagcgatccaacctcaaagtccttagtgctgggtagctgagagcccagaccggtttctcagggctccgggccttgatcagggtccgcggaagagtattggggattggggaacggcagaaccgtgttagaggtgccctggggagaagggcaaggtgggtggccccggctgggggagaactcgggggtggggggggtggggggtgtgggggtgtgggggggtggggcctctgctggggggtcctgggtggctggatgtagagcggcggagggggcgtgtcccggcctgacccggtactctcccccgcagccccacacctcctacccggtccgggcttgcggggtcgcagcgccgctgcaggcagctgggggcgtgcgcgcggcgcggctgagccctttgtgcggcgcgggcggaggcggcggtttccgcgggaggggcgagaagggcgggaggggcgggaggacagggcggcgccctggcccgccctgccgctgccgcagcccccgcccccgcccccggcccgcccggcccgcggcagcagcgtggccgcggcgcggcgtcagcagtagcagcagcagcagcggcggcagcggcgggcggccgcgcgggtgtttatgtcgggtcgcggggtctcgcggcagcatggcggactacctgatcagcggcggcaccggctacgtgcccgaggatgggctcaccgcgcagcagctcttcgccagcgccgacggcctcacctacaagtaagcgccgggtctcgtacccctaggtgcgcgcatccacgcgccgcgacccccgggccggccctgcacgtgcgcggctcccccggcgttccctgcccggtgcgagtgcctgctgtgggcgctgggggctgggcacgggaaggaaggaggcccgcgccggagcagacggacgtggcacggcgacaccgcggccctcagagccctgacccgtttctggccagatccgggttcggcctgtccccttcctcctctcagcggcatggaggggccctcgggcgtgtgggaactggagatgtgggcattatggggagacttttcccagccgctggtccaggacgccccctcccagcctcaccacgagggcagagggtccccggagccaagcttaagcagccgcttccgcatggccccaggagaggcccagccaggtggttggggtggcttcttttccaactgtctagtccagcgctttttccagttgtgtccctccctgcccacaggttggtattggtgcccctcccaaggcgcgaattattctgtgactgctacccctaagcccaccctacatggggttttggaggaggacacagacccacccgtctgcctctggcttcatttgccttttccgtggtccctaggccagttgccctgcgtgctgcaggcctggcactagctctgcctcctggctgcaggactgtgcccctgccaggaaggagcatcagaaggggcagagtggggatgctggccagtcaaaagcatccctgccttgtctcctgccagccctgccctggcttgtaagcactcctgcttggccagcagtttccctaaacaccaggatacccagtcactcctgaggagtgtctcctcctgcctgcccgtaggcgacgggtgtatagaacacctagaaaatgctatgaggcccagactccagcatttcttctgtggcctctttgctatacagaagaagggctgccaaaggctgggagcagccgaaattctttgtttttttggtggtctttggtgatgagattgaaagcccacctttgatacagttgtcattgaagtcttctaggagaacaccctaggggaacgcctaggagtttctctaggccttagggcagattaatgacccacccccctccaccctgtggcttttccttcctgcgctagggatgcctgctgctttgcttagctcagttcatagtgttcctgaagtgtgggatatttgcttttgggtgtgtctctcaaggcctgctgtgattttagcaggttggggcccctgagctgtgaccctgcacctagatgtacccatgcaggcctgcacttcccttgcggagtttgctgtgaccgtggcccaccctagtgttggtagctgccatgctttggctggggacccagtgtcctggtcccacctctaaggcctctttcctcccctttcccgtcctggccatttctgttctgctctgtcagaacatgccctgcactcagccccctggggtccctccatgctgttccgagccctgtgtgactcagcagcccaggcaccggggcatgcggactgtcctgtgctgggtcatgttcatactgtgttgagcgccacaaaattgttctcaggtttgttcccaatgtttacttattttctctccccatcaagattgagaagttttcaaaggcaggcactgtgtctgctgtgtgtggcgatatgggaacttctgtgtcgcttgacaaactctgagacttaaaggcaatggatattttgggcctattaccttgatggtaccccagtagacctttcgctgtctttggctctagctctgggggctggagtttgccagactctagtgaggtgcacgaggtgggaactgccctgatggggcagtagggatggggggctgtagcctctgctcctctaggcttttctgtacccccctgctgcctcctctggcatggcaggctctgcccctttggggcacccctccccactaataacactcacttctctgtcttcacagcgacttcctgattctcccaggattcatagacttcatagctgatgaggtggtgagtacctcttcctttgacaaggggagggggctgtgtatgtggtggaagaggctgacttcttgctcaggggcagggcatggagagatggagagacttttcttgggaatgggtggataggatatagtcctttttttttttttttttggagacagagtcttgctctgtcacacaggctggagtgcagtggtgtgatctcagctcactgcagcctccacctcccagattcaagtgattctcctgcctcagcctcctgagtaactgggattacaggcacatgccaaaaccccccgataatttttgtgtttttagtggagacggggtttcaccatgttggccaggctggtctcaaactcctgagctcaagtgatccgtccgcctcagcctccgaagacgctgtgattacaggggtgattccacccagctggtatgggtggatatagcctttattgttgccagagaaacaggcagagatcaaagggttatacctgatggggcagaggcagctatgggaacacaggagtgtcctgagtgaggcctggcccagggctgggtggctctctgtcagtgacagagcctgtgggcaggttcagaagaggcctgggaaggggtgggcttgggagtgggaacggtgggcttgggagtggctgccttattgtagagaccataaggattggattttgtctggaatgctgaacaaggacatgatagaagccagtgaaattatggagatttgaaaccggtagacagacttgttcactgatccacaatgtacaagaactggcaagagggtttaaaagagttacattttggataaatacaaggaaacgcagtgccttgctttcccagaggggctcatcagtgagccgaatcaatgaacaattaacatatgataaactcagagaagcccagatgggtagtgatgatggtgtaagtcatttcaagaaaaagtgccatgattcaatgatgaattcatatacattaaaaaaaaaacatttcttttctgttgctattattattgctatttattctggtctgattctcatgaaaggccagagggcctgagtgtgcctggatcacttacatgtgagggaagttcacatccagctggtgtttagccagagctgacccagacagattttcagggggaaattcgaatgattctggttgtttcccttatgacaacaaccaggaagcctgcttggtgcagctgttcagtttaacaaagtttactggccagtgtggctttgtgtcagaccctgggctggctgctaggaagggagggattgaaaagacccctaccagctgggcgtggtggctcatgcctgtaatcccagcattttgggaggctgaggcaggaggatcacctgaggtcaggagtttgagaccagcctggccaacatggtgaaaccccatctctactaaaaatgcaaaaattagctgggcattgtggcgggcatctgtaatcccagctactcgggaggctgaggcaggagaatcacttgaatctgggaggcggaggttgcagtgagtcgggattgcactactgtactctagcctgggtgacagaatgaggctccatcagagagagaaaaaaaaaaaaaccctgcctggccggcaaggatctccttgtcctgtggcttctgtcaggaaggctgtggcccttctgtggcatgacaaaagagaagatggtgttttctagatcatggggccagaggtctgaactagggttagtgatgggtttcagggactttgaatctaaaaaaattacatagcaaagtctgcacaaatgtcttggggactgggatccactactgttggcctgaccctcagaggggtatgtgctctggcctttcctccatgggcaggtggcttttaaatggatacttgcaatcctgaccactctcctgagctccagaccattcgttgcttgctttcctggatgcctaaaagactcttttccatgcctacccccacctcagcccttgtcacccagaatccattctccaccttggagcctgagtgacctttttgaaacataaatcagatcatttctctgtcaagaccctccagtggcttctctccgaatcaaatctgagcttctgtccgtggtcttcacggccatgcatgctgcccctgccttcctcctgcctctcccttccctccactcccctggccttctttttctttcttaagtgtgcctccgaaagaactggaccctgaggcgggtttgcactcagtccctcagccgagagtgacagcccctctgacttctacttaatcggctcccactggtcacctcccaggaaagaggctttccccagtcaccttgttgccagtggtcgcttggcctttttgtttttctctgcagccttcatcctgactgaagtcatcttgagcatatgtcctgtgtctgtcatttttctttccaagtagaacataagctccattagatgagctgggaactcatccaccttgttcactgccatgtccccagggcctgtcctggtgccggtgcatgtaggagctcagtgagtgagtgtccagtgggtgataaactctttacgtgggctgtgcctccatcctcaggacctgacctcagccctgacccggaagatcacgctgaagacgccactgatctcctcccccatggacactgtgacagaggctgacatggccattgccatggctgtgagttacacacctgcatggggactccagggcacacaggaactgaccatggtgggctgtgctgaggggcagggctgaggaggaatgggccccggctctgaccacacttcccttctacatcagctgatgggaggtattggtttcattcaccacaactgcaccccagagttccaggccaacgaggtgcggaaggtcaaggcaagtaccaggcctgtccccagcaagatgccacctggcagtccccacctcagaggccctcccagcctcccctgccagccctgcactgctacactccctgcgtgtccttcctctcagtggagccttggggccgagccctcattttcccactggctcctcatcccactgagggtcctggcttctctgcagcacagctgcatcctctgttccctgtggccagcctggacatcatccctggctttcttccagccttttcctcccccatctctgcccgcagaagtttgaacagggcttcatcacggaccctgtggtgctgagcccctcgcacactgtgggcgatgtgctggaggccaagatgcggcatggcttctctggcatccccatcactgagacgggcaccatgggcagcaagctggtgggcatcgtcacctcccgagacatcgactttcttgctgagaaggaccacaccaccctcctcagtgaggtacctgcagggcaggggaagcagggctgggtgtagagaggaccctcacgctggggcctcagactggtgcctgtgaccagggaccagagggaggcctggctccttctctctcacctgccaacctgcaggcaaatgttcctggccccacaggtgatgacgccaaggattgaactggtggtggctccagcaggtgtgacgttgaaagaggcaaatgagatcctgcagcgtagcaagaaaggtaccagggagctagttgaaaactcaacccccagcctgactccctgtccacagtcccgttgttccttcacagccttacaggttatcccagcaaccagactgagccctggggaaggttcgaataacctcaggcaggccagagcacaactcctgccatccttctcttagcttagggaagcttgcccctagtgcagcatcttcatagtatgtttcccaaaactagtcctatgcgatgctcatcagaaaaaaatcctgagcaataactcctttctctatcccctatcttgcataaagaattgcacattcacttattaaaggctctcagaagtcctgcagttaaatttatttgacactagagctgtttttataatattttccagctagaaacaactttagcttttttttttttgagacagagtctcactttctcacccaggctggagtacagtggcgcaatgtcagctcactgcaaccctcgcctcctgggttcaagcaattctcatgcctcagccttctgagtagccaggattacaggcatgtgctactataccagctaattttttttttttttttgtatttttagtagagatggggtttcaccatgttggccaggctggtcttgaactcctggcctcaagtgatctgccctcctgggcctcccaaagtgctggaattacaggcgtgaaccaccatgccctgccacaactttggcttctatttatttatttttgagacagagtcttgctctctcatccaggctggagtgcagtggtgtgatcttggctcactgcaatctctgcctcctgggttcaagcaagtctcctacctcagcctcccgagtagttgggacaacaggcacacaccaacacacccaggtaatttttttgtatttttagtagagatggggtttcaccatattggccgggctgttcttgaactcctggcctcaagtgatccacctgcctcggcctcccaaagtgaggaagctgtgagccaccacacccggccaactttcgcttgttagaaaaaaaaaggaaaaattaaatattcaccaggtccctgttggctatactgggaaatgcttccctggtccatactggagggttctttggtgtctgtattggacagggcacatgcttctccctgcaggacagcatcactcctggctaggagatttcggccactgtggcccagcaggtgaaaggctgccagtgctcgggctgcccatcccaggccacggggatgcccatccacagacccccaggaacctgctgggctgaaagatttctttgctccctgttccttgggaagagggctaggtccctaggaacacttcctgggggcggtgctgtcacctagtggctgactggggtacttcagtggaatctctggagtggtccactttcatcttcaccctcctaaacatctcccaaacttctccccaccaagcctgcttcatttcacccctgcattccttgtcagggaagctgcctatcgtcaatgattgcgatgagctggtggccatcatcgcccgcaccgacctgaagaagaaccgagactaccctctggcctccaaggattcccagaagcagctgctctgtggggcagctgtgggcacccgtgaggatgacaaataccgtctggacctgctcacccaggcgggcgtcgacgtcatagtcttg

SEQ ID NO: 12629 - DNA, 952 bp, Homo sapiens
cgggactcgaccgggctgcgctcactgcccagccggggccccgggagcctccaggctcccgcccgccctgagctgcggcctccgcatggaggggccactcactccaccaccgctgcagggaggcggagccgccgctgttccggagcccggagcccggcaacacccgggacacgagacggcggcgcagcggtacagcgcccgactgctgcaggccggctacgagcccgagagcgacttcctgattctcccaggattcatagacttcatagctgatgaggtggacctgacctcagccctgacccggaagatcacgctgaagacgccactgatctcctcccccatggacactgtgacagaggctgacatggccattgccatggctctgatgggaggtattggtttcattcaccacaactgcaccccagagttccaggccaacgaggtgcggaaggtcaagaagtttgaacagggcttcatcacggaccctgtggtgctgagcccctcgcacactgtgggcgatgtgctggaggccaagatgcggcatggcttctctggcatccccatcactgagacgggcaccatgggcagcaagctggtgggcatcgtcacctcccgagacatcgactttcttgctgagaaggaccacaccaccctcctcagtgaggtgatgacgccaaggattgaactggtggtggctccagcaggtgtgacgttgaaagaggcaaatgagatcctgcagcgtagcaagaaagggaagctgcctatcgtcaatgattgcgatgagctggtggccatcatcgcccgcaccgacctgaagaagaaccgagactaccctctggcctccaaggattcccagaagcagctgctctgtggggcagctgtgggcacccgtgaggatgacaaataccgtctggacctgctcacccaggcgggcgtcgacgtcatagtcttg

SEQ ID NO: 12630 - DNA, 17960 bp, Homo sapiens
tcggaaggggccaggagacactggaaggtccggacggcagggaaggggacggggttctttccagtcccacccgtgtagggacacctctccccctcatcccccgatgtaccctcgctgaatctgggatgggagagacgaaccgagtctaggcatctgcgtagcagcgccggggagagcggggagcccagggcggagcccagtcgactcccggattcccctgccccgcccccggcacgaggccccgccccggcggccccgcccctcctcgggactcgaccgggctgcgctcactgcccagccggggccccgggagcctccaggctcccgcccgccctgagctgcggcctccgcatggaggggccactcactccaccaccgctgcagggaggcggagccgccgctgttccggagcccggagcccggcaacacccgggacacgagacggcggcgcagcggtacagcgcccgactgctgcaggccggctacgagcccgagaggtgacgcccagggcagagcgcgcggggcgcatccggggcgggcggccgaggagggcgcggcggctccgggaacccggcgacgctgcgggggaggggcaggccccacaaacccttcccctattaccgcctcagcctctaacttcccgaaacgccacgctcccggctttggttgggggatgcagacgggcactgtgcgaagggttaggtgcttcgttgcacgggggagcggaggagagggaacaggtcgtaaaaaccttccctaaaatcttagccctagattggacctcgctacacacccgacgacaccccgttcaggtggctccaactcctggggttcaaacagtgcttgctggagtcctgtccgactgacttggcttacccctccttagctgtttcctcctagaactatcttcagtggtcttactggcaggtgttggtgtccagatggatcgccttcgcagggctaggtgaggacactctcccctcctcaccatgcactgagatctgagaggctgccagtgcagctcacctcaaggtctctccgaagacgcaggcccccatgctggggtctgtaggggaatgagggacactggaggaagagtagggtagtgagctgggccccagggggactggctgaaaaggagacagcagctaatctctggattgtatcgcagcttgaaatgcaatcccactgtccttccggtccagaggatttggacttctttctctgcccatctgctggtgttcagcagcttggggaggtgacctggcagctgggttagatgggggtggtctgggggaattagcccggcagctctgcccaggggttggccgcttatgtaagaacttttaacggcttaaggggctcctcggcagtggggctgctgagttaggcccccctgtcctggcaggctgcctctctagaattgactcaggcttaggcaactcccagcctttctcctgtcctagaaatccagctcctggggttcaggccgcagggcgatagggaggggccacaggggctgaatgagccggttggggcttgacagaggcagtgcttggttagagtaggggttgcaaacataatgtttcagagctcaggccggagccatgtgagtgcatcctttctccagattgcacttctgcatcaaggggccatccctacccccacccccaaccgacccgcaccccccacttgggctcagggagcctgtgtaaacctgagccccagccaggtggtgtagtgagattcaaaacctgctggccagacctccacctgccttcgccaacctggagctgtgggaagaggacaggattctgtgagcagtcctgggtttgaatccagtgttattgctctctggcttgaacttggacaggctatgcccccgacccagctcaacagtgctaatgttactaccttttctgcccttcccccatcttcccctcaagagtgttttgaaatcttgttccttcaaatagccccaggcctgatagagccctcggggttccctgcctggacctcagtacccagctgggcactgttgccctgctaccctgaggaaggggcttggacctgccttcctatccccacagctgctaggtgggggtctcagggaacaacagcccttcctcggcttcggaggccgactggttgcctcggtgtctcctccccatggaggaagcagctggggaagatcaggaagagggtgtatgagagtgggggttgagggtggattagcggagtctctggaaaagcacagcctaacccagggctgagcccagcagcttagagtgatgaggagcccaacacaggttaaagtgggaggtgtgtaggggagcaggagaggggagtggggccatgaagtctgtaatcactgggaaggtgaccctccccatgcctcagccaggcagcctaagaaggctggggcagatgtcacagtcaggtcacctgagatggtaaaatccagctgctctcctgggccctggctctggttgaatcctgaatagtactctagccattcctaactcatactgtaggggacagtgacccagagcaggtcctttagtgacccagtaacccagagagaccactgggctggtctctgctgtgtgccaatctctgctctgtgcctgcagttggcatgatagctctgttcttctgtggccagaaaggtaccccagagcagctctgaatggtcaggcactttctgtggctggtctcactgctctgctccacgtggccagtgaaaggtcctagtgctggtgctcctcaggacgctcccctggtcccccatgtggcccgggctccctgcatgagcccaagaatgctgaaggttcagaggtgcttcccacacatcgctggcaatccggccccagcctcccctctgcacacagatggaacagtctgtgttttcctggcagggtcccgggggcatcaatgggggaggctgggcatcccagggaacctcgtggcttggaggccaagcctcccctgggcctagctgccatcacactgctgagaagtaaataaacccagcctcccagggccacagccagccaccaagccagggaggggactgtgtcccacaccaccttattctcttctccccaagtgagctgtgggagccacaggaggacacagggaggaggctgtggagtctgggtggggggacccactcttggtctgggaagagcactggcagttctggtcccataagagggaaggggatctacttcctaccaccccacctttccccatgtgaacctatctgtacccagtcactgcccccatgtagaaatctggatcttgctgggcacccagggccaccaacttctgctttggggatttttcagaagttccctagcccctgttcttatttgtatgcacacttgtctaagccaggcttatgatcctcccccatcttcccaccgcaggaccctcccaaataacaaaccgctctctgagattaaaagccctggtaccaacaccattttctcagccggagatagggcggtgagccgaagcactgggccatgaatcagaagcagtacccctcccttcctttccgaactatagattttgcctctgtcaagggaatgggtacccaatacttgtcaattaatagattgtggagttaatgtgctcatttatgaaaaatgctttgtaaactgcagagggccccaaggccacccaaaggtcaaggagtgtcattatgaagaatgccggctccctaggatgtcgggatggggcatagcgatccaacctcaaagtccttagtgctgggtagctgagagcccagaccggtttctcagggctccgggccttgatcagggtccgcggaagagtattggggattggggaacggcagaaccgtgttagaggtgccctggggagaagggcaaggtgggtggccccggctgggggagaactcgggggtggggggggtggggggtgtgggggtgtgggggggtggggcctctgctggggggtcctgggtggctggatgtagagcggcggagggggcgtgtcccggcctgacccggtactctcccccgcagccccacacctcctacccggtccgggcttgcggggtcgcagcgccgctgcaggcagctgggggcgtgcgcgcggcgcggctgagccctttgtgcggcgcgggcggaggcggcggtttccgcgggaggggcgagaagggcgggaggggcgggaggacagggcggcgccctggcccgccctgccgctgccgcagcccccgcccccgcccccggcccgcccggcccgcggcagcagcgtggccgcggcgcggcgtcagcagtagcagcagcagcagcggcggcagcggcgggcggccgcgcgggtgtttatgtcgggtcgcggggtctcgcggcagcatggcggactacctgatcagcggcggcaccggctacgtgcccgaggatgggctcaccgcgcagcagctcttcgccagcgccgacggcctcacctacaagtaagcgccgggtctcgtacccctaggtgcgcgcatccacgcgccgcgacccccgggccggccctgcacgtgcgcggctcccccggcgttccctgcccggtgcgagtgcctgctgtgggcgctgggggctgggcacgggaaggaaggaggcccgcgccggagcagacggacgtggcacggcgacaccgcggccctcagagccctgacccgtttctggccagatccgggttcggcctgtccccttcctcctctcagcggcatggaggggccctcgggcgtgtgggaactggagatgtgggcattatggggagacttttcccagccgctggtccaggacgccccctcccagcctcaccacgagggcagagggtccccggagccaagcttaagcagccgcttccgcatggccccaggagaggcccagccaggtggttggggtggcttcttttccaactgtctagtccagcgctttttccagttgtgtccctccctgcccacaggttggtattggtgcccctcccaaggcgcgaattattctgtgactgctacccctaagcccaccctacatggggttttggaggaggacacagacccacccgtctgcctctggcttcatttgccttttccgtggtccctaggccagttgccctgcgtgctgcaggcctggcactagctctgcctcctggctgcaggactgtgcccctgccaggaaggagcatcagaaggggcagagtggggatgctggccagtcaaaagcatccctgccttgtctcctgccagccctgccctggcttgtaagcactcctgcttggccagcagtttccctaaacaccaggatacccagtcactcctgaggagtgtctcctcctgcctgcccgtaggcgacgggtgtatagaacacctagaaaatgctatgaggcccagactccagcatttcttctgtggcctctttgctatacagaagaagggctgccaaaggctgggagcagccgaaattctttgtttttttggtggtctttggtgatgagattgaaagcccacctttgatacagttgtcattgaagtcttctaggagaacaccctaggggaacgcctaggagtttctctaggccttagggcagattaatgacccacccccctccaccctgtggcttttccttcctgcgctagggatgcctgctgctttgcttagctcagttcatagtgttcctgaagtgtgggatatttgcttttgggtgtgtctctcaaggcctgctgtgattttagcaggttggggcccctgagctgtgaccctgcacctagatgtacccatgcaggcctgcacttcccttgcggagtttgctgtgaccgtggcccaccctagtgttggtagctgccatgctttggctggggacccagtgtcctggtcccacctctaaggcctctttcctcccctttcccgtcctggccatttctgttctgctctgtcagaacatgccctgcactcagccccctggggtccctccatgctgttccgagccctgtgtgactcagcagcccaggcaccggggcatgcggactgtcctgtgctgggtcatgttcatactgtgttgagcgccacaaaattgttctcaggtttgttcccaatgtttacttattttctctccccatcaagattgagaagttttcaaaggcaggcactgtgtctgctgtgtgtggcgatatgggaacttctgtgtcgcttgacaaactctgagacttaaaggcaatggatattttgggcctattaccttgatggtaccccagtagacctttcgctgtctttggctctagctctgggggctggagtttgccagactctagtgaggtgcacgaggtgggaactgccctgatggggcagtagggatggggggctgtagcctctgctcctctaggcttttctgtacccccctgctgcctcctctggcatggcaggctctgcccctttggggcacccctccccactaataacactcacttctctgtcttcacagcgacttcctgattctcccaggattcatagacttcatagctgatgaggtggtgagtacctcttcctttgacaaggggagggggctgtgtatgtggtggaagaggctgacttcttgctcaggggcagggcatggagagatggagagacttttcttgggaatgggtggataggatatagtcctttttttttttttttttggagacagagtcttgctctgtcacacaggctggagtgcagtggtgtgatctcagctcactgcagcctccacctcccagattcaagtgattctcctgcctcagcctcctgagtaactgggattacaggcacatgccaaaaccccccgataatttttgtgtttttagtggagacggggtttcaccatgttggccaggctggtctcaaactcctgagctcaagtgatccgtccgcctcagcctccgaagacgctgtgattacaggggtgattccacccagctggtatgggtggatatagcctttattgttgccagagaaacaggcagagatcaaagggttatacctgatggggcagaggcagctatgggaacacaggagtgtcctgagtgaggcctggcccagggctgggtggctctctgtcagtgacagagcctgtgggcaggttcagaagaggcctgggaaggggtgggcttgggagtgggaacggtgggcttgggagtggctgccttattgtagagaccataaggattggattttgtctggaatgctgaacaaggacatgatagaagccagtgaaattatggagatttgaaaccggtagacagacttgttcactgatccacaatgtacaagaactggcaagagggtttaaaagagttacattttggataaatacaaggaaacgcagtgccttgctttcccagaggggctcatcagtgagccgaatcaatgaacaattaacatatgataaactcagagaagcccagatgggtagtgatgatggtgtaagtcatttcaagaaaaagtgccatgattcaatgatgaattcatatacattaaaaaaaaaacatttcttttctgttgctattattattgctatttattctggtctgattctcatgaaaggccagagggcctgagtgtgcctggatcacttacatgtgagggaagttcacatccagctggtgtttagccagagctgacccagacagattttcagggggaaattcgaatgattctggttgtttcccttatgacaacaaccaggaagcctgcttggtgcagctgttcagtttaacaaagtttactggccagtgtggctttgtgtcagaccctgggctggctgctaggaagggagggattgaaaagacccctaccagctgggcgtggtggctcatgcctgtaatcccagcattttgggaggctgaggcaggaggatcacctgaggtcaggagtttgagaccagcctggccaacatggtgaaaccccatctctactaaaaatgcaaaaattagctgggcattgtggcgggcatctgtaatcccagctactcgggaggctgaggcaggagaatcacttgaatctgggaggcggaggttgcagtgagtcgggattgcactactgtactctagcctgggtgacagaatgaggctccatcagagagagaaaaaaaaaaaaaccctgcctggccggcaaggatctccttgtcctgtggcttctgtcaggaaggctgtggcccttctgtggcatgacaaaagagaagatggtgttttctagatcatggggccagaggtctgaactagggttagtgatgggtttcagggactttgaatctaaaaaaattacatagcaaagtctgcacaaatgtcttggggactgggatccactactgttggcctgaccctcagaggggtatgtgctctggcctttcctccatgggcaggtggcttttaaatggatacttgcaatcctgaccactctcctgagctccagaccattcgttgcttgctttcctggatgcctaaaagactcttttccatgcctacccccacctcagcccttgtcacccagaatccattctccaccttggagcctgagtgacctttttgaaacataaatcagatcatttctctgtcaagaccctccagtggcttctctccgaatcaaatctgagcttctgtccgtggtcttcacggccatgcatgctgcccctgccttcctcctgcctctcccttccctccactcccctggccttctttttctttcttaagtgtgcctccgaaagaactggaccctgaggcgggtttgcactcagtccctcagccgagagtgacagcccctctgacttctacttaatcggctcccactggtcacctcccaggaaagaggctttccccagtcaccttgttgccagtggtcgcttggcctttttgtttttctctgcagccttcatcctgactgaagtcatcttgagcatatgtcctgtgtctgtcatttttctttccaagtagaacataagctccattagatgagctgggaactcatccaccttgttcactgccatgtccccagggcctgtcctggtgccggtgcatgtaggagctcagtgagtgagtgtccagtgggtgataaactctttacgtgggctgtgcctccatcctcaggacctgacctcagccctgacccggaagatcacgctgaagacgccactgatctcctcccccatggacactgtgacagaggctgacatggccattgccatggctgtgagttacacacctgcatggggactccagggcacacaggaactgaccatggtgggctgtgctgaggggcagggctgaggaggaatgggccccggctctgaccacacttcccttctacatcagctgatgggaggtattggtttcattcaccacaactgcaccccagagttccaggccaacgaggtgcggaaggtcaaggcaagtaccaggcctgtccccagcaagatgccacctggcagtccccacctcagaggccctcccagcctcccctgccagccctgcactgctacactccctgcgtgtccttcctctcagtggagccttggggccgagccctcattttcccactggctcctcatcccactgagggtcctggcttctctgcagcacagctgcatcctctgttccctgtggccagcctggacatcatccctggctttcttccagccttttcctcccccatctctgcccgcagaagtttgaacagggcttcatcacggaccctgtggtgctgagcccctcgcacactgtgggcgatgtgctggaggccaagatgcggcatggcttctctggcatccccatcactgagacgggcaccatgggcagcaagctggtgggcatcgtcacctcccgagacatcgactttcttgctgagaaggaccacaccaccctcctcagtgaggtacctgcagggcaggggaagcagggctgggtgtagagaggaccctcacgctggggcctcagactggtgcctgtgaccagggaccagagggaggcctggctccttctctctcacctgccaacctgcaggcaaatgttcctggccccacaggtgatgacgccaaggattgaactggtggtggctccagcaggtgtgacgttgaaagaggcaaatgagatcctgcagcgtagcaagaaaggtaccagggagctagttgaaaactcaacccccagcctgactccctgtccacagtcccgttgttccttcacagccttacaggttatcccagcaaccagactgagccctggggaaggttcgaataacctcaggcaggccagagcacaactcctgccatccttctcttagcttagggaagcttgcccctagtgcagcatcttcatagtatgtttcccaaaactagtcctatgcgatgctcatcagaaaaaaatcctgagcaataactcctttctctatcccctatcttgcataaagaattgcacattcacttattaaaggctctcagaagtcctgcagttaaatttatttgacactagagctgtttttataatattttccagctagaaacaactttagcttttttttttttgagacagagtctcactttctcacccaggctggagtacagtggcgcaatgtcagctcactgcaaccctcgcctcctgggttcaagcaattctcatgcctcagccttctgagtagccaggattacaggcatgtgctactataccagctaattttttttttttttttgtatttttagtagagatggggtttcaccatgttggccaggctggtcttgaactcctggcctcaagtgatctgccctcctgggcctcccaaagtgctggaattacaggcgtgaaccaccatgccctgccacaactttggcttctatttatttatttttgagacagagtcttgctctctcatccaggctggagtgcagtggtgtgatcttggctcactgcaatctctgcctcctgggttcaagcaagtctcctacctcagcctcccgagtagttgggacaacaggcacacaccaacacacccaggtaatttttttgtatttttagtagagatggggtttcaccatattggccgggctgttcttgaactcctggcctcaagtgatccacctgcctcggcctcccaaagtgaggaagctgtgagccaccacacccggccaactttcgcttgttagaaaaaaaaaggaaaaattaaatattcaccaggtccctgttggctatactgggaaatgcttccctggtccatactggagggttctttggtgtctgtattggacagggcacatgcttctccctgcaggacagcatcactcctggctaggagatttcggccactgtggcccagcaggtgaaaggctgccagtgctcgggctgcccatcccaggccacggggatgcccatccacagacccccaggaacctgctgggctgaaagatttctttgctccctgttccttgggaagagggctaggtccctaggaacacttcctgggggcggtgctgtcacctagtggctgactggggtacttcagtggaatctctggagtggtccactttcatcttcaccctcctaaacatctcccaaacttctccccaccaagcctgcttcatttcacccctgcattccttgtcagggaagctgcctatcgtcaatgattgcgatgagctggtggccatcatcgcccgcaccgacctgaagaagaaccgagactaccctctggcctccaaggattcccagaagcagctgctctgtggggcagctgtgggcacccgtgaggatgacaaataccgtctggacctgctcacccaggcgggcgtcgacgtcatagtcttggtaaggcccccgcctgagtggtgggggagatggatgagtggttcagcagagtggaggtttatgaggacccaggttcacctctgattaagcctgtgcccctcccttgctactcttcctctctctttctgagtgctccctggtgtcagaattaggagggtggcagcaggattgcctgagctcagaggttcaaggtcacagtgagctaggatcgtgccactgcactccagccctggggacagaacgagaccctttctcaaaaaacaaacaatggtttgtgtcatctgagatacaaagaaagaaaacaaacaagttaaaattctccagtggcacagccataagaaagaatgaaatcctgtcctttgcagcaacatggacagagctagaagccattatccttagtgaactaactccaaagcagaaaaccaaatactgcatgccctcacttataagtaggagctaaacagagagtacacatgttcataaagatggaaataatagacgctggggactccaaaatgggagagggtgggaggggaacgaaggatgaaaaattggctatcagacacagttttcgatatgtgggtattaggtacacttgaagcccaattctcaccagtatgcagtattccatttaagcaacaagcacatgtacccactgaatccttaaaaaaaaaattgacaaattgttgcaagcaacaattgcaaatcaagactctcccccaccccccgataaagggaggtagaataaagataaaggcttattgatcccttgtgagtgatctggaccatacatctagattcatctgtattctataactaggaggaagagaaattaggaaggtcactggcaccctctcaacagctcacaacagactgcaaacaaaggcctctgagggccttcttggctcataagttgaccctgataatttagctcacgtttactgagaaccgcctgtttgccaggcactgcgtcaagaccttaatgtatatcagtccattgaggaacagtcgccattccattttcagatgaagaaacaggcttaaagaagttaagtcatttcatttggttagtgagttggtgggaacaggatatggctccaggcagtgtctccttgctttaaggatcagtctgtacaatggataggaaaggccttatgtactctaagactgcattagttgtggttaacctttcagggaagcagtcccctttgagaattgactgaaagttgtcaagtgaatttccagaaaaaaaaaaaaaaaaacaaccagaaggaaagagcattctcataacagttttcataggatttgaggggttcatccactcaggctctccctcctgccttgagaatcctcagctgtctaagcccaagctcttccgtcctttctcacaggactcgtcccaagggaattcggtgtatcagatcgccatggtgcattacatcaaacagaagtacccccacctccaggtgattggggggaacggtgagtgcggggtcgcctcccacccgcctgctcctgcccctccaatgagtaacccttttctgtccttcagcatccctaggtgatggtatggctcctggcatgggtggcagggagcatgatgggctttggtcactgtaggggggttggggggtgctagactggggtcccaagaggctgttgggcaggcaggggcatcccatcctcacattgttcctctgccccatccccacccccagtggtgacagcagcccaggccaagaacctgattgatgctggtgtggacgggctgcgcgtgggcatgggctgcggctccatctgcatcacccaggaaggtgggtgtcaggaggtgagcgagtgcccgctggccccggggcctcgcctttgttccccagatgtatatcaagtactctctctgccaggccctgttctgccatggtaggctccggggtgacccaggcatgggccccaccccatcgggcccactgacttaggggaaggcaggtgtaagcagggtgcaagagctgcagcctgcttctcagagtgcggtcaagggggctctgcctggggcttggggcctggggctggtgtgactgtccatggggcttgttggaacctcagggtttggatttgatttgtgacaaggcagatatttaagacacagagacgacatgtccctgaatatataaagatatgttatacacctgcttcaccatgtggttgggcgtggggagttccacccaattacaaagcccttttgcagggtgggttcctgaacatgaagtgggaaggggggagcctggcatgtgtcccccatgtggttattgaggaggtgctccctggaggctggtatctgacttgtggggtggctgcctggaagacttgggtcctcacttggcctgaggagatgtacccggcccctcctgtgagggcaatttctccaaaacactgagtgatgcatttggcctttcctaccccaaacagctcccccttttggtcctcagagcctctgctatttaggtttgtgcccttcgccttaggtggccaccatggtgaaatgagggccctctctcacccacttaacaaatattcattaggcacctacttgtctcaggcactgttcaaagctttgaggtagagtagggacaaaacaaatgagaggcgccatctctggtttatccagctttgcatccgtccctagacaggtgtggttccttgtagtccccacctaaaacctaacactgaaggaccttggacacttagacttgaagaaatgcaaaccagtatcccaaaggggaccatagtacctaaccctggtaacggtttttgcaaacaaaagccttgaaggggaacttgtgccttgagagcaggtgaggctggggccacctgtctgggggcattgggctctgaaggccgcttctggttcccccgtcagaatcccctgtcatgctcttaggggtggggtggcccagatccctagagtgacactcatcctggtggtatttgccagcacctatgttatgcctcagacacaccatccagccctgtcccttttcctgagtagaggtagtgcacaggaggaagagctgggctggccccgctccaggccccggagttgctgttgactcttctctgccttgtgcaccccaccctcccccagtgatggcctgtggtcggccccagggcactgctgtgtacaaggtggctgagtatgcccggcgctttggtgtgcccatcatagccgatggcggcatccagaccgtgggacacgtggtcaaggccctggcccttggagcctccacaggtgaggggagaatgtgctggggattgggcaggcgagggctggaagctgggggggtggcactagtgggctggaggcactaatcccttgcccactgtagtgatgatgggctccctgctggccgccactacggaggcccctggcgagtacttcttctcagacggggtgcggctcaagaagtaccggggcatgggctcactggatgccatggagaagagcagcagcagccagaaacgatacttcaggttccctgaccctgggccccacctgggcagatcagcccacaacccttcagggcccgctcatgccaccgacttccccagatggcagccagtccccatatggtggttctggaaactgaggcacagggcttaagtagcagacccaggatctgtccctgggccatctgactcagcccagtgaggggtggcctgggggaccttcctgggcggtatcccgtttttgcccttaagaggtggggtggggtcctctgagcttcaagctgctgggctcagtcttccaccctccacgcagcgagggggataaagtgaagatcgcgcagggtgtctcgggctccatccaggacaaaggatccattcagaagttcgtgccctacctcatagcaggcatccaacacggctgccaggatatcggggcccgcagcctgtctgtccttcggtgagtgctgagactgggggtggctcctgcttcctttctctcgctcttctccacccttggtggccctgatctgctccacctaccttcctcctaggtccatgatgtactcaggagagctcaagtttgagaagcggaccatgtcggcccagattgagggtggtgtccatggcctgcactcgtaagtgtggtggcctccttgctgtcacttggaggcagtgggttgggcaggtggggccagggttctgaggtcaagctgaggttccagggaccccatggaccacctgcagcagggacagatgctgctgcaggatggcccctcaccctctcttcgggggcccagccccctgttccttgtcctttagtccccatgcaagcaggccctcccctcccctcgggcctctcccgagcagggcacaggaggtgtggccagtcactgcacctggactcccagcccttgcttgctcaggaagcttggtggctggtggcaggggctgtggtggcaccaggcagccaggcagaagatgcgggtgtgacccctctggcgggtacaagggcagagagatggacgccagggccagcgctggggcaaccgtgggcgggggcagtgctcgttggcagcagtagttgcaggcatgtgccccaccctggtcaggagccctgtccccaggtatcagcgggcgtctaacctgtgtctctttccgccccacccttccgtagctatacctttctgccgtgtaagtaaccgcgctgcccgggccaagcgtagagtagagcaggggcagtctgggtgggacctgggctggaggtgggggtgggtattgggtgggggtaggagggtgctggggtgtaaccatgagatgtggaccctgggtttgggcccccccggccccctaactccaacaccatgatggaggaaaccagcagtgtcccctcatccagctgaaacacatatccctttctggctgcagagagatgcccgtgacctcaggcctaaggctgccccattttagactggacccagtgaccacaagcagcctaggccactgtgcctgcagggctggggctgggtgcggacatgggcagcagaggttcggctccaggttggagtttgctccatgaggatgggccatgcctgcctgagctgtccctccaccctgggcactgaggacatccactcagatgtggcgatggcccaaaggagcatggccatctctgcacccagcatggttcttcagggaatgctggcctgggggaggacagaggcctagggcctgctccaggccctcctcctgcgccgtacggctgagatctcagggcttctcagctctctgttctctcctacatctgggggccctggggaaagggttttgggaaggagcagggtccacacacccactcttgttccccctcttgccttgtccccacagttacgaaaagcggctgtactgaggacagcggtggaggccgaggtggtggaggggatgcaccccagtgtccacttttgggcacagcctccctccataactgagtggtccacagatttgcactacgggttctccagctcctttccaggcagagaggaggggaggtcctgaggggactgctgcccctcactcggcatcccctgcagagtcaggactgctcccggggccaggctgccctgggagcccccctccgagcccagccagccaggctctcaggccctgcgcctgcctcaggtctttcttgctgcagcctgctccagcctggcccccaccccaggggcaggcggcccctcctggcttctcctgtagggcacctccctgcccctagcctcccaggaaatggtgctctcctggccctgcctctggcccttcccgggccgctgcccctcagccatgtggcacttctgagctcctgacctaggccaaggggaggtctctgcccccttccccggccctgggctacccttgggtcctgctcctcaggccgctcccctgtccctggccatgggtaggagactgccctggtcatggccgcctgcctgtcattcctgactcaccaccgtccccaggtgaaccattcctcccttctcctcagctgcagtcgaaggctttaactttgcacacttgggatcacagttgcgtcattgtgtattaaatacttggaataaatcaagcaggt

SEQ ID NO: 12631 - DNA, 2862 bp, Homo sapiens
tcggaaggggccaggagacactggaaggtccggacggcagggaaggggacggggttctttccagtcccacccgtgtagggacacctctccccctcatcccccgatgtaccctcgctgaatctgggatgggagagacgaaccgagtctaggcatctgcgtagcagcgccggggagagcggggagcccagggcggagcccagtcgactcccggattcccctgccccgcccccggcacgaggccccgccccggcggccccgcccctcctcgggactcgaccgggctgcgctcactgcccagccggggccccgggagcctccaggctcccgcccgccctgagctgcggcctccgcatggaggggccactcactccaccaccgctgcagggaggcggagccgccgctgttccggagcccggagcccggcaacacccgggacacgagacggcggcgcagcggtacagcgcccgactgctgcaggccggctacgagcccgagagccctagattggacctcgctacacacccgacgacaccccgttcagaactatcttcagtggtcttactggcaggtgttggtgtccagatggatcgccttcgcagggctagcatggcggactacctgatcagcggcggcaccggctacgtgcccgaggatgggctcaccgcgcagcagctcttcgccagcgccgacggcctcacctacaacgacttcctgattctcccaggattcatagacttcatagctgatgaggtggacctgacctcagccctgacccggaagatcacgctgaagacgccactgatctcctcccccatggacactgtgacagaggctgacatggccattgccatggctctgatgggaggtattggtttcattcaccacaactgcaccccagagttccaggccaacgaggtgcggaaggtcaagtttgaacagggcttcatcacggaccctgtggtgctgagcccctcgcacactgtgggcgatgtgctggaggccaagatgcggcatggcttctctggcatccccatcactgagacgggcaccatgggcagcaagctggtgggcatcgtcacctcccgagacatcgactttcttgctgagaaggaccacaccaccctcctcagtgaggtgatgacgccaaggattgaactggtggtggctccagcaggtgtgacgttgaaagaggcaaatgagatcctgcagcgtagcaagaaagggaagctgcctatcgtcaatgattgcgatgagctggtggccatcatcgcccgcaccgacctgaagaagaaccgagactaccctctggcctccaaggattcccagaagcagctgctctgtggggcagctgtgggcacccgtgaggatgacaaataccgtctggacctgctcacccaggcgggcgtcgacgtcatagtcttggactcgtcccaagggaattcggtgtatcagatcgccatggtgcattacatcaaacagaagtacccccacctccaggtgattggggggaacgtggtgacagcagcccaggccaagaacctgattgatgctggtgtggacgggctgcgcgtgggcatgggctgcggctccatctgcatcacccaggaagtgatggcctgtggtcggccccagggcactgctgtgtacaaggtggctgagtatgcccggcgctttggtgtgcccatcatagccgatggcggcatccagaccgtgggacacgtggtcaaggccctggcccttggagcctccacagtgatgatgggctccctgctggccgccactacggaggcccctggcgagtacttcttctcagacggggtgcggctcaagaagtaccggggcatgggctcactggatgccatggagaagagcagcagcagccagaaacgatacttcagcgagggggataaagtgaagatcgcgcagggtgtctcgggctccatccaggacaaaggatccattcagaagttcgtgccctacctcatagcaggcatccaacacggctgccaggatatcggggcccgcagcctgtctgtccttcggtccatgatgtactcaggagagctcaagtttgagaagcggaccatgtcggcccagattgagggtggtgtccatggcctgcactcttacgaaaagcggctgtactgaggacagcggtggaggccgaggtggtggaggggatgcaccccagtgtccacttttgggcacagcctccctccataactgagtggtccacagatttgcactacgggttctccagctcctttccaggcagagaggaggggaggtcctgaggggactgctgcccctcactcggcatcccctgcagagtcaggactgctcccggggccaggctgccctgggagcccccctccgagcccagccagccaggctctcaggccctgcgcctgcctcaggtctttcttgctgcagcctgctccagcctggcccccaccccaggggcaggcggcccctcctggcttctcctgtagggcacctccctgcccctagcctcccaggaaatggtgctctcctggccctgcctctggcccttcccgggccgctgcccctcagccatgtggcacttctgagctcctgacctaggccaaggggaggtctctgcccccttccccggccctgggctacccttgggtcctgctcctcaggccgctcccctgtccctggccatgggtaggagactgccctggtcatggccgcctgcctgtcattcctgactcaccaccgtccccaggtgaaccattcctcccttctcctcagctgcagtcgaaggctttaactttgcacacttgggatcacagttgcgtcattgtgtattaaatacttggaataaatcaagcaggt

SEQ ID NO: 12632 - DNA, 10905 bp, Homo sapiens
cgacttcctgattctcccaggattcatagacttcatagctgatgaggtggtgagtacctcttcctttgacaaggggagggggctgtgtatgtggtggaagaggctgacttcttgctcaggggcagggcatggagagatggagagacttttcttgggaatgggtggataggatatagtcctttttttttttttttttggagacagagtcttgctctgtcacacaggctggagtgcagtggtgtgatctcagctcactgcagcctccacctcccagattcaagtgattctcctgcctcagcctcctgagtaactgggattacaggcacatgccaaaaccccccgataatttttgtgtttttagtggagacggggtttcaccatgttggccaggctggtctcaaactcctgagctcaagtgatccgtccgcctcagcctccgaagacgctgtgattacaggggtgattccacccagctggtatgggtggatatagcctttattgttgccagagaaacaggcagagatcaaagggttatacctgatggggcagaggcagctatgggaacacaggagtgtcctgagtgaggcctggcccagggctgggtggctctctgtcagtgacagagcctgtgggcaggttcagaagaggcctgggaaggggtgggcttgggagtgggaacggtgggcttgggagtggctgccttattgtagagaccataaggattggattttgtctggaatgctgaacaaggacatgatagaagccagtgaaattatggagatttgaaaccggtagacagacttgttcactgatccacaatgtacaagaactggcaagagggtttaaaagagttacattttggataaatacaaggaaacgcagtgccttgctttcccagaggggctcatcagtgagccgaatcaatgaacaattaacatatgataaactcagagaagcccagatgggtagtgatgatggtgtaagtcatttcaagaaaaagtgccatgattcaatgatgaattcatatacattaaaaaaaaaacatttcttttctgttgctattattattgctatttattctggtctgattctcatgaaaggccagagggcctgagtgtgcctggatcacttacatgtgagggaagttcacatccagctggtgtttagccagagctgacccagacagattttcagggggaaattcgaatgattctggttgtttcccttatgacaacaaccaggaagcctgcttggtgcagctgttcagtttaacaaagtttactggccagtgtggctttgtgtcagaccctgggctggctgctaggaagggagggattgaaaagacccctaccagctgggcgtggtggctcatgcctgtaatcccagcattttgggaggctgaggcaggaggatcacctgaggtcaggagtttgagaccagcctggccaacatggtgaaaccccatctctactaaaaatgcaaaaattagctgggcattgtggcgggcatctgtaatcccagctactcgggaggctgaggcaggagaatcacttgaatctgggaggcggaggttgcagtgagtcgggattgcactactgtactctagcctgggtgacagaatgaggctccatcagagagagaaaaaaaaaaaaaccctgcctggccggcaaggatctccttgtcctgtggcttctgtcaggaaggctgtggcccttctgtggcatgacaaaagagaagatggtgttttctagatcatggggccagaggtctgaactagggttagtgatgggtttcagggactttgaatctaaaaaaattacatagcaaagtctgcacaaatgtcttggggactgggatccactactgttggcctgaccctcagaggggtatgtgctctggcctttcctccatgggcaggtggcttttaaatggatacttgcaatcctgaccactctcctgagctccagaccattcgttgcttgctttcctggatgcctaaaagactcttttccatgcctacccccacctcagcccttgtcacccagaatccattctccaccttggagcctgagtgacctttttgaaacataaatcagatcatttctctgtcaagaccctccagtggcttctctccgaatcaaatctgagcttctgtccgtggtcttcacggccatgcatgctgcccctgccttcctcctgcctctcccttccctccactcccctggccttctttttctttcttaagtgtgcctccgaaagaactggaccctgaggcgggtttgcactcagtccctcagccgagagtgacagcccctctgacttctacttaatcggctcccactggtcacctcccaggaaagaggctttccccagtcaccttgttgccagtggtcgcttggcctttttgtttttctctgcagccttcatcctgactgaagtcatcttgagcatatgtcctgtgtctgtcatttttctttccaagtagaacataagctccattagatgagctgggaactcatccaccttgttcactgccatgtccccagggcctgtcctggtgccggtgcatgtaggagctcagtgagtgagtgtccagtgggtgataaactctttacgtgggctgtgcctccatcctcaggacctgacctcagccctgacccggaagatcacgctgaagacgccactgatctcctcccccatggacactgtgacagaggctgacatggccattgccatggctgtgagttacacacctgcatggggactccagggcacacaggaactgaccatggtgggctgtgctgaggggcagggctgaggaggaatgggccccggctctgaccacacttcccttctacatcagctgatgggaggtattggtttcattcaccacaactgcaccccagagttccaggccaacgaggtgcggaaggtcaaggcaagtaccaggcctgtccccagcaagatgccacctggcagtccccacctcagaggccctcccagcctcccctgccagccctgcactgctacactccctgcgtgtccttcctctcagtggagccttggggccgagccctcattttcccactggctcctcatcccactgagggtcctggcttctctgcagcacagctgcatcctctgttccctgtggccagcctggacatcatccctggctttcttccagccttttcctcccccatctctgcccgcagaagtttgaacagggcttcatcacggaccctgtggtgctgagcccctcgcacactgtgggcgatgtgctggaggccaagatgcggcatggcttctctggcatccccatcactgagacgggcaccatgggcagcaagctggtgggcatcgtcacctcccgagacatcgactttcttgctgagaaggaccacaccaccctcctcagtgaggtacctgcagggcaggggaagcagggctgggtgtagagaggaccctcacgctggggcctcagactggtgcctgtgaccagggaccagagggaggcctggctccttctctctcacctgccaacctgcaggcaaatgttcctggccccacaggtgatgacgccaaggattgaactggtggtggctccagcaggtgtgacgttgaaagaggcaaatgagatcctgcagcgtagcaagaaaggtaccagggagctagttgaaaactcaacccccagcctgactccctgtccacagtcccgttgttccttcacagccttacaggttatcccagcaaccagactgagccctggggaaggttcgaataacctcaggcaggccagagcacaactcctgccatccttctcttagcttagggaagcttgcccctagtgcagcatcttcatagtatgtttcccaaaactagtcctatgcgatgctcatcagaaaaaaatcctgagcaataactcctttctctatcccctatcttgcataaagaattgcacattcacttattaaaggctctcagaagtcctgcagttaaatttatttgacactagagctgtttttataatattttccagctagaaacaactttagcttttttttttttgagacagagtctcactttctcacccaggctggagtacagtggcgcaatgtcagctcactgcaaccctcgcctcctgggttcaagcaattctcatgcctcagccttctgagtagccaggattacaggcatgtgctactataccagctaattttttttttttttttgtatttttagtagagatggggtttcaccatgttggccaggctggtcttgaactcctggcctcaagtgatctgccctcctgggcctcccaaagtgctggaattacaggcgtgaaccaccatgccctgccacaactttggcttctatttatttatttttgagacagagtcttgctctctcatccaggctggagtgcagtggtgtgatcttggctcactgcaatctctgcctcctgggttcaagcaagtctcctacctcagcctcccgagtagttgggacaacaggcacacaccaacacacccaggtaatttttttgtatttttagtagagatggggtttcaccatattggccgggctgttcttgaactcctggcctcaagtgatccacctgcctcggcctcccaaagtgaggaagctgtgagccaccacacccggccaactttcgcttgttagaaaaaaaaaggaaaaattaaatattcaccaggtccctgttggctatactgggaaatgcttccctggtccatactggagggttctttggtgtctgtattggacagggcacatgcttctccctgcaggacagcatcactcctggctaggagatttcggccactgtggcccagcaggtgaaaggctgccagtgctcgggctgcccatcccaggccacggggatgcccatccacagacccccaggaacctgctgggctgaaagatttctttgctccctgttccttgggaagagggctaggtccctaggaacacttcctgggggcggtgctgtcacctagtggctgactggggtacttcagtggaatctctggagtggtccactttcatcttcaccctcctaaacatctcccaaacttctccccaccaagcctgcttcatttcacccctgcattccttgtcagggaagctgcctatcgtcaatgattgcgatgagctggtggccatcatcgcccgcaccgacctgaagaagaaccgagactaccctctggcctccaaggattcccagaagcagctgctctgtggggcagctgtgggcacccgtgaggatgacaaataccgtctggacctgctcacccaggcgggcgtcgacgtcatagtcttggtaaggcccccgcctgagtggtgggggagatggatgagtggttcagcagagtggaggtttatgaggacccaggttcacctctgattaagcctgtgcccctcccttgctactcttcctctctctttctgagtgctccctggtgtcagaattaggagggtggcagcaggattgcctgagctcagaggttcaaggtcacagtgagctaggatcgtgccactgcactccagccctggggacagaacgagaccctttctcaaaaaacaaacaatggtttgtgtcatctgagatacaaagaaagaaaacaaacaagttaaaattctccagtggcacagccataagaaagaatgaaatcctgtcctttgcagcaacatggacagagctagaagccattatccttagtgaactaactccaaagcagaaaaccaaatactgcatgccctcacttataagtaggagctaaacagagagtacacatgttcataaagatggaaataatagacgctggggactccaaaatgggagagggtgggaggggaacgaaggatgaaaaattggctatcagacacagttttcgatatgtgggtattaggtacacttgaagcccaattctcaccagtatgcagtattccatttaagcaacaagcacatgtacccactgaatccttaaaaaaaaaattgacaaattgttgcaagcaacaattgcaaatcaagactctcccccaccccccgataaagggaggtagaataaagataaaggcttattgatcccttgtgagtgatctggaccatacatctagattcatctgtattctataactaggaggaagagaaattaggaaggtcactggcaccctctcaacagctcacaacagactgcaaacaaaggcctctgagggccttcttggctcataagttgaccctgataatttagctcacgtttactgagaaccgcctgtttgccaggcactgcgtcaagaccttaatgtatatcagtccattgaggaacagtcgccattccattttcagatgaagaaacaggcttaaagaagttaagtcatttcatttggttagtgagttggtgggaacaggatatggctccaggcagtgtctccttgctttaaggatcagtctgtacaatggataggaaaggccttatgtactctaagactgcattagttgtggttaacctttcagggaagcagtcccctttgagaattgactgaaagttgtcaagtgaatttccagaaaaaaaaaaaaaaaaacaaccagaaggaaagagcattctcataacagttttcataggatttgaggggttcatccactcaggctctccctcctgccttgagaatcctcagctgtctaagcccaagctcttccgtcctttctcacaggactcgtcccaagggaattcggtgtatcagatcgccatggtgcattacatcaaacagaagtacccccacctccaggtgattggggggaacggtgagtgcggggtcgcctcccacccgcctgctcctgcccctccaatgagtaacccttttctgtccttcagcatccctaggtgatggtatggctcctggcatgggtggcagggagcatgatgggctttggtcactgtaggggggttggggggtgctagactggggtcccaagaggctgttgggcaggcaggggcatcccatcctcacattgttcctctgccccatccccacccccagtggtgacagcagcccaggccaagaacctgattgatgctggtgtggacgggctgcgcgtgggcatgggctgcggctccatctgcatcacccaggaaggtgggtgtcaggaggtgagcgagtgcccgctggccccggggcctcgcctttgttccccagatgtatatcaagtactctctctgccaggccctgttctgccatggtaggctccggggtgacccaggcatgggccccaccccatcgggcccactgacttaggggaaggcaggtgtaagcagggtgcaagagctgcagcctgcttctcagagtgcggtcaagggggctctgcctggggcttggggcctggggctggtgtgactgtccatggggcttgttggaacctcagggtttggatttgatttgtgacaaggcagatatttaagacacagagacgacatgtccctgaatatataaagatatgttatacacctgcttcaccatgtggttgggcgtggggagttccacccaattacaaagcccttttgcagggtgggttcctgaacatgaagtgggaaggggggagcctggcatgtgtcccccatgtggttattgaggaggtgctccctggaggctggtatctgacttgtggggtggctgcctggaagacttgggtcctcacttggcctgaggagatgtacccggcccctcctgtgagggcaatttctccaaaacactgagtgatgcatttggcctttcctaccccaaacagctcccccttttggtcctcagagcctctgctatttaggtttgtgcccttcgccttaggtggccaccatggtgaaatgagggccctctctcacccacttaacaaatattcattaggcacctacttgtctcaggcactgttcaaagctttgaggtagagtagggacaaaacaaatgagaggcgccatctctggtttatccagctttgcatccgtccctagacaggtgtggttccttgtagtccccacctaaaacctaacactgaaggaccttggacacttagacttgaagaaatgcaaaccagtatcccaaaggggaccatagtacctaaccctggtaacggtttttgcaaacaaaagccttgaaggggaacttgtgccttgagagcaggtgaggctggggccacctgtctgggggcattgggctctgaaggccgcttctggttcccccgtcagaatcccctgtcatgctcttaggggtggggtggcccagatccctagagtgacactcatcctggtggtatttgccagcacctatgttatgcctcagacacaccatccagccctgtcccttttcctgagtagaggtagtgcacaggaggaagagctgggctggccccgctccaggccccggagttgctgttgactcttctctgccttgtgcaccccaccctcccccagtgatggcctgtggtcggccccagggcactgctgtgtacaaggtggctgagtatgcccggcgctttggtgtgcccatcatagccgatggcggcatccagaccgtgggacacgtggtcaaggccctggcccttggagcctccacaggtgaggggagaatgtgctggggattgggcaggcgagggctggaagctgggggggtggcactagtgggctggaggcactaatcccttgcccactgtagtgatgatgggctccctgctggccgccactacggaggcccctggcgagtacttcttctcagacggggtgcggctcaagaagtaccggggcatgggctcactggatgccatggagaagagcagcagcagccagaaacgatacttcaggttccctgaccctgggccccacctgggcagatcagcccacaacccttcagggcccgctcatgccaccgacttccccagatggcagccagtccccatatggtggttctggaaactgaggcacagggcttaagtagcagacccaggatctgtccctgggccatctgactcagcccagtgaggggtggcctgggggaccttcctgggcggtatcccgtttttgcccttaagaggtggggtggggtcctctgagcttcaagctgctgggctcagtcttccaccctccacgcagcgagggggataaagtgaagatcgcgcagggtgtctcgggctccatccaggacaaaggatccattcagaagttcgtgccctacctcatagcaggcatccaacacggctgccaggatatcggggcccgcagcctgtctgtccttcggtgagtgctgagactgggggtggctcctgcttcctttctctcgctcttctccacccttggtggccctgatctgctccacctaccttcctcctaggtccatgatgtactcaggagagctcaagtttgagaagcggaccatgtcggcccagattgagggtggtgtccatggcctgcactcgtaagtgtggtggcctccttgctgtcacttggaggcagtgggttgggcaggtggggccagggttctgaggtcaagctgaggttccagggaccccatggaccacctgcagcagggacagatgctgctgcaggatggcccctcaccctctcttcgggggcccagccccctgttccttgtcctttagtccccatgcaagcaggccctcccctcccctcgggcctctcccgagcagggcacaggaggtgtggccagtcactgcacctggactcccagcccttgcttgctcaggaagcttggtggctggtggcaggggctgtggtggcaccaggcagccaggcagaagatgcgggtgtgacccctctggcgggtacaagggcagagagatggacgccagggccagcgctggggcaaccgtgggcgggggcagtgctcgttggcagcagtagttgcaggcatgtgccccaccctggtcaggagccctgtccccaggtatcagcgggcgtctaacctgtgtctctttccgccccacccttccgtagctatacctttctgccgtgtaagtaaccgcgctgcccgggccaagcgtagagtagagcaggggcagtctgggtgggacctgggctggaggtgggggtgggtattgggtgggggtaggagggtgctggggtgtaaccatgagatgtggaccctgggtttgggcccccccggccccctaactccaacaccatgatggaggaaaccagcagtgtcccctcatccagctgaaacacatatccctttctggctgcagagagatgcccgtgacctcaggcctaaggctgccccattttagactggacccagtgaccacaagcagcctaggccactgtgcctgcagggctggggctgggtgcggacatgggcagcagaggttcggctccaggttggagtttgctccatgaggatgggccatgcctgcctgagctgtccctccaccctgggcactgaggacatccactcagatgtggcgatggcccaaaggagcatggccatctctgcacccagcatggttcttcagggaatgctggcctgggggaggacagaggcctagggcctgctccaggccctcctcctgcgccgtacggctgagatctcagggcttctcagctctctgttctctcctacatctgggggccctggggaaagggttttgggaaggagcagggtccacacacccactcttgttccccctcttgccttgtccccacagttacgaaaagcggctgtactgaggacagcggtggaggccgaggtggtggaggggatgcaccccagtgtccacttttgggcacagcctccctccataactgagtggtccacagatttgcactacgggttctccagctcctttccaggcagagaggaggggaggtcctgaggggactgctg

SEQ ID NO: 12633 - DNA, 1606 bp, Homo sapiens
cgacttcctgattctcccaggattcatagacttcatagctgatgaggtggacctgacctcagccctgacccggaagatcacgctgaagacgccactgatctcctcccccatggacactgtgacagaggctgacatggccattgccatggctctgatgggaggtattggtttcattcaccacaactgcaccccagagttccaggccaacgagaagtttgaacagggcttcatcacggaccctgtggtgctgagcccctcgcacactgtgggcgatgtgctggaggccaagatgcggcatggcttctctggcatccccatcactgagacgggcaccatgggcagcaagctggtgggcatcgtcacctcccgagacatcgactttcttgctgagaaggaccacaccaccctcctcagtgaggtgatgacgccaaggattgaactggtggtggctccagcaggtgtgacgttgaaagaggcaaatgagatcctgcagcgtagcaagaaagggaagctgcctatcgtcaatgattgcgatgagctggtggccatcatcgcccgcaccgacctgaagaagaaccgagactaccctctggcctccaaggattcccagaagcagctgctctgtggggcagctgtgggcacccgtgaggatgacaaataccgtctggacctgctcacccaggcgggcgtcgacgtcatagtcttggactcgtcccaagggaattcggtgtatcagatcgccatggtgcattacatcaaacagaagtacccccacctccaggtgattggggggaacgtggtgacagcagcccaggccaagaacctgattgatgctggtgtggacgggctgcgcgtgggcatgggctgcggctccatctgcatcacccaggaagtgatggcctgtggtcggccccagggcactgctgtgtacaaggtggctgagtatgcccggcgctttggtgtgcccatcatagccgatggcggcatccagaccgtgggacacgtggtcaaggccctggcccttggagcctccacagtgatgatgggctccctgctggccgccactacggaggcccctggcgagtacttcttctcagacggggtgcggctcaagaagtaccggggcatgggctcactggatgccatggagaagagcagcagcagccagaaacgatacttcagcgagggggataaagtgaagatcgcgcagggtgtctcgggctccatccaggacaaaggatccattcagaagttcgtgccctacctcatagcaggcatccaacacggctgccaggatatcggggcccgcagcctgtctgtccttcggtccatgatgtactcaggagagctcaagtttgagaagcggaccatgtcggcccagattgagggtggtgtccatggcctgcactcctatacctttctgccgtttacgaaaagcggctgtactgaggacagcggtggaggccgaggtggtggaggggatgcaccccagtgtccacttttgggcacagcctccctccataactgagtggtccacagatttgcactacgggttctccagctcctttccaggcagagaggaggggaggtcctgaggggactgctg

SEQ ID NO: 12634 - DNA, 2968 bp, Homo sapiens
cttttgaggggctcggctagcttcagcgccgtggggtctgacctggctggatatagtgtaccggcccggcaggaggggcggcccggtccgggttgcgcctcctggagccgcccccgggacgtcagtcctggaggaggcgagggttgctccggttgctaagaagactatgaacaagtcagagaacctgctgtttgctggttcatcattagcatcacaagtccatgctgctgccgttaatggagataagggtgctctacagaggctcatcgtaggaaactctgctcttaaagacaaagaagatcagtttgggagaacaccacttatgtattgcgtgttggctgacagattggattgtgcagatgctcttctgaaggcaggagcagatgtgaataaaactgaccatagccagagaacagccctccatcttgcagcccagaagggaaattatcgtttcatgaaactcttacttacacgcagagcaaactggatgcaaaaggatctggaagagatgactcctttgcacttgaccacccggcacaggagccctaagtgtttggcacttctgctgaagtttatggcaccaggagaagtggatacacaggataaaaacaagcaaacagctctgcattggagtgcctactacaataaccctgagcatgtgaagctgctcatcaagcatgattctaacattgggattcctgatgttgaaggcaagatcccacttcactgggcagccaaccataaagatccaagtgctgttcacacagtgagatgcattctggatgctgctccaacagagtctttactgaactggcaagactacgagggtcgaactcctcttcactttgcagttgctgatgggaatgtgaccgtggttgatgtcttgacctcatatgaaagctgcaatataacgtcttatgataacttatttcgaaccccactgcactgggcagctttattaggccatgcacagattgtccatctccttttagaaagaaataagtctggaactatcccatctgacagccaaggagccacacctttgcactatgctgctcagagtaactttgctgaaacggttaaagtgtttttaaaacatccttcagtgaaagatgattcagacctggaaggaagaacatcctttatgtgggcagctggcaaaggcagtgatgatgtccttagaactatgctgagcttaaaatcggacatagatattaacatggctgacaaatatggaggtacagctttgcatgctgctgctctttctggccatgtcagcaccgtgaagttattactggaaaataatgctcaagtagatgctactgatgttatgaaacatactccacttttccgagcctgtgagatgggacacaaagatgtgattcagacactcattaaaggtggagcaagggtagatctagttgaccaagatggacattctcttctacattgggcagcactgggaggaaatgctgatgtttgccagatattaatagaaaataagatcaatccaaatgtccaggattatgcaggaagaacccctttgcagtgtgcagcatatggaggctatatcaactgcatggcagttctcatggaaaacaatgcagaccctaacattcaagacaaagagggaagaacagctttgcattggtcctgcaacaatggataccttgatgccattaaattactgctagactttgctgctttccctaatcagatggaaaacaatgaagagagatacacaccccttgattatgctttgcttggtgagcgccatgaagtgatccagttcatgttggagcacggtgccctgtccatcgcagccatacaagacatcgccgccttcaaaatccaagctgtctacaaagggtacaaggtcagaaaagccttccgagacaggaaaaatctcctcatgaagcatgaacagttgagaaaagatgctgctgccaaaaagcgagaggaagaaaacaaacgaaaagaggcagaacagcaaaaaggaaggcggagcccagattcctgcagaccccaggcccttccctgtctgcctagcacccaggatgtgcccagcaggcagagccgggcccccagcaagcagcctcctgctggcaacgtggcccaaggccctgagccaagagacagcagaggatctccaggagggtctctaggcggagccctccagaaggagcagcatgtttcctcagatttgcagggaacaaactccagaaggccaaatgaaacagccagagaacattctaaaggccaatctgcttgtgtccacttcagacccaatgaaggcagtgatggaagcaggcatccaggagttccctctgttgagaagtccagagagctccgactgcagataattcagagagaacgaaggaggaaggagctgtttcgcaaaaagaacaaggcagcagcagtcatccagcgcgcctggcgaagctaccagctcaggaagcacctgtcccaccttcggcatatgaagcagcttggagctggagatgtggacagatggaggcaagagtctacagcattgctcctccaggtttggaggaaggaactggaactaaaattcccccaaaccactgcagtaagcaaggcccccaagagtccatccaagggcacctcaggcacaaagtccaccaagcactcagtgcttaagcaaatctatggttgttctcacgaagggaaaatacatcatcctacaagatctgtaaaagcctcttctgtgctgcgtctcaactcagtgagcaacctacagtgtatacatctccttgagaacagtggaagatcaaagaacttttcttataacctgcaatcagctactcagccaaaaaacaaaacaaaaccttgactgcctatggaggaagactgtgttcgggggagctggcatagctagtgcagagttcagattttctgctgataatcttttacaccttgggaaaactttaatatccgtacctgaagg

SEQ ID NO: 12635 - DNA, 4897 bp, Homo sapiens
agaaggatgtgcggccgaaagcctcgggcggccttttgaggggctcggctagcttcagcgccgtggggtctgacctggctggatatagtgtaccggcccggcaggaggggcggcccggtccgggttgcgcctcctggagccgcccccgggacgtcagtcctggaggaggcgagggttgctccggttgctaagaagactatgaacaagtcagagaacctgctgtttgctggttcatcattagcatcacaagtccatgctgctgccgttaatggagataagggtgctctacagaggctcatcgtaggaaactctgctcttaaagacaaagaagatcagtttgggagaacaccacttatgtattgcgtgttggctgacagattggattgtgcagatgctcttctgaaggcaggagcagatgtgaataaaactgaccatagccagagaacagccctccatcttgcagcccagaagggaaattatcgtttcatgaaactcttacttacacgcagagcaaactggatgcaaaaggatctggaagagatgactcctttgcacttgaccacccggcacaggagccctaagtgtttggcacttctgctgaagtttatggcaccaggagaagtggatacacaggataaaaacaagcaaacagctctgcattggagtgcctactacaataaccctgagcatgtgaagctgctcatcaagcatgattctaacattgggattcctgatgttgaaggcaagatcccacttcactgggcagccaaccataaagatccaagtgctgttcacacagtgagatgcattctggatgctgctccaacagagtctttactgaactggcaagactacgagggtcgaactcctcttcactttgcagttgctgatgggaatgtgaccgtggttgatgtcttgacctcatatgaaagctgcaatataacgtcttatgataacttatttcgaaccccactgcactgggcagctttattaggccatgcacagattgtccatctccttttagaaagaaataagtctggaactatcccatctgacagccaaggagccacacctttgcactatgctgctcagagtaactttgctgaaacggttaaagtgtttttaaaacatccttcagtgaaagatgattcagacctggaaggaagaacatcctttatgtgggcagctggcaaaggcagtgatgatgtccttagaactatgctgagcttaaaatcggacatagatattaacatggctgacaaatatggaggtacagctttgcatgctgctgctctttctggccatgtcagcaccgtgaagttattactggaaaataatgctcaagtagatgctactgatgttatgaaacatactccacttttccgagcctgtgagatgggacacaaagatgtgattcagacactcattaaaggtggagcaagggtagatctagttgaccaagatggacattctcttctacattgggcagcactgggaggaaatgctgatgtttgccagatattaatagaaaataagatcaatccaaatgtccaggattatgcaggaagaacccctttgcagtgtgcagcatatggaggctatatcaactgcatggcagttctcatggaaaacaatgcagaccctaacattcaagacaaagagggaagaacagctttgcattggtcctgcaacaatggataccttgatgccattaaattactgctagactttgctgctttccctaatcagatggaaaacaatgaagagagatacacaccccttgattatgctttgcttggtgagcgccatgaagtgatccagttcatgttggagcacggtgccctgtccatcgcagccatacaagacatcgccgccttcaaaatccaagctgtctacaaagggtacaaggtcagaaaagccttccgagacaggaaaaatctcctcatgaagcatgaacagttgagaaaagatgctgctgccaaaaagcgagaggaagaaaacaaacgaaaagaggcagaacagcaaaaaggaaggcggagcccagattcctgcagaccccaggcccttccctgtctgcctagcacccaggatgtgcccagcaggcagagccgggcccccagcaagcagcctcctgctggcaacgtggcccaaggccctgagccaagagacagcagaggatctccaggagggtctctaggcggagccctccagaaggagcagcatgtttcctcagatttgcagggaacaaactccagaaggccaaatgaaacagccagagaacattctaaaggccaatctgcttgtgtccacttcagacccaatgaaggcagtgatggaagcaggcatccaggagttccctctgttgagaagtccagaggtgagacagctggcgatgagcggtgtgcaaaggggaaaggcttcgtgaagcagccctcctgtatcagggtggctgggcctgatgagaaaggagaggactccaggcgggcagctgcaagccttccaccgcacgatagccactggaagcccagcaggcggcatgacacagaacccaaggccaaatgtgccccccagaaaaggcgcactcaagagctcagaggaggaaggtgctctccggctggttctagccgccctggcagtgcccggggggaggcggtccatgctgggcagaatcctccccaccatcgtacaccaagaaacaaagtgacacaagccaagctcacaggagggctctattcacatttgccacagagcacagaggagttgaggtcaggagctaggaggctggagacatctaccctgtccgaggactttcaggtatctaaggagactgatccagcacctggtcccctctctgggcagagtgtgaatattgaccttctccccgtagagctccgactgcagataattcagagagaacgaaggaggaaggagctgtttcgcaaaaagaacaaggcagcagcagtcatccagcgcgcctggcgaagctaccagctcaggaagcacctgtcccaccttcggcatatgaagcagcttggagctggagatgtggacagatggaggcaagagtctacagcattgctcctccaggtttggaggaaggaactggaactaaaattcccccaaaccactgcagtaagcaaggcccccaagagtccatccaagggcacctcaggcacaaagtccaccaagcactcagtgcttaagcaaatctatggttgttctcacgaagggaaaatacatcatcctacaagatctgtaaaagcctcttctgtgctgcgtctcaactcagtgagcaacctacagtgtatacatctccttgagaacagtggaagatcaaagaacttttcttataacctgcaatcagctactcagccaaaaaacaaaacaaaaccttgactgcctatggaggaagactgtgttcgggggagctggcatagctagtgcagagttcagattttctgctgataatcttttacaccttgggaaaactttaatatccgtacctgaaggctgattcacctaaaaatgtgttaactgaaagaaaatgtcagaatgtttcctttctgctcttacacagcattgttttgtcaatcaacacagcctgcactgaaaggacctgcatagactatgtctgtgcaaagtgcctgagtgtctgctttcacctcagtctgtacagttggaaatgagaattcataattaacagcaaaatctaaggaaaactacggctgctgggttgggatttctgccagctagctggtactggcttcttgtttcaagagatgaacctaaatgagataggaagcctgtcccatagcagccttcctctcactactttcctggcatctaatgcaacaaacttatcacacacacacacacacacacacacacacacacacacacatatcacgtcccactattacttcaaaattaatcaggtttaaattttagatcagaatcattgcccactgttttcatttagaaattgtccaaaagaccatagatacattctggtgattccttacattttacagttcctacgttagcctctcaaggccacaagttgccgccacgtcttcactgaatggctttctcagtgctgaataccaacagccgtattacagtatcaaggattctgtcaggtagggtttacagaccagactgttcatgcagcaaggtgctaactcaggcgtcaacgttctacttgtattttctgaccaacttgcagaagtgagcaatcttcttaaaatgccatttctgttggcagggaagaatgaaacggcacacatcctagcattctaagaacacctggtttaaataaaatccagtgatgatgggctctttcacattgtttaaggggaaagctgctgtgagaatattgacagtaggcataaacagtgatatattttactcacaggtattttgggggttgctttcattttcttcagatcagtgccacttctgtgctaacggtaagagatagacagataggcaatgaagtgttcacttaattaccttggtttttagtttactaattattacattcatcgtttttgtgatcacaaaaacacaaagaaggaggtctgcctggatggaattacaaagatttagccagtttcttggtatataacagaaggtaccacagtatcactctctattttgtaaatatttagctcctatgaaatgcacaatgcacaaccgcctatgaccatgtatcgtgtgctagtccgggaagccagcctacacatcaataggaacgcccaaacattattttcatatatcagtgcaaagaaagaaggttcgtaaacttctttaaaagttcagctttaatgacaaagatctattacatcagtctttttcttcaaataagatagatgtgaataaacaacttcaaacagga

SEQ ID NO: 12636 - DNA, 1654 bp, Homo sapiens
cggctagcttcagcgccgtggggtctgacctggctggatatagtgtaccggcccggcaggaggggcggcccggtccgggttgcgcctcctggagccgcccccgggacgtcagtcctggaggaggcgagggttgctccggttgctaagaagactatgaacaagtcagagaacctgctgtttgctggttcatcattagcatcacaagtccatgctgctgccgttaatggagataagggtgctctacagaggctcatcgtaggaaactctgctcttaaagacaaagaagatcagtttgggagaacaccacttatgtattgcgtgttggctgacagattggattgtgcagatgctcttctgaaggcaggagcagatgtgaataaaactgaccatagccagagaacagccctccatcttgcagcccagaaggcattgagaacaatcagcacaggcaggatctaagagactacaatcattcaaagaagagaaacacgtaaagtgagtaccacattcatcctggccttttcctttatgacattttccaaactggaatgcaaaagaatacaaccctaacaggaagcagcagccttaccaggctgaagaaactgaggcagagtttggagataatagtggctggaacttgaaagtcaaaatcctggagaggagggaattgcagagaaagaatgcaagaatctggatacaaattcctcacaagtttttaacagattcctaaactgtgcttgtatagggtggtgctctaagaaacctagtattaaacaacagctgggagactagacagctgagtagagattattttaaattatcctatattttcttttatgtttaaatctcttaatatataacacattgatttttgtatggggatccattctcattttaaagcatatggataactaattttcccaacacaacctagttcattaatttttggccatttagtatctgctctctgtcagttccaggcttttgtactacgaactccctatgcatttctgtttttttaaatgagggatcctgaatactagggagcctttgggaaatttgaaaataaaagttacatgatcagtgtattttagggggactaatatggcaactaaagctactttggaagagaaagagtggagatacatagattgctattatagttcaggccaatagagaggaattgggtttaagagatacattatggaggcagaagtgttcattcaacaagcgtttgttaaatatctactatgtaatcatgattatacaactagagagaatatgaaaaaaatgaattacgtatgttagcttatagatggatgctctcagtacccatccctattaatcgtcatttccctttgtttagtgaaccttctgatatattggatatcaaatatcctttccaagtattgtctgtcccacttaattctggtatccatgaatgcagaagtgtgctatttatgtaatcatgaacactcatgtatatgtgtataccttcattcattcaacatgtgttaaaactattatgtaacaggcatcatgttaggccttggaacacaaaggtgaacaacatgattcctgctcttaagttgcttacaaagatcatggatgaagatattaaatgataattaaagctgattgatctaccttgtaa

SEQ ID NO: 12637 - DNA, 954 bp, Homo sapiens
cctgctgtttgctggttcatcattagcatcacaagtccatgctgctgccgttaatggagataagggtgctctacagaggctcatcgtaggaaactctgctcttaaagacaaagaagatcagtttgggagaacaccacttatgtattgcgtgttggctgacagattggattgtgcagatgctcttctgaaggcaggagcagatgtgaataaaactgaccatagccagagaacagccctccatcttgcagcccagaagttttcaaggtacgctgtttccatgttactgatttacaaaaaggagaaagaatacctctgaaacttttcaggaacacttataccaggggctgaagttgttgctttccttctttggccacatagttaatgtgtcccattccagtagatataacttcgccttttctccaatcatcccctacttgtgcctgtagcttatagaagggaggctacaaggatgaaatgaaccctttctgaaggtggccacagttagtaagcaaactgcttcatacaggagtgtggaccaggaggagggaaattatcgtttcatgaaactcttacttacacgcagagcaaactggatgcaaaaggatctggaagagatgactcctttgcacttgaccacccggcacaggagccctaagtgtttggcacttctgctgaagtttatggcaccaggagaagtggatacacaggataaaaacaagcaaacagctctgcattggagtgcctactacaataaccctgagcatgtgaagctgctcatcaagcatgattctaacattgggattcctgatgttgaaggcaagatcccacttcactgggcagccaaccataaagatccaagtgctgttcacacagtgagatgcattctggatgctgctccaacagagtctttactgaactggcaagactacgagggtcgaactcctcttcactttg

SEQ ID NO: 12638 - DNA, 767 bp, Homo sapiens
ccgtggggtctgacctggctggatatagtgtaccggcccggcaggaggggcggcccggtccgggttgcgcctcctggagccgcccccgggacgtcagtcctggaggaggcgagggttgctccggttgctaagaagactatgaacaagtcagagaacctgctgtttgctggttcatcattagcatcacaagtccatgctgctgccgttaatggagataagggtgctctacagaggctcatcgtaggaaactctgctcttaaagacaaagaagatcagtttgggagaacaccacttatgtattgcgtgttggctgacagattggattgtgcagatgctcttctgaaggcaggagcagatgtgaataaaactgaccatagccagagaacagccctccatcttgcagcccagaaggggctgaagttgttgctttccttctttggccacatagttaatgtgtcccattccagtagatataacttcgccttttctccaatcatcccctacttgtgcctgtagcttatagaagggaggctacaaggatgaaatgaaccctttctgaaggtggccacagttagtaagcaaactgcttcatacaggagtgtggaccaggaggagggaaattatcgtttcatgaaactcttacttacacgcagagcaaactggatgcaaaaggatctggaagagatgactcctttgcacttgaccacccggcacaggagccctaagtgtttggcacttctgctgaagtttatggcaccaggagaagt

SEQ ID NO: 12639 - DNA, 2746 bp, Homo sapiens
ggccttttgaggggctcggctagcttcagcgccgtggggtctgacctggctggatatagtgtaccggcccggcaggaggggcggcccggtccgggttgcgcctcctggagccgcccccgggacgtcagtcctggaggaggcgagggtgagtaggagggggcctggctggggaggctcagatcattcggtccgcaccgccttggcccctgctgcagactcacggccttcctggcctaggctgtggcctgagcctccatcattggcctcctcgcccgctgcctcttctttctgctctaattcctgcattataaagtcagagccaccactcggggcctcagttgaatgagtcaatgacttatccctgattgtctctgagggctcctgtaaggagtagatgtggtacgggatgggatagcacgtcgtaaactggaaaactgtgtgagtgattgctgctaaggcgtggatcgctcctccagtataattacgaaattccctagcaaagcagtcgaggatcctaacttggccccaggtagctctgcggcttcttctgcaaacactcagtgaggtccaggagcccacgcgatctctgcttagtacccaggaggcacactgtgcttttgtggttctccctgctcccgcctttgcttcagctttcctgctgcctggaatggccttacccgttctctctctggaatgctatcttaaatgtcaccatctctgagaacttcccgaacaaccaaccctttagtcctaatcagaattactcttcctatgagtgtgactgcagtacctctagttttgtacggttataattattagagcatttattacacgggcttgttgtataattaggcaaggatgatgacacctttgcattttatagcactttatcaaagtggttttgacttttttctataaaaaatgatttattttcttaaaggggcaaaaaatacattttttcttaagaaaaaaaaagagccctgcataatggctttctcagggtgacaaaattagacagtgatagagccaatactcttaccaaggcggcctaactcctagactagtgctcctatctcttgtccacgcccctgacagagcccaaagatagttgaaatgggaaattttaaaagagcagagacttgtaagtatgaactcattattcaagaaattaaactttgatcctgctcactttttggacttagcactcagcctgtgacctttcatccaacaaacatctactgagtactggctatatacctgttactgtgctaagtgctaagaattatgaagtaaaaagtatatatatataatatatataatatatgtacatataatatatataatatatgtatatataatatatatattatatatgtatatataatatatatattatatatgtacatataatatatatattatatatgtacatataatatatatattatatgtacatataatatatatattatatgtacatataatatatataatatatgtatatataatatatattatatatataatatatgtatatataatatatataatatatgtatatataatatatatataatatatgtatatataatatatatattatatatgtatatataatatatattatatatgtatatatattatatgtatatatataatatatataatatatatacatatatattatatatataatatatattatatatataatatatatgtatatataatatatatattatatgtatatatattatatatattatatatgtgtatatataatttatatatgtataatatatacacacacacacatatatataaaacagagatcacatttttagtgtatttttcaaagggtataaagaactttttttgtggttctgatgtgcctaaaactctgatcacttagaatgaaaaatgacaggtcttagagtttagaacagtgcctagcacatagttgtcactcagcttgttgaatgaacgaatgtgaacatggtctaaccttattattttttgcattttacagaaacctagaaagctgacatagcctgaggacacactgctgattataaatacaactgggcctagaacccaagtgcagttactcccctcccatgttttcacctccacctctattttgtagcttctctcaaataaccttaatataatcctggatatgacagtagttcttctgacatgactgttagactcagacatgactgaagtgtctcacaacaccctcttcctccatattttctgccagtccttaactcaaattgtcagcaaaataaagacgtaaggagctgtgctttaccataattaagaaagtattaatatgttctctcaagggcagaatttgaaccaataatccttgtcgatgacaagacaaataccagctcatccgttataaatttatcttagaaaactctcagatccccaggagtaacagcgattggcgtgacctgctttttggtgaaatcagaaaaggacttgcctaccctcatggcagcaattaactggagctgattaacagctgctccctttagataagtacatatgcttgagtttaccgtgattctgtgactccctacgtttctaacagttgttacctctctggtccttgtaggcattcagctttggaactttgataaagcagcttaagggtttaggaaggatgtttaagatcactgatgcaactattcatctttccttcccatcaggtgtttgaattgttgctgcattt

SEQ ID NO: 12640 - DNA, 862 bp, Homo sapiens
ggccttttgaggggctcggctagcttcagcgccgtggggtctgacctggctggatatagtgtaccggcccggcaggaggggcggcccggtccgggttgcgcctcctggagccgcccccgggacgtcagtcctggaggaggcgaggaaacctagaaagctgacatagcctgaggacacactgctgattataaatacaactgggcctagaacccaagtgcagttactcccctcccatgttttcacctccacctctattttgtagcttctctcaaataaccttaatataatcctggatatgacagtagttcttctgacatgactgttagactcagacatgactgaagtgtctcacaacaccctcttcctccatattttctgccagtccttaactcaaattgtcagcaaaataaagacgtaaggagctgtgctttaccataattaagaaagtattaatatgttctctcaagggcagaatttgaaccaataatccttgtcgatgacaagacaaataccagctcatccgttataaatttatcttagaaaactctcagatccccaggagtaacagcgattggcgtgacctgctttttggtgaaatcagaaaaggacttgcctaccctcatggcagcaattaactggagctgattaacagctgctccctttagataagtacatatgcttgagtttaccgtgattctgtgactccctacgtttctaacagttgttacctctctggtccttgtaggcattcagctttggaactttgataaagcagcttaagggtttaggaaggatgtttaagatcactgatgcaactattcatctttccttcccatcaggtgtttgaattgttgctgcattt

SEQ ID NO: 12641 - DNA, 714 bp, Homo sapiens
aagcctcgggcggccttttgaggggctcggctagcttcagcgccgtggggtctgacctggctggatatagtgtaccggcccggcaggaggggcggcccggtccgggttgcgcctcctggagccgcccccgggacgtcagtcctggaggaggcgagggttgctccggttgctaagaagactatgaacaagtcagagaacctgctgtttgctggttcatcattagcatcacaagtccatgctgctgccgttaatggagataagggtgctctacagaggctcatcgtaggaaactctgctcttaaagacaaagaagatcagtttgggagaacaccacttatgtattgcgtgttggctgacagattggattgtgcagatgctcttctgaaggcaggagcagatgtgaataaaactgaccatagccagagaacagccctccatcttgcagcccagaaggaggctacaaggatgaaatgaaccctttctgaaggtggccacagttagtaagcaaactgcttcatacaggagtgtggaccaggaggagggaaattatcgtttcatgaaactcttacttacacgcagagcaaactggatgcaaaaggatctggaagagatgactcctttgcacttgaccacccggcacaggagccctaagtgtttggcacttctgctgaagtttatggcaccaggagaagtggatacacaggataaaaacaa

SEQ ID NO: 12642 - DNA, 5598 bp, Homo sapiens
gctaccctgaaagtggggatacttactttcgatgatgtgggggagggaggaggtctatactggcggaattgagggagtggagggtctgcactgaagacgctggggaaggatgtgccatggatatgggaaggaaccctagctgattagagagcctctcgggaggatgggaggatgggaagaggaggtttcctgtttgtacccccgaaaatatgggtgaaggacctgtgccgtggcccgtgagaaggaggtctgggtgcggaaactccaggccaggtgggtccgggggaggccggtcgcgcccaggaaatgccctatacgcgcaggccggaccatgggaaccccaaagccacggatcctgccctggctggtgtcgcagctggacctggggcaactggagggcgtggcctgggtgaacaagagccgcacgcgcttccgcatcccttggaagcacggcctacggcaggatgcacagcaggaggatttcggaatcttccaggtgcgtgcgacgacctgggacgctggaaacccggagctgcgcgctgggcggaaaggactcctagtgggcccggctgagaaggcggaggtggcgcgcgaggggcgggctcgtgccaacgctggtgggtggggctagaacgggaggggcggggctagccggatccgctgactgatggtggggcgcaagcagggttggagctgcagggttacgggaataaaaccgggaaagccggttagtacgcaaaggaaatgcatcctgggggtttggggctttctagaggccggggctcttggttgtaggatagatactgggggatggttcttgaaacatcagaggtgaggcctggagccccaaatctgaggttcctaactaccgaattagtatatgccagaggtggtaaacagtgtgaggggcggggttatcacagagggtgtcgcggggcaggtggtgcacgggattagacaccaagttggacttggaagcctggcttagaaagaaaaggtttttgggccgggggcggtggttcacacctgtaatcctagcactttgcaaggccaaggcgggaggatcgcttgagcccaggagtttgaggccagcttgggcaacataggctccatctctttaaaaacaaaagcgaaacaaaacaaaaaccaaagaggtttcaaaggcttttgaagaggccgagcacagtagctcatgcctgtaatcccagcactttgggaggccgaggaggacggatcacctgaggtcaggagttcaagaccagcctggccaacatggtgaaaccccatctctactaaaaatacaaaaattagccaggtgtagtggtgcccacctgtaatcccagctactcaggaggctgagacaggagaatcgcttgaaccggggaggcggaagttgcagtgagctgagattgcaccattgcattccagcctgggtgacaggagtgaaactccatctcaaaaagaaaaaaagccttttgaaaactagaggtgggggatggaggtaggtgggacggggggatttggggatggaccttgcagagttagaacttgccagggaaagagggtggtgttaggactcgggagacagggttagggccccaggagcaggatctaagtcgtcctcccccaccatcctgacaccactgttgccccaggcctgggccgaggccactggtgcatatgttcccgggagggataagccagacctgccaacctggaagaggaatttccgctctgccctcaaccgcaaagaagggttgcgtttagcagaggaccggagcaaggaccctcacgacccacataaaatctacgagtttgtgaactcaggtctgccagcttggggttcgtgtgggaggctggggccccaagggttcctggcactcctactcccctcaccacttttctcaacaggagttggggacttttcccagccagacacctctccggacaccaatggtggaggcagtacttctgatacccaggtgagaatgtgcccaactttcatgcccctcagtctccgacctgtctccatgggccttgtcctctccctctagacgatccccccactcccctgcctccagcctgcccctcacctgagccagtgctgaccctgtctgtccctgccccggtctcctcaggagaaaattccaagtcttcacccagcattcaaggcccgagcacaccttcccgggatttcatggatttcgattcgcagggggctgtcagcctcttgggaactgaaaaactccctcaccttgatcctgctgaggcccaagctgggggagcatcccctctgaaattctacccagcctgctttgcccaggtcttacctgcatagagccagatccttgggttggaatggtagcacctggcgttcattagtgtttgtttggctgttgatgccatggctggctctgtccccaggctggaagccccttgaaggcagagctcaagcctgacctccctgcgttgctgagaacagacctggtccatatgaagtctccagaaaaggatatggaaatgcctgattctctttttttgtttccctccaggaagacattctggatgagttactgggtaacatggtgttggccccactcccagatccgggacccccaagcctggctgtagcccctgagccctgccctcagcccctgcggagccccagcttggacaatcccactcccttcccaaacctggggccctctgagaacccactgaagcggctgttggtgccgggggaaggtgagtgtcagctgcaggctgggagggctgaggtctgggcggcagcccctgattctcaacccctctccccttcatgccgctgctgccgctgctcagagtgggagttcgaggtgacagccttctaccggggccgccaagtcttccagcagaccatctcctgcccggagggcctgcggctggtggggtccgaagtgggagacaggacgctgcctggatggccagtcacactgccagaccctggcatgtccctgacagacaggggagtgatgagctacgtgaggcatgtgctgagctgcctgggtgggggactggctctctggcgggccgggcagtggctctgggcccagcggctggggcactgccacacatactgggcagtgagcgaggagctgctccccaacagcgggcatgggcctgatggcgaggtccccaaggacaaggaaggaggcgtgtttgacctggggcccttcattgtaggtgagtgagacaggggcttcgacctggccagtacaaagcagcctgcacagtggttaacaactcaggattggccgggcacggtggctcacgcctgtagtcccagcactttgggaggctgaggtgggcagatgacaagttcaggagttcgagaccagcctggtcaacatagtgaaaccccatctctactaaagatacaaaaaaatagtcgggcgtggtggcacgtgcctgtaatcccagctactcgggaggctgaggcaggagaattgcttgaacccaggaggcggagattgcagtgagctgagatcgcaccactgcactctagcctggtgacagagtaagactccatctcgaacaacaaaaaaaaaagaactcatgattaggactgaattcagacgctggctgcccttggcccgctgtataaccgaggcaaaggactttgccctgagcccgtggaatccaaggatggtctcctctctctacctgcctgccagcgctggggtgagacacaggcccagtacacagagcctgctcagggaattagctgccactgtcatcatcatcgtaactaatgatggtgaacagaccaatagcaggaaagctacatcccttagggtttcgctgtgcagtggcactttctgccatgatggaaatgacagtcacctgcactgtccggtgcagcagccactagccacaggggccaagcactcaggtgaggcgagtgcaaccaggacgtgattcgttttaattggttacaatttaaactgaaataaccttacatgactaatggctgcaattggacaatgcagcctcagacaggactgaatgccaaccagcttctccagattcactgagcatccttgggagcatgggccccctactctgggcctgttatgaatgctgaggcttgggggcttgggggtgtggccttccaacaaccccaccctgatgggagggagggagggagggaaggaggggactttccccaaacaagcagtcccctggtcgaggcagcagagggccttaggtcaggggaggtggtgggggttatcattcaagtttacggggaagggtgggtagagggtcctcttctcatccctgactaggctcctgggcccccagatctgattaccttcacggaaggaagcggacgctcaccacgctatgccctctggttctgtgtgggggagtcatggccccaggaccagccgtggaccaagaggctcgtgatggtcaaggtgcctgcagacctgagtccctggggctgaaaggggtggccttacagagggaagaggttgctcccaggaactccaactcccagagggccctctaaaaaactgcaacttccaagatctctgcaataaccagtttttcatccccgggagctccttcccatggcctcacctgcagaacctgttttgaactctctaaaccagtggcccccaaactatttggcaccagggaccagtctcatggaagataatatttccacggacagggaggtgtggtttcgggatgaaactgctccactgcagatcatcaggcattagattctcttaaggagcagccgatccctcacgtgcgcagttcgatagagtttgtgctcctctgagaatctaatgctgccgctgatctcacagaaggcagagctcaggcagtaatattcccccacccgctgctcacatcctgctgtgcaacctggtccctaacaagccgtaggggggttggggacccctgctctaaaccatgtagaagctggtggactcaagttttagctgccattgtgaggccatggctgtggctcccaggagtcaagatcacagactgctcagccctgacgtgtgtgtgtgtgtgtgtttgtgtgtgtgtgtaaaactacaactcccagcagccctaggcctatggttcagttacagcagggggtgtgtgtgtgtgtgtgtgtgtgtgtgtgtgtgtgtgtgtgtgtaaaactacaactcccagcagccctaggcctatggttcatcctaggttacagcaggggctgcagggagttgtagtcctccaagccctgactcctaccttggtggacagtggctgggtgttttccctgactcctgtccccacttcccctgcaggttgtgcccacgtgcctcagggccttggtagaaatggcccgggtagggggtgcctcctccctggagaatactgtggacctgcacatttccaacagccacccactctccctcacctccgaccagtacaaggcctacctgcaggacttggtggagggcatggatttccagggccctggggagagctgagccctcgctcctcatggtgtgcctccaacccccctgttccccaccacctcaaccaataaactggttcctgctatga

SEQ ID NO: 12643 - DNA, 1691 bp, Homo sapiens
gctaccctgaaagtggggatacttactttcgatgatgtgggggagggaggaggtctatactggcggaattgagggagtggagggtctgcactgaagacgctggggaaggatgtgccatggatatgggaaggaaccctagctgattagagagcctctcgggaggatgggaggatgggaagaggaggtttcctgtttgtacccccgaaaatatgggtgaaggacctgtgccgtggcccgtgagaaggaggtctgggtgcggaaactccaggccaggtgggtccgggggaggccggtcgcgcccaggaaatgccctatacgcgcaggccggaccatgggaaccccaaagccacggatcctgccctggctggtgtcgcagctggacctggggcaactggagggcgtggcctgggtgaacaagagccgcacgcgcttccgcatcccttggaagcacggcctacggcaggatgcacagcaggaggatttcggaatcttccaggcctgggccgaggccactggtgcatatgttcccgggagggataagccagacctgccaacctggaagaggaatttccgctctgccctcaaccgcaaagaagggttgcgtttagcagaggaccggagcaaggaccctcacgacccacataaaatctacgagtttgtgaactcaggagttggggacttttcccagccagacacctctccggacaccaatggtggaggcagtacttctgatacccaggaagacattctggatgagttactgggtaacatggtgttggccccactcccagatccgggacccccaagcctggctgtagcccctgagccctgccctcagcccctgcggagccccagcttggacaatcccactcccttcccaaacctggggccctctgagaacccactgaagcggctgttggtgccgggggaagagtgggagttcgaggtgacagccttctaccggggccgccaagtcttccagcagaccatctcctgcccggagggcctgcggctggtggggtccgaagtgggagacaggacgctgcctggatggccagtcacactgccagaccctggcatgtccctgacagacaggggagtgatgagctacgtgaggcatgtgctgagctgcctgggtgggggactggctctctggcgggccgggcagtggctctgggcccagcggctggggcactgccacacatactgggcagtgagcgaggagctgctccccaacagcgggcatgggcctgatggcgaggtccccaaggacaaggaaggaggcgtgtttgacctggggcccttcattgtagatctgattaccttcacggaaggaagcggacgctcaccacgctatgccctctggttctgtgtgggggagtcatggccccaggaccagccgtggaccaagaggctcgtgatggtcaaggttgtgcccacgtgcctcagggccttggtagaaatggcccgggtagggggtgcctcctccctggagaatactgtggacctgcacatttccaacagccacccactctccctcacctccgaccagtacaaggcctacctgcaggacttggtggagggcatggatttccagggccctggggagagctgagccctcgctcctcatggtgtgcctccaacccccctgttccccaccacctcaaccaataaactggttcctgctatga

SEQ ID NO: 12644 - DNA, 6306 bp, Homo sapiens
ggaaacccaaaaaagggcataggggcgggaacagcccagcgggccgtcccatcggcttttgggtctgttacccaaagaatgataaagttggttttatttcaagaagtcgatcaaaaagaaagccccagcgctctagagctcagctgacgggaaagggggtgcgcagcctcgagtttgagagctacccggagctccaagacaggggtgggttccagctgcccgcacgccccgaccttccatcgtaggtaacgcggaagagcccgggagagcgttggtggcgtccgagagcgaggagcgggaaagaggatgggtctgcacggagagtggaaaggcaggctgtgtactctggggaaagtggagcaaggaaggagctacagtggccgacgctggaggtcggctgcagaaaaactagaaaaagtagggaggaaagaggaaaagaggaggcgtctacactgagggggttctagagagggaggggtggactccgtagatgggggtagttcagtctcgaaacctggggcgtgctctgtcctggaggagggaggcgggcagtcggaggggaattgaatggaagttctgtgttggaaatgttttgggagatcttctgtagggggactgtggaagggggtctacattggggtaagtgcaggaggtagaggcttacacgtgaatcgattctgcactgaaataactagggaaagaggatgctaccctgaaagtggggatacttactttcgatgatgtgggggagggaggaggtctatactggcggaattgagggagtggagggtctgcactgaagacgctggggaaggatgtgccatggatatgggaaggaaccctagctgattagagagcctctcgggaggatgggaggatgggaagaggaggtttcctgtttgtacccccgaaaatatgggtgaaggacctgtgccgtggcccgtgagaaggaggtctgggtgcggaaactccaggccaggtgggtccgggggaggccggtcgcgcccaggaaatgccctatacgcgcaggccggaccatgggaaccccaaagccacggatcctgccctggctggtgtcgcagctggacctggggcaactggagggcgtggcctgggtgaacaagagccgcacgcgcttccgcatcccttggaagcacggcctacggcaggatgcacagcaggaggatttcggaatcttccaggtgcgtgcgacgacctgggacgctggaaacccggagctgcgcgctgggcggaaaggactcctagtgggcccggctgagaaggcggaggtggcgcgcgaggggcgggctcgtgccaacgctggtgggtggggctagaacgggaggggcggggctagccggatccgctgactgatggtggggcgcaagcagggttggagctgcagggttacgggaataaaaccgggaaagccggttagtacgcaaaggaaatgcatcctgggggtttggggctttctagaggccggggctcttggttgtaggatagatactgggggatggttcttgaaacatcagaggtgaggcctggagccccaaatctgaggttcctaactaccgaattagtatatgccagaggtggtaaacagtgtgaggggcggggttatcacagagggtgtcgcggggcaggtggtgcacgggattagacaccaagttggacttggaagcctggcttagaaagaaaaggtttttgggccgggggcggtggttcacacctgtaatcctagcactttgcaaggccaaggcgggaggatcgcttgagcccaggagtttgaggccagcttgggcaacataggctccatctctttaaaaacaaaagcgaaacaaaacaaaaaccaaagaggtttcaaaggcttttgaagaggccgagcacagtagctcatgcctgtaatcccagcactttgggaggccgaggaggacggatcacctgaggtcaggagttcaagaccagcctggccaacatggtgaaaccccatctctactaaaaatacaaaaattagccaggtgtagtggtgcccacctgtaatcccagctactcaggaggctgagacaggagaatcgcttgaaccggggaggcggaagttgcagtgagctgagattgcaccattgcattccagcctgggtgacaggagtgaaactccatctcaaaaagaaaaaaagccttttgaaaactagaggtgggggatggaggtaggtgggacggggggatttggggatggaccttgcagagttagaacttgccagggaaagagggtggtgttaggactcgggagacagggttagggccccaggagcaggatctaagtcgtcctcccccaccatcctgacaccactgttgccccaggcctgggccgaggccactggtgcatatgttcccgggagggataagccagacctgccaacctggaagaggaatttccgctctgccctcaaccgcaaagaagggttgcgtttagcagaggaccggagcaaggaccctcacgacccacataaaatctacgagtttgtgaactcaggtctgccagcttggggttcgtgtgggaggctggggccccaagggttcctggcactcctactcccctcaccacttttctcaacaggagttggggacttttcccagccagacacctctccggacaccaatggtggaggcagtacttctgatacccaggtgagaatgtgcccaactttcatgcccctcagtctccgacctgtctccatgggccttgtcctctccctctagacgatccccccactcccctgcctccagcctgcccctcacctgagccagtgctgaccctgtctgtccctgccccggtctcctcaggagaaaattccaagtcttcacccagcattcaaggcccgagcacaccttcccgggatttcatggatttcgattcgcagggggctgtcagcctcttgggaactgaaaaactccctcaccttgatcctgctgaggcccaagctgggggagcatcccctctgaaattctacccagcctgctttgcccaggtcttacctgcatagagccagatccttgggttggaatggtagcacctggcgttcattagtgtttgtttggctgttgatgccatggctggctctgtccccaggctggaagccccttgaaggcagagctcaagcctgacctccctgcgttgctgagaacagacctggtccatatgaagtctccagaaaaggatatggaaatgcctgattctctttttttgtttccctccaggaagacattctggatgagttactgggtaacatggtgttggccccactcccagatccgggacccccaagcctggctgtagcccctgagccctgccctcagcccctgcggagccccagcttggacaatcccactcccttcccaaacctggggccctctgagaacccactgaagcggctgttggtgccgggggaaggtgagtgtcagctgcaggctgggagggctgaggtctgggcggcagcccctgattctcaacccctctccccttcatgccgctgctgccgctgctcagagtgggagttcgaggtgacagccttctaccggggccgccaagtcttccagcagaccatctcctgcccggagggcctgcggctggtggggtccgaagtgggagacaggacgctgcctggatggccagtcacactgccagaccctggcatgtccctgacagacaggggagtgatgagctacgtgaggcatgtgctgagctgcctgggtgggggactggctctctggcgggccgggcagtggctctgggcccagcggctggggcactgccacacatactgggcagtgagcgaggagctgctccccaacagcgggcatgggcctgatggcgaggtccccaaggacaaggaaggaggcgtgtttgacctggggcccttcattgtaggtgagtgagacaggggcttcgacctggccagtacaaagcagcctgcacagtggttaacaactcaggattggccgggcacggtggctcacgcctgtagtcccagcactttgggaggctgaggtgggcagatgacaagttcaggagttcgagaccagcctggtcaacatagtgaaaccccatctctactaaagatacaaaaaaatagtcgggcgtggtggcacgtgcctgtaatcccagctactcgggaggctgaggcaggagaattgcttgaacccaggaggcggagattgcagtgagctgagatcgcaccactgcactctagcctggtgacagagtaagactccatctcgaacaacaaaaaaaaaagaactcatgattaggactgaattcagacgctggctgcccttggcccgctgtataaccgaggcaaaggactttgccctgagcccgtggaatccaaggatggtctcctctctctacctgcctgccagcgctggggtgagacacaggcccagtacacagagcctgctcagggaattagctgccactgtcatcatcatcgtaactaatgatggtgaacagaccaatagcaggaaagctacatcccttagggtttcgctgtgcagtggcactttctgccatgatggaaatgacagtcacctgcactgtccggtgcagcagccactagccacaggggccaagcactcaggtgaggcgagtgcaaccaggacgtgattcgttttaattggttacaatttaaactgaaataaccttacatgactaatggctgcaattggacaatgcagcctcagacaggactgaatgccaaccagcttctccagattcactgagcatccttgggagcatgggccccctactctgggcctgttatgaatgctgaggcttgggggcttgggggtgtggccttccaacaaccccaccctgatgggagggagggagggagggaaggaggggactttccccaaacaagcagtcccctggtcgaggcagcagagggccttaggtcaggggaggtggtgggggttatcattcaagtttacggggaagggtgggtagagggtcctcttctcatccctgactaggctcctgggcccccagatctgattaccttcacggaaggaagcggacgctcaccacgctatgccctctggttctgtgtgggggagtcatggccccaggaccagccgtggaccaagaggctcgtgatggtcaaggtgcctgcagacctgagtccctggggctgaaaggggtggccttacagagggaagaggttgctcccaggaactccaactcccagagggccctctaaaaaactgcaacttccaagatctctgcaataaccagtttttcatccccgggagctccttcccatggcctcacctgcagaacctgttttgaactctctaaaccagtggcccccaaactatttggcaccagggaccagtctcatggaagataatatttccacggacagggaggtgtggtttcgggatgaaactgctccactgcagatcatcaggcattagattctcttaaggagcagccgatccctcacgtgcgcagttcgatagagtttgtgctcctctgagaatctaatgctgccgctgatctcacagaaggcagagctcaggcagtaatattcccccacccgctgctcacatcctgctgtgcaacctggtccctaacaagccgtaggggggttggggacccctgctctaaaccatgtagaagctggtggactcaagttttagctgccattgtgaggccatggctgtggctcccaggagtcaagatcacagactgctcagccctgacgtgtgtgtgtgtgtgtgtttgtgtgtgtgtgtaaaactacaactcccagcagccctaggcctatggttcagttacagcagggggtgtgtgtgtgtgtgtgtgtgtgtgtgtgtgtgtgtgtgtgtgtaaaactacaactcccagcagccctaggcctatggttcatcctaggttacagcaggggctgcagggagttgtagtcctccaagccctgactcctaccttggtggacagtggctgggtgttttccctgactcctgtccccacttcccctgcaggttgtgcccacgtgcctcagggccttggtagaaatggcccgggtagggggtgcctcctccctggagaatactgtggacctgcacatttccaacagccacccactctccctcacctccgaccagtacaaggcctacctgcaggacttggtggagggcatggatttccagggccctggggagagctgagccctcgctcctcatggtgtgcctccaacccccctgttccccaccacctcaaccaataaactggttcctgctatgatc

SEQ ID NO: 12645 - DNA, 1442 bp, Homo sapiens
ggaaacccaaaaaagggcataggggcgggaacagcccagcgggccgtcccatcggcttttgggtctgttacccaaagaatgataaagttggttttatttcaagaagtcgatcaaaaagaaagccccagcgctctagagctcagctgacgggaaagggggtgcgcagcctcgagtttgagagctacccggagctccaagacaggggtgggttccagctgcccgcacgccccgaccttccatcgtaggcctgggccgaggccactggtgcatatgttcccgggagggataagccagacctgccaacctggaagaggaatttccgctctgccctcaaccgcaaagaagggttgcgtttagcagaggaccggagcaaggaccctcacgacccacataaaatctacgagtttgtgaactcaggagttggggacttttcccagccagacacctctccggacaccaatggtggaggcagtacttctgatacccaggaagacattctggatgagttactgggtaacatggtgttggccccactcccagatccgggacccccaagcctggctgtagcccctgagccctgccctcagcccctgcggagccccagcttggacaatcccactcccttcccaaacctggggccctctgagaacccactgaagcggctgttggtgccgggggaagagtgggagttcgaggtgacagccttctaccggggccgccaagtcttccagcagaccatctcctgcccggagggcctgcggctggtggggtccgaagtgggagacaggacgctgcctggatggccagtcacactgccagaccctggcatgtccctgacagacaggggagtgatgagctacgtgaggcatgtgctgagctgcctgggtgggggactggctctctggcgggccgggcagtggctctgggcccagcggctggggcactgccacacatactgggcagtgagcgaggagctgctccccaacagcgggcatgggcctgatggcgaggtccccaaggacaaggaaggaggcgtgtttgacctggggcccttcattgtagatctgattaccttcacggaaggaagcggacgctcaccacgctatgccctctggttctgtgtgggggagtcatggccccaggaccagccgtggaccaagaggctcgtgatggtcaaggttgtgcccacgtgcctcagggccttggtagaaatggcccgggtagggggtgcctcctccctggagaatactgtggacctgcacatttccaacagccacccactctccctcacctccgaccagtacaaggcctacctgcaggacttggtggagggcatggatttccagggccctggggagagctgagccctcgctcctcatggtgtgcctccaacccccctgttccccaccacctcaaccaataaactggttcctgctatgatc

SEQ ID NO: 12646 - DNA, 6286 bp, Homo sapiens
ataggggcgggaacagcccagcgggccgtcccatcggcttttgggtctgttacccaaagaatgataaagttggttttatttcaagaagtcgatcaaaaagaaagccccagcgctctagagctcagctgacgggaaagggggtgcgcagcctcgagtttgagagctacccggagctccaagacaggggtgggttccagctgcccgcacgccccgaccttccatcgtaggtaacgcggaagagcccgggagagcgttggtggcgtccgagagcgaggagcgggaaagaggatgggtctgcacggagagtggaaaggcaggctgtgtactctggggaaagtggagcaaggaaggagctacagtggccgacgctggaggtcggctgcagaaaaactagaaaaagtagggaggaaagaggaaaagaggaggcgtctacactgagggggttctagagagggaggggtggactccgtagatgggggtagttcagtctcgaaacctggggcgtgctctgtcctggaggagggaggcgggcagtcggaggggaattgaatggaagttctgtgttggaaatgttttgggagatcttctgtagggggactgtggaagggggtctacattggggtaagtgcaggaggtagaggcttacacgtgaatcgattctgcactgaaataactagggaaagaggatgctaccctgaaagtggggatacttactttcgatgatgtgggggagggaggaggtctatactggcggaattgagggagtggagggtctgcactgaagacgctggggaaggatgtgccatggatatgggaaggaaccctagctgattagagagcctctcgggaggatgggaggatgggaagaggaggtttcctgtttgtacccccgaaaatatgggtgaaggacctgtgccgtggcccgtgagaaggaggtctgggtgcggaaactccaggccaggtgggtccgggggaggccggtcgcgcccaggaaatgccctatacgcgcaggccggaccatgggaaccccaaagccacggatcctgccctggctggtgtcgcagctggacctggggcaactggagggcgtggcctgggtgaacaagagccgcacgcgcttccgcatcccttggaagcacggcctacggcaggatgcacagcaggaggatttcggaatcttccaggtgcgtgcgacgacctgggacgctggaaacccggagctgcgcgctgggcggaaaggactcctagtgggcccggctgagaaggcggaggtggcgcgcgaggggcgggctcgtgccaacgctggtgggtggggctagaacgggaggggcggggctagccggatccgctgactgatggtggggcgcaagcagggttggagctgcagggttacgggaataaaaccgggaaagccggttagtacgcaaaggaaatgcatcctgggggtttggggctttctagaggccggggctcttggttgtaggatagatactgggggatggttcttgaaacatcagaggtgaggcctggagccccaaatctgaggttcctaactaccgaattagtatatgccagaggtggtaaacagtgtgaggggcggggttatcacagagggtgtcgcggggcaggtggtgcacgggattagacaccaagttggacttggaagcctggcttagaaagaaaaggtttttgggccgggggcggtggttcacacctgtaatcctagcactttgcaaggccaaggcgggaggatcgcttgagcccaggagtttgaggccagcttgggcaacataggctccatctctttaaaaacaaaagcgaaacaaaacaaaaaccaaagaggtttcaaaggcttttgaagaggccgagcacagtagctcatgcctgtaatcccagcactttgggaggccgaggaggacggatcacctgaggtcaggagttcaagaccagcctggccaacatggtgaaaccccatctctactaaaaatacaaaaattagccaggtgtagtggtgcccacctgtaatcccagctactcaggaggctgagacaggagaatcgcttgaaccggggaggcggaagttgcagtgagctgagattgcaccattgcattccagcctgggtgacaggagtgaaactccatctcaaaaagaaaaaaagccttttgaaaactagaggtgggggatggaggtaggtgggacggggggatttggggatggaccttgcagagttagaacttgccagggaaagagggtggtgttaggactcgggagacagggttagggccccaggagcaggatctaagtcgtcctcccccaccatcctgacaccactgttgccccaggcctgggccgaggccactggtgcatatgttcccgggagggataagccagacctgccaacctggaagaggaatttccgctctgccctcaaccgcaaagaagggttgcgtttagcagaggaccggagcaaggaccctcacgacccacataaaatctacgagtttgtgaactcaggtctgccagcttggggttcgtgtgggaggctggggccccaagggttcctggcactcctactcccctcaccacttttctcaacaggagttggggacttttcccagccagacacctctccggacaccaatggtggaggcagtacttctgatacccaggtgagaatgtgcccaactttcatgcccctcagtctccgacctgtctccatgggccttgtcctctccctctagacgatccccccactcccctgcctccagcctgcccctcacctgagccagtgctgaccctgtctgtccctgccccggtctcctcaggagaaaattccaagtcttcacccagcattcaaggcccgagcacaccttcccgggatttcatggatttcgattcgcagggggctgtcagcctcttgggaactgaaaaactccctcaccttgatcctgctgaggcccaagctgggggagcatcccctctgaaattctacccagcctgctttgcccaggtcttacctgcatagagccagatccttgggttggaatggtagcacctggcgttcattagtgtttgtttggctgttgatgccatggctggctctgtccccaggctggaagccccttgaaggcagagctcaagcctgacctccctgcgttgctgagaacagacctggtccatatgaagtctccagaaaaggatatggaaatgcctgattctctttttttgtttccctccaggaagacattctggatgagttactgggtaacatggtgttggccccactcccagatccgggacccccaagcctggctgtagcccctgagccctgccctcagcccctgcggagccccagcttggacaatcccactcccttcccaaacctggggccctctgagaacccactgaagcggctgttggtgccgggggaaggtgagtgtcagctgcaggctgggagggctgaggtctgggcggcagcccctgattctcaacccctctccccttcatgccgctgctgccgctgctcagagtgggagttcgaggtgacagccttctaccggggccgccaagtcttccagcagaccatctcctgcccggagggcctgcggctggtggggtccgaagtgggagacaggacgctgcctggatggccagtcacactgccagaccctggcatgtccctgacagacaggggagtgatgagctacgtgaggcatgtgctgagctgcctgggtgggggactggctctctggcgggccgggcagtggctctgggcccagcggctggggcactgccacacatactgggcagtgagcgaggagctgctccccaacagcgggcatgggcctgatggcgaggtccccaaggacaaggaaggaggcgtgtttgacctggggcccttcattgtaggtgagtgagacaggggcttcgacctggccagtacaaagcagcctgcacagtggttaacaactcaggattggccgggcacggtggctcacgcctgtagtcccagcactttgggaggctgaggtgggcagatgacaagttcaggagttcgagaccagcctggtcaacatagtgaaaccccatctctactaaagatacaaaaaaatagtcgggcgtggtggcacgtgcctgtaatcccagctactcgggaggctgaggcaggagaattgcttgaacccaggaggcggagattgcagtgagctgagatcgcaccactgcactctagcctggtgacagagtaagactccatctcgaacaacaaaaaaaaaagaactcatgattaggactgaattcagacgctggctgcccttggcccgctgtataaccgaggcaaaggactttgccctgagcccgtggaatccaaggatggtctcctctctctacctgcctgccagcgctggggtgagacacaggcccagtacacagagcctgctcagggaattagctgccactgtcatcatcatcgtaactaatgatggtgaacagaccaatagcaggaaagctacatcccttagggtttcgctgtgcagtggcactttctgccatgatggaaatgacagtcacctgcactgtccggtgcagcagccactagccacaggggccaagcactcaggtgaggcgagtgcaaccaggacgtgattcgttttaattggttacaatttaaactgaaataaccttacatgactaatggctgcaattggacaatgcagcctcagacaggactgaatgccaaccagcttctccagattcactgagcatccttgggagcatgggccccctactctgggcctgttatgaatgctgaggcttgggggcttgggggtgtggccttccaacaaccccaccctgatgggagggagggagggagggaaggaggggactttccccaaacaagcagtcccctggtcgaggcagcagagggccttaggtcaggggaggtggtgggggttatcattcaagtttacggggaagggtgggtagagggtcctcttctcatccctgactaggctcctgggcccccagatctgattaccttcacggaaggaagcggacgctcaccacgctatgccctctggttctgtgtgggggagtcatggccccaggaccagccgtggaccaagaggctcgtgatggtcaaggtgcctgcagacctgagtccctggggctgaaaggggtggccttacagagggaagaggttgctcccaggaactccaactcccagagggccctctaaaaaactgcaacttccaagatctctgcaataaccagtttttcatccccgggagctccttcccatggcctcacctgcagaacctgttttgaactctctaaaccagtggcccccaaactatttggcaccagggaccagtctcatggaagataatatttccacggacagggaggtgtggtttcgggatgaaactgctccactgcagatcatcaggcattagattctcttaaggagcagccgatccctcacgtgcgcagttcgatagagtttgtgctcctctgagaatctaatgctgccgctgatctcacagaaggcagagctcaggcagtaatattcccccacccgctgctcacatcctgctgtgcaacctggtccctaacaagccgtaggggggttggggacccctgctctaaaccatgtagaagctggtggactcaagttttagctgccattgtgaggccatggctgtggctcccaggagtcaagatcacagactgctcagccctgacgtgtgtgtgtgtgtgtgtttgtgtgtgtgtgtaaaactacaactcccagcagccctaggcctatggttcagttacagcagggggtgtgtgtgtgtgtgtgtgtgtgtgtgtgtgtgtgtgtgtgtgtaaaactacaactcccagcagccctaggcctatggttcatcctaggttacagcaggggctgcagggagttgtagtcctccaagccctgactcctaccttggtggacagtggctgggtgttttccctgactcctgtccccacttcccctgcaggttgtgcccacgtgcctcagggccttggtagaaatggcccgggtagggggtgcctcctccctggagaatactgtggacctgcacatttccaacagccacccactctccctcacctccgaccagtacaaggcctacctgcaggacttggtggagggcatggatttccagggccctggggagagctgagccctcgctcctcatggtgtgcctccaacccccctgttccccaccacctcaaccaataaactggttcctgctatga

SEQ ID NO: 12647 - DNA, 1595 bp, Homo sapiens
ataggggcgggaacagcccagcgggccgtcccatcggcttttgggtctgttacccaaagaatgataaagttggttttatttcaagaagtcgatcaaaaagaaagccccagcgctctagagctcagctgacgggaaagggggtgcgcagcctcgagtttgagagctacccggagctccaagacaggggtgggttccagctgcccgcacgccccgaccttccatcgtaggccggaccatgggaaccccaaagccacggatcctgccctggctggtgtcgcagctggacctggggcaactggagggcgtggcctgggtgaacaagagccgcacgcgcttccgcatcccttggaagcacggcctacggcaggatgcacagcaggaggatttcggaatcttccaggcctgggccgaggccactggtgcatatgttcccgggagggataagccagacctgccaacctggaagaggaatttccgctctgccctcaaccgcaaagaagggttgcgtttagcagaggaccggagcaaggaccctcacgacccacataaaatctacgagtttgtgaactcaggagttggggacttttcccagccagacacctctccggacaccaatggtggaggcagtacttctgatacccaggaagacattctggatgagttactgggtaacatggtgttggccccactcccagatccgggacccccaagcctggctgtagcccctgagccctgccctcagcccctgcggagccccagcttggacaatcccactcccttcccaaacctggggccctctgagaacccactgaagcggctgttggtgccgggggaagagtgggagttcgaggtgacagccttctaccggggccgccaagtcttccagcagaccatctcctgcccggagggcctgcggctggtggggtccgaagtgggagacaggacgctgcctggatggccagtcacactgccagaccctggcatgtccctgacagacaggggagtgatgagctacgtgaggcatgtgctgagctgcctgggtgggggactggctctctggcgggccgggcagtggctctgggcccagcggctggggcactgccacacatactgggcagtgagcgaggagctgctccccaacagcgggcatgggcctgatggcgaggtccccaaggacaaggaaggaggcgtgtttgacctggggcccttcattgtagatctgattaccttcacggaaggaagcggacgctcaccacgctatgccctctggttctgtgtgggggagtcatggccccaggaccagccgtggaccaagaggctcgtgatggtcaaggttgtgcccacgtgcctcagggccttggtagaaatggcccgggtagggggtgcctcctccctggagaatactgtggacctgcacatttccaacagccacccactctccctcacctccgaccagtacaaggcctacctgcaggacttggtggagggcatggatttccagggccctggggagagctgagccctcgctcctcatggtgtgcctccaacccccctgttccccaccacctcaaccaataaactggttcctgctatga

SEQ ID NO: 12648 - DNA, 2300 bp, Homo sapiens
atgggaaccccaaagccacggatcctgccctggctggtgtcgcagctggacctggggcaactggagggcgtggcctgggtgaacaagagccgcacgcgcttccgcatcccttggaagcacggcctacggcaggatgcacagcaggaggatttcggaatcttccaggtgcgtgcgacgacctgggacgctggaaacccggagctgcgcgctgggcggaaaggactcctagtgggcccggctgagaaggcggaggtggcgcgcgaggggcgggctcgtgccaacgctggtgggtggggctagaacgggaggggcggggctagccggatccgctgactgatggtggggcgcaagcagggttggagctgcagggttacgggaataaaaccgggaaagccggttagtacgcaaaggaaatgcatcctgggggtttggggctttctagaggccggggctcttggttgtaggatagatactgggggatggttcttgaaacatcagaggtgaggcctggagccccaaatctgaggttcctaactaccgaattagtatatgccagaggtggtaaacagtgtgaggggcggggttatcacagagggtgtcgcggggcaggtggtgcacgggattagacaccaagttggacttggaagcctggcttagaaagaaaaggtttttgggccgggggcggtggttcacacctgtaatcctagcactttgcaaggccaaggcgggaggatcgcttgagcccaggagtttgaggccagcttgggcaacataggctccatctctttaaaaacaaaagcgaaacaaaacaaaaaccaaagaggtttcaaaggcttttgaagaggccgagcacagtagctcatgcctgtaatcccagcactttgggaggccgaggaggacggatcacctgaggtcaggagttcaagaccagcctggccaacatggtgaaaccccatctctactaaaaatacaaaaattagccaggtgtagtggtgcccacctgtaatcccagctactcaggaggctgagacaggagaatcgcttgaaccggggaggcggaagttgcagtgagctgagattgcaccattgcattccagcctgggtgacaggagtgaaactccatctcaaaaagaaaaaaagccttttgaaaactagaggtgggggatggaggtaggtgggacggggggatttggggatggaccttgcagagttagaacttgccagggaaagagggtggtgttaggactcgggagacagggttagggccccaggagcaggatctaagtcgtcctcccccaccatcctgacaccactgttgccccaggcctgggccgaggccactggtgcatatgttcccgggagggataagccagacctgccaacctggaagaggaatttccgctctgccctcaaccgcaaagaagggttgcgtttagcagaggaccggagcaaggaccctcacgacccacataaaatctacgagtttgtgaactcaggtctgccagcttggggttcgtgtgggaggctggggccccaagggttcctggcactcctactcccctcaccacttttctcaacaggagttggggacttttcccagccagacacctctccggacaccaatggtggaggcagtacttctgatacccaggtgagaatgtgcccaactttcatgcccctcagtctccgacctgtctccatgggccttgtcctctccctctagacgatccccccactcccctgcctccagcctgcccctcacctgagccagtgctgaccctgtctgtccctgccccggtctcctcaggagaaaattccaagtcttcacccagcattcaaggcccgagcacaccttcccgggatttcatggatttcgattcgcagggggctgtcagcctcttgggaactgaaaaactccctcaccttgatcctgctgaggcccaagctgggggagcatcccctctgaaattctacccagcctgctttgcccaggtcttacctgcatagagccagatccttgggttggaatggtagcacctggcgttcattagtgtttgtttggctgttgatgccatggctggctctgtccccaggctggaagccccttgaaggcagagctcaagcctgacctccctgcgttgctgagaacagacctggtccatatgaagtctccagaaaaggatatggaaatgcctgattctctttttttgtttccctccaggaagacattctggatgagttactgggtaacatggtgttggccccactcccagatccgggacccccaagcctggctgtag

SEQ ID NO: 12649 - DNA, 315 bp, Homo sapiens
atgggaaccccaaagccacggatcctgccctggctggtgtcgcagctggacctggggcaactggagggcgtggcctgggtgaacaagagccgcacgcgcttccgcatcccttggaagcacggcctacggcaggatgcacagcaggaggatttcggaatcttccaggagttggggacttttcccagccagacacctctccggacaccaatggtggaggcagtacttctgatacccaggaagacattctggatgagttactgggtaacatggtgttggccccactcccagatccgggacccccaagcctggctgtag

SEQ ID NO: 12650 - DNA, 3535 bp, Homo sapiens
gggccgtcccatcggcttttgggtctgttacccaaagaatgataaagttggttttatttcaagaagtcgatcaaaaagaaagccccagcgctctagagctcagctgacgggaaagggggtgcgcagcctcgagtttgagagctacccggagctccaagacaggggtgggttccagctgcccgcacgccccgaccttccatcgtaggtaacgcggaagagcccgggagagcgttggtggcgtccgagagcgaggagcgggaaagaggatgggtctgcacggagagtggaaaggcaggctgtgtactctggggaaagtggagcaaggaaggagctacagtggccgacgctggaggtcggctgcagaaaaactagaaaaagtagggaggaaagaggaaaagaggaggcgtctacactgagggggttctagagagggaggggtggactccgtagatgggggtagttcagtctcgaaacctggggcgtgctctgtcctggaggagggaggcgggcagtcggaggggaattgaatggaagttctgtgttggaaatgttttgggagatcttctgtagggggactgtggaagggggtctacattggggtaagtgcaggaggtagaggcttacacgtgaatcgattctgcactgaaataactagggaaagaggatgctaccctgaaagtggggatacttactttcgatgatgtgggggagggaggaggtctatactggcggaattgagggagtggagggtctgcactgaagacgctggggaaggatgtgccatggatatgggaaggaaccctagctgattagagagcctctcgggaggatgggaggatgggaagaggaggtttcctgtttgtacccccgaaaatatgggtgaaggacctgtgccgtggcccgtgagaaggaggtctgggtgcggaaactccaggccaggtgggtccgggggaggccggtcgcgcccaggaaatgccctatacgcgcaggccggaccatgggaaccccaaagccacggatcctgccctggctggtgtcgcagctggacctggggcaactggagggcgtggcctgggtgaacaagagccgcacgcgcttccgcatcccttggaagcacggcctacggcaggatgcacagcaggaggatttcggaatcttccaggtgcgtgcgacgacctgggacgctggaaacccggagctgcgcgctgggcggaaaggactcctagtgggcccggctgagaaggcggaggtggcgcgcgaggggcgggctcgtgccaacgctggtgggtggggctagaacgggaggggcggggctagccggatccgctgactgatggtggggcgcaagcagggttggagctgcagggttacgggaataaaaccgggaaagccggttagtacgcaaaggaaatgcatcctgggggtttggggctttctagaggccggggctcttggttgtaggatagatactgggggatggttcttgaaacatcagaggtgaggcctggagccccaaatctgaggttcctaactaccgaattagtatatgccagaggtggtaaacagtgtgaggggcggggttatcacagagggtgtcgcggggcaggtggtgcacgggattagacaccaagttggacttggaagcctggcttagaaagaaaaggtttttgggccgggggcggtggttcacacctgtaatcctagcactttgcaaggccaaggcgggaggatcgcttgagcccaggagtttgaggccagcttgggcaacataggctccatctctttaaaaacaaaagcgaaacaaaacaaaaaccaaagaggtttcaaaggcttttgaagaggccgagcacagtagctcatgcctgtaatcccagcactttgggaggccgaggaggacggatcacctgaggtcaggagttcaagaccagcctggccaacatggtgaaaccccatctctactaaaaatacaaaaattagccaggtgtagtggtgcccacctgtaatcccagctactcaggaggctgagacaggagaatcgcttgaaccggggaggcggaagttgcagtgagctgagattgcaccattgcattccagcctgggtgacaggagtgaaactccatctcaaaaagaaaaaaagccttttgaaaactagaggtgggggatggaggtaggtgggacggggggatttggggatggaccttgcagagttagaacttgccagggaaagagggtggtgttaggactcgggagacagggttagggccccaggagcaggatctaagtcgtcctcccccaccatcctgacaccactgttgccccaggcctgggccgaggccactggtgcatatgttcccgggagggataagccagacctgccaacctggaagaggaatttccgctctgccctcaaccgcaaagaagggttgcgtttagcagaggaccggagcaaggaccctcacgacccacataaaatctacgagtttgtgaactcaggtctgccagcttggggttcgtgtgggaggctggggccccaagggttcctggcactcctactcccctcaccacttttctcaacaggagttggggacttttcccagccagacacctctccggacaccaatggtggaggcagtacttctgatacccaggtgagaatgtgcccaactttcatgcccctcagtctccgacctgtctccatgggccttgtcctctccctctagacgatccccccactcccctgcctccagcctgcccctcacctgagccagtgctgaccctgtctgtccctgccccggtctcctcaggagaaaattccaagtcttcacccagcattcaaggcccgagcacaccttcccgggatttcatggatttcgattcgcagggggctgtcagcctcttgggaactgaaaaactccctcaccttgatcctgctgaggcccaagctgggggagcatcccctctgaaattctacccagcctgctttgcccaggtcttacctgcatagagccagatccttgggttggaatggtagcacctggcgttcattagtgtttgtttggctgttgatgccatggctggctctgtccccaggctggaagccccttgaaggcagagctcaagcctgacctccctgcgttgctgagaacagacctggtccatatgaagtctccagaaaaggatatggaaatgcctgattctctttttttgtttccctccaggaagacattctggatgagttactgggtaacatggtgttggccccactcccagatccgggacccccaagcctggctgtagcccctgagccctgccctcagcccctgcggagccccagcttggacaatcccactcccttcccaaacctggggccctctgagaacccactgaagcggctgttggtgccgggggaaggtgagtgtcagctgcaggctgggagggctgaggtctgggcggcagcccctgattctcaacccctctccccttcatgccgctgctgccgctgctcagagtgggagttcgaggtgacagccttcta

SEQ ID NO: 12651 - DNA, 633 bp, Homo sapiens
gggccgtcccatcggcttttgggtctgttacccaaagaatgataaagttggttttatttcaagaagtcgatcaaaaagaaagccccagcgctctagagctcagctgacgggaaagggggtgcgcagcctcgagtttgagagctacccggagctccaagacaggggccggaccatgggaaccccaaagccacggatcctgccctggctggtgtcgcagctggacctggggcaactggagggcgtggcctgggtgaacaagagccgcacgcgcttccgcatcccttggaagcacggcctacggcaggatgcacagcaggaggatttcggaatcttccaggcctgggccgaggccactggtgcatatgttcccgggagggataagccagacctgccaacctggaagaggaatttccgctctgccctcaaccgcaaagaagggttgcgtttagcagaggaccggagcaaggaccctcacgacccacataaaatctacgagtttgtgaactcaggagttggggacttttcccagccagacacctctccggacaccaatggtggaggcagtacttctgatacccaggaagacattctggatgagttactggagtgggagttcgaggtgacagccttcta

SEQ ID NO: 12652 - DNA, 3673 bp, Homo sapiens
gaacagcccagcgggccgtcccatcggcttttgggtctgttacccaaagaatgataaagttggttttatttcaagaagtcgatcaaaaagaaagccccagcgctctagagctcagctgacgggaaagggggtgcgcagcctcgagtttgagagctacccggagctccaagacaggggtgggttccagctgcccgcacgccccgaccttccatcgtaggtaacgcggaagagcccgggagagcgttggtggcgtccgagagcgaggagcgggaaagaggatgggtctgcacggagagtggaaaggcaggctgtgtactctggggaaagtggagcaaggaaggagctacagtggccgacgctggaggtcggctgcagaaaaactagaaaaagtagggaggaaagaggaaaagaggaggcgtctacactgagggggttctagagagggaggggtggactccgtagatgggggtagttcagtctcgaaacctggggcgtgctctgtcctggaggagggaggcgggcagtcggaggggaattgaatggaagttctgtgttggaaatgttttgggagatcttctgtagggggactgtggaagggggtctacattggggtaagtgcaggaggtagaggcttacacgtgaatcgattctgcactgaaataactagggaaagaggatgctaccctgaaagtggggatacttactttcgatgatgtgggggagggaggaggtctatactggcggaattgagggagtggagggtctgcactgaagacgctggggaaggatgtgccatggatatgggaaggaaccctagctgattagagagcctctcgggaggatgggaggatgggaagaggaggtttcctgtttgtacccccgaaaatatgggtgaaggacctgtgccgtggcccgtgagaaggaggtctgggtgcggaaactccaggccaggtgggtccgggggaggccggtcgcgcccaggaaatgccctatacgcgcaggccggaccatgggaaccccaaagccacggatcctgccctggctggtgtcgcagctggacctggggcaactggagggcgtggcctgggtgaacaagagccgcacgcgcttccgcatcccttggaagcacggcctacggcaggatgcacagcaggaggatttcggaatcttccaggtgcgtgcgacgacctgggacgctggaaacccggagctgcgcgctgggcggaaaggactcctagtgggcccggctgagaaggcggaggtggcgcgcgaggggcgggctcgtgccaacgctggtgggtggggctagaacgggaggggcggggctagccggatccgctgactgatggtggggcgcaagcagggttggagctgcagggttacgggaataaaaccgggaaagccggttagtacgcaaaggaaatgcatcctgggggtttggggctttctagaggccggggctcttggttgtaggatagatactgggggatggttcttgaaacatcagaggtgaggcctggagccccaaatctgaggttcctaactaccgaattagtatatgccagaggtggtaaacagtgtgaggggcggggttatcacagagggtgtcgcggggcaggtggtgcacgggattagacaccaagttggacttggaagcctggcttagaaagaaaaggtttttgggccgggggcggtggttcacacctgtaatcctagcactttgcaaggccaaggcgggaggatcgcttgagcccaggagtttgaggccagcttgggcaacataggctccatctctttaaaaacaaaagcgaaacaaaacaaaaaccaaagaggtttcaaaggcttttgaagaggccgagcacagtagctcatgcctgtaatcccagcactttgggaggccgaggaggacggatcacctgaggtcaggagttcaagaccagcctggccaacatggtgaaaccccatctctactaaaaatacaaaaattagccaggtgtagtggtgcccacctgtaatcccagctactcaggaggctgagacaggagaatcgcttgaaccggggaggcggaagttgcagtgagctgagattgcaccattgcattccagcctgggtgacaggagtgaaactccatctcaaaaagaaaaaaagccttttgaaaactagaggtgggggatggaggtaggtgggacggggggatttggggatggaccttgcagagttagaacttgccagggaaagagggtggtgttaggactcgggagacagggttagggccccaggagcaggatctaagtcgtcctcccccaccatcctgacaccactgttgccccaggcctgggccgaggccactggtgcatatgttcccgggagggataagccagacctgccaacctggaagaggaatttccgctctgccctcaaccgcaaagaagggttgcgtttagcagaggaccggagcaaggaccctcacgacccacataaaatctacgagtttgtgaactcaggtctgccagcttggggttcgtgtgggaggctggggccccaagggttcctggcactcctactcccctcaccacttttctcaacaggagttggggacttttcccagccagacacctctccggacaccaatggtggaggcagtacttctgatacccaggtgagaatgtgcccaactttcatgcccctcagtctccgacctgtctccatgggccttgtcctctccctctagacgatccccccactcccctgcctccagcctgcccctcacctgagccagtgctgaccctgtctgtccctgccccggtctcctcaggagaaaattccaagtcttcacccagcattcaaggcccgagcacaccttcccgggatttcatggatttcgattcgcagggggctgtcagcctcttgggaactgaaaaactccctcaccttgatcctgctgaggcccaagctgggggagcatcccctctgaaattctacccagcctgctttgcccaggtcttacctgcatagagccagatccttgggttggaatggtagcacctggcgttcattagtgtttgtttggctgttgatgccatggctggctctgtccccaggctggaagccccttgaaggcagagctcaagcctgacctccctgcgttgctgagaacagacctggtccatatgaagtctccagaaaaggatatggaaatgcctgattctctttttttgtttccctccaggaagacattctggatgagttactgggtaacatggtgttggccccactcccagatccgggacccccaagcctggctgtagcccctgagccctgccctcagcccctgcggagccccagcttggacaatcccactcccttcccaaacctggggccctctgagaacccactgaagcggctgttggtgccgggggaaggtgagtgtcagctgcaggctgggagggctgaggtctgggcggcagcccctgattctcaacccctctccccttcatgccgctgctgccgctgctcagagtgggagttcgaggtgacagccttctaccggggccgccaagtcttccagcagaccatctcctgcccggagggcctgcggctggtggggtccgaagtgggagacaggacgctgcctggatggccagtcacactgccagaccctggcatgtccct

SEQ ID NO: 12653 - DNA, 924 bp, Homo sapiens
gaacagcccagcgggccgtcccatcggcttttgggtctgttacccaaagaatgataaagttggttttatttcaagaagtcgatcaaaaagaaagccccagcgctctagagctcagctgacgggaaagggggtgcgcagcctcgagtttgagagctacccggagctccaagacaggggtgggttccagctgcccgcacgccccgaccttccatcgtgcgtgcgacgacctgggacgctggaaacccggagctgcgcgctgggcggaaaggactcctagtgggcccggctgagaaggcggaggtggcgcgcgaggggcgggctcgtgccaacgctggcctgggccgaggccactggtgcatatgttcccgggagggataagccagacctgccaacctggaagaggaatttccgctctgccctcaaccgcaaagaagggttgcgtttagcagaggaccggagcaaggaccctcacgacccacataaaatctacgagtttgtgaactcaggagttggggacttttcccagccagacacctctccggacaccaatggtggaggcagtacttctgatacccaggaagacattctggatgagttactgggtaacatggtgttggccccactcccagatccgggacccccaagcctggctgtagcccctgagccctgccctcagcccctgcggagccccagcttggacaatcccactcccttcccaaacctggggccctctgagaacccactgaagcggctgttggtgccgggggaagagtgggagttcgaggtgacagccttctaccggggccgccaagtcttccagcagaccatctcctgcccggagggcctgcggctggtggggtccgaagtgggagacaggacgctgcctggatggccagtcacactgccagaccctggcatgtccct

SEQ ID NO: 12654 - DNA, 6127 bp, Homo sapiens
gagtttgagagctacccggagctccaagacaggggtgggttccagctgcccgcacgccccgaccttccatcgtaggtaacgcggaagagcccgggagagcgttggtggcgtccgagagcgaggagcgggaaagaggatgggtctgcacggagagtggaaaggcaggctgtgtactctggggaaagtggagcaaggaaggagctacagtggccgacgctggaggtcggctgcagaaaaactagaaaaagtagggaggaaagaggaaaagaggaggcgtctacactgagggggttctagagagggaggggtggactccgtagatgggggtagttcagtctcgaaacctggggcgtgctctgtcctggaggagggaggcgggcagtcggaggggaattgaatggaagttctgtgttggaaatgttttgggagatcttctgtagggggactgtggaagggggtctacattggggtaagtgcaggaggtagaggcttacacgtgaatcgattctgcactgaaataactagggaaagaggatgctaccctgaaagtggggatacttactttcgatgatgtgggggagggaggaggtctatactggcggaattgagggagtggagggtctgcactgaagacgctggggaaggatgtgccatggatatgggaaggaaccctagctgattagagagcctctcgggaggatgggaggatgggaagaggaggtttcctgtttgtacccccgaaaatatgggtgaaggacctgtgccgtggcccgtgagaaggaggtctgggtgcggaaactccaggccaggtgggtccgggggaggccggtcgcgcccaggaaatgccctatacgcgcaggccggaccatgggaaccccaaagccacggatcctgccctggctggtgtcgcagctggacctggggcaactggagggcgtggcctgggtgaacaagagccgcacgcgcttccgcatcccttggaagcacggcctacggcaggatgcacagcaggaggatttcggaatcttccaggtgcgtgcgacgacctgggacgctggaaacccggagctgcgcgctgggcggaaaggactcctagtgggcccggctgagaaggcggaggtggcgcgcgaggggcgggctcgtgccaacgctggtgggtggggctagaacgggaggggcggggctagccggatccgctgactgatggtggggcgcaagcagggttggagctgcagggttacgggaataaaaccgggaaagccggttagtacgcaaaggaaatgcatcctgggggtttggggctttctagaggccggggctcttggttgtaggatagatactgggggatggttcttgaaacatcagaggtgaggcctggagccccaaatctgaggttcctaactaccgaattagtatatgccagaggtggtaaacagtgtgaggggcggggttatcacagagggtgtcgcggggcaggtggtgcacgggattagacaccaagttggacttggaagcctggcttagaaagaaaaggtttttgggccgggggcggtggttcacacctgtaatcctagcactttgcaaggccaaggcgggaggatcgcttgagcccaggagtttgaggccagcttgggcaacataggctccatctctttaaaaacaaaagcgaaacaaaacaaaaaccaaagaggtttcaaaggcttttgaagaggccgagcacagtagctcatgcctgtaatcccagcactttgggaggccgaggaggacggatcacctgaggtcaggagttcaagaccagcctggccaacatggtgaaaccccatctctactaaaaatacaaaaattagccaggtgtagtggtgcccacctgtaatcccagctactcaggaggctgagacaggagaatcgcttgaaccggggaggcggaagttgcagtgagctgagattgcaccattgcattccagcctgggtgacaggagtgaaactccatctcaaaaagaaaaaaagccttttgaaaactagaggtgggggatggaggtaggtgggacggggggatttggggatggaccttgcagagttagaacttgccagggaaagagggtggtgttaggactcgggagacagggttagggccccaggagcaggatctaagtcgtcctcccccaccatcctgacaccactgttgccccaggcctgggccgaggccactggtgcatatgttcccgggagggataagccagacctgccaacctggaagaggaatttccgctctgccctcaaccgcaaagaagggttgcgtttagcagaggaccggagcaaggaccctcacgacccacataaaatctacgagtttgtgaactcaggtctgccagcttggggttcgtgtgggaggctggggccccaagggttcctggcactcctactcccctcaccacttttctcaacaggagttggggacttttcccagccagacacctctccggacaccaatggtggaggcagtacttctgatacccaggtgagaatgtgcccaactttcatgcccctcagtctccgacctgtctccatgggccttgtcctctccctctagacgatccccccactcccctgcctccagcctgcccctcacctgagccagtgctgaccctgtctgtccctgccccggtctcctcaggagaaaattccaagtcttcacccagcattcaaggcccgagcacaccttcccgggatttcatggatttcgattcgcagggggctgtcagcctcttgggaactgaaaaactccctcaccttgatcctgctgaggcccaagctgggggagcatcccctctgaaattctacccagcctgctttgcccaggtcttacctgcatagagccagatccttgggttggaatggtagcacctggcgttcattagtgtttgtttggctgttgatgccatggctggctctgtccccaggctggaagccccttgaaggcagagctcaagcctgacctccctgcgttgctgagaacagacctggtccatatgaagtctccagaaaaggatatggaaatgcctgattctctttttttgtttccctccaggaagacattctggatgagttactgggtaacatggtgttggccccactcccagatccgggacccccaagcctggctgtagcccctgagccctgccctcagcccctgcggagccccagcttggacaatcccactcccttcccaaacctggggccctctgagaacccactgaagcggctgttggtgccgggggaaggtgagtgtcagctgcaggctgggagggctgaggtctgggcggcagcccctgattctcaacccctctccccttcatgccgctgctgccgctgctcagagtgggagttcgaggtgacagccttctaccggggccgccaagtcttccagcagaccatctcctgcccggagggcctgcggctggtggggtccgaagtgggagacaggacgctgcctggatggccagtcacactgccagaccctggcatgtccctgacagacaggggagtgatgagctacgtgaggcatgtgctgagctgcctgggtgggggactggctctctggcgggccgggcagtggctctgggcccagcggctggggcactgccacacatactgggcagtgagcgaggagctgctccccaacagcgggcatgggcctgatggcgaggtccccaaggacaaggaaggaggcgtgtttgacctggggcccttcattgtaggtgagtgagacaggggcttcgacctggccagtacaaagcagcctgcacagtggttaacaactcaggattggccgggcacggtggctcacgcctgtagtcccagcactttgggaggctgaggtgggcagatgacaagttcaggagttcgagaccagcctggtcaacatagtgaaaccccatctctactaaagatacaaaaaaatagtcgggcgtggtggcacgtgcctgtaatcccagctactcgggaggctgaggcaggagaattgcttgaacccaggaggcggagattgcagtgagctgagatcgcaccactgcactctagcctggtgacagagtaagactccatctcgaacaacaaaaaaaaaagaactcatgattaggactgaattcagacgctggctgcccttggcccgctgtataaccgaggcaaaggactttgccctgagcccgtggaatccaaggatggtctcctctctctacctgcctgccagcgctggggtgagacacaggcccagtacacagagcctgctcagggaattagctgccactgtcatcatcatcgtaactaatgatggtgaacagaccaatagcaggaaagctacatcccttagggtttcgctgtgcagtggcactttctgccatgatggaaatgacagtcacctgcactgtccggtgcagcagccactagccacaggggccaagcactcaggtgaggcgagtgcaaccaggacgtgattcgttttaattggttacaatttaaactgaaataaccttacatgactaatggctgcaattggacaatgcagcctcagacaggactgaatgccaaccagcttctccagattcactgagcatccttgggagcatgggccccctactctgggcctgttatgaatgctgaggcttgggggcttgggggtgtggccttccaacaaccccaccctgatgggagggagggagggagggaaggaggggactttccccaaacaagcagtcccctggtcgaggcagcagagggccttaggtcaggggaggtggtgggggttatcattcaagtttacggggaagggtgggtagagggtcctcttctcatccctgactaggctcctgggcccccagatctgattaccttcacggaaggaagcggacgctcaccacgctatgccctctggttctgtgtgggggagtcatggccccaggaccagccgtggaccaagaggctcgtgatggtcaaggtgcctgcagacctgagtccctggggctgaaaggggtggccttacagagggaagaggttgctcccaggaactccaactcccagagggccctctaaaaaactgcaacttccaagatctctgcaataaccagtttttcatccccgggagctccttcccatggcctcacctgcagaacctgttttgaactctctaaaccagtggcccccaaactatttggcaccagggaccagtctcatggaagataatatttccacggacagggaggtgtggtttcgggatgaaactgctccactgcagatcatcaggcattagattctcttaaggagcagccgatccctcacgtgcgcagttcgatagagtttgtgctcctctgagaatctaatgctgccgctgatctcacagaaggcagagctcaggcagtaatattcccccacccgctgctcacatcctgctgtgcaacctggtccctaacaagccgtaggggggttggggacccctgctctaaaccatgtagaagctggtggactcaagttttagctgccattgtgaggccatggctgtggctcccaggagtcaagatcacagactgctcagccctgacgtgtgtgtgtgtgtgtgtttgtgtgtgtgtgtaaaactacaactcccagcagccctaggcctatggttcagttacagcagggggtgtgtgtgtgtgtgtgtgtgtgtgtgtgtgtgtgtgtgtgtgtaaaactacaactcccagcagccctaggcctatggttcatcctaggttacagcaggggctgcagggagttgtagtcctccaagccctgactcctaccttggtggacagtggctgggtgttttccctgactcctgtccccacttcccctgcaggttgtgcccacgtgcctcagggccttggtagaaatggcccgggtagggggtgcctcctccctggagaatactgtggacctgcacatttccaacagccacccactctccctcacctccgaccagtacaaggcctacctgcaggacttggtggagggcatggatttccagggccctggggagagctgagccctcgctcctcatggtgtgcctccaacccccctgttccccaccacctcaaccaataaactggttcct

SEQ ID NO: 12655 - DNA, 1494 bp, Homo sapiens
gagtttgagagctacccggagctccaagacaggggtgggttccagctgcccgcacgccccgaccttccatcgtaggtgcgtgcgacgacctgggacgctggaaacccggagctgcgcgctgggcggaaaggactcctagtgggcccggctgagaaggcggaggtggcgcgcgaggggcgggctcgtgccaacgctggtgggtggggctagaacgggaggggcggggctagccggatccgctgactgatggtggggcgcaagcagggttggagctgcagggttacgggaataaaaccgggaaagccggcctgggccgaggccactggtgcatatgttcccgggagggataagccagacctgccaacctggaagaggaatttccgctctgccctcaaccgcaaagaagggttgcgtttagcagaggaccggagcaaggaccctcacgacccacataaaatctacgagtttgtgaactcaggagttggggacttttcccagccagacacctctccggacaccaatggtggaggcagtacttctgatacccaggaagacattctggatgagttactgggtaacatggtgttggccccactcccagatccgggacccccaagcctggctgtagcccctgagccctgccctcagcccctgcggagccccagcttggacaatcccactcccttcccaaacctggggccctctgagaacccactgaagcggctgttggtgccgggggaagagtgggagttcgaggtgacagccttctaccggggccgccaagtcttccagcagaccatctcctgcccggagggcctgcggctggtggggtccgaagtgggagacaggacgctgcctggatggccagtcacactgccagaccctggcatgtccctgacagacaggggagtgatgagctacgtgaggcatgtgctgagctgcctgggtgggggactggctctctggcgggccgggcagtggctctgggcccagcggctggggcactgccacacatactgggcagtgagcgaggagctgctccccaacagcgggcatgggcctgatggcgaggtccccaaggacaaggaaggaggcgtgtttgacctggggcccttcattgtagatctgattaccttcacggaaggaagcggacgctcaccacgctatgccctctggttctgtgtgggggagtcatggccccaggaccagccgtggaccaagaggctcgtgatggtcaaggttgtgcccacgtgcctcagggccttggtagaaatggcccgggtagggggtgcctcctccctggagaatactgtggacctgcacatttccaacagccacccactctccctcacctccgaccagtacaaggcctacctgcaggacttggtggagggcatggatttccagggccctggggagagctgagccctcgctcctcatggtgtgcctccaacccccctgttccccaccacctcaaccaataaactggttcct

SEQ ID NO: 12656 - DNA, 3354 bp, Homo sapiens
atttcaagaagtcgatcaaaaagaaagccccagcgctctagagctcagctgacgggaaagggggtgcgcagcctcgagtttgagagctacccggagctccaagacaggggtgggttccagctgcccgcacgccccgaccttccatcgtaggtaacgcggaagagcccgggagagcgttggtggcgtccgagagcgaggagcgggaaagaggatgggtctgcacggagagtggaaaggcaggctgtgtactctggggaaagtggagcaaggaaggagctacagtggccgacgctggaggtcggctgcagaaaaactagaaaaagtagggaggaaagaggaaaagaggaggcgtctacactgagggggttctagagagggaggggtggactccgtagatgggggtagttcagtctcgaaacctggggcgtgctctgtcctggaggagggaggcgggcagtcggaggggaattgaatggaagttctgtgttggaaatgttttgggagatcttctgtagggggactgtggaagggggtctacattggggtaagtgcaggaggtagaggcttacacgtgaatcgattctgcactgaaataactagggaaagaggatgctaccctgaaagtggggatacttactttcgatgatgtgggggagggaggaggtctatactggcggaattgagggagtggagggtctgcactgaagacgctggggaaggatgtgccatggatatgggaaggaaccctagctgattagagagcctctcgggaggatgggaggatgggaagaggaggtttcctgtttgtacccccgaaaatatgggtgaaggacctgtgccgtggcccgtgagaaggaggtctgggtgcggaaactccaggccaggtgggtccgggggaggccggtcgcgcccaggaaatgccctatacgcgcaggccggaccatgggaaccccaaagccacggatcctgccctggctggtgtcgcagctggacctggggcaactggagggcgtggcctgggtgaacaagagccgcacgcgcttccgcatcccttggaagcacggcctacggcaggatgcacagcaggaggatttcggaatcttccaggtgcgtgcgacgacctgggacgctggaaacccggagctgcgcgctgggcggaaaggactcctagtgggcccggctgagaaggcggaggtggcgcgcgaggggcgggctcgtgccaacgctggtgggtggggctagaacgggaggggcggggctagccggatccgctgactgatggtggggcgcaagcagggttggagctgcagggttacgggaataaaaccgggaaagccggttagtacgcaaaggaaatgcatcctgggggtttggggctttctagaggccggggctcttggttgtaggatagatactgggggatggttcttgaaacatcagaggtgaggcctggagccccaaatctgaggttcctaactaccgaattagtatatgccagaggtggtaaacagtgtgaggggcggggttatcacagagggtgtcgcggggcaggtggtgcacgggattagacaccaagttggacttggaagcctggcttagaaagaaaaggtttttgggccgggggcggtggttcacacctgtaatcctagcactttgcaaggccaaggcgggaggatcgcttgagcccaggagtttgaggccagcttgggcaacataggctccatctctttaaaaacaaaagcgaaacaaaacaaaaaccaaagaggtttcaaaggcttttgaagaggccgagcacagtagctcatgcctgtaatcccagcactttgggaggccgaggaggacggatcacctgaggtcaggagttcaagaccagcctggccaacatggtgaaaccccatctctactaaaaatacaaaaattagccaggtgtagtggtgcccacctgtaatcccagctactcaggaggctgagacaggagaatcgcttgaaccggggaggcggaagttgcagtgagctgagattgcaccattgcattccagcctgggtgacaggagtgaaactccatctcaaaaagaaaaaaagccttttgaaaactagaggtgggggatggaggtaggtgggacggggggatttggggatggaccttgcagagttagaacttgccagggaaagagggtggtgttaggactcgggagacagggttagggccccaggagcaggatctaagtcgtcctcccccaccatcctgacaccactgttgccccaggcctgggccgaggccactggtgcatatgttcccgggagggataagccagacctgccaacctggaagaggaatttccgctctgccctcaaccgcaaagaagggttgcgtttagcagaggaccggagcaaggaccctcacgacccacataaaatctacgagtttgtgaactcaggtctgccagcttggggttcgtgtgggaggctggggccccaagggttcctggcactcctactcccctcaccacttttctcaacaggagttggggacttttcccagccagacacctctccggacaccaatggtggaggcagtacttctgatacccaggtgagaatgtgcccaactttcatgcccctcagtctccgacctgtctccatgggccttgtcctctccctctagacgatccccccactcccctgcctccagcctgcccctcacctgagccagtgctgaccctgtctgtccctgccccggtctcctcaggagaaaattccaagtcttcacccagcattcaaggcccgagcacaccttcccgggatttcatggatttcgattcgcagggggctgtcagcctcttgggaactgaaaaactccctcaccttgatcctgctgaggcccaagctgggggagcatcccctctgaaattctacccagcctgctttgcccaggtcttacctgcatagagccagatccttgggttggaatggtagcacctggcgttcattagtgtttgtttggctgttgatgccatggctggctctgtccccaggctggaagccccttgaaggcagagctcaagcctgacctccctgcgttgctgagaacagacctggtccatatgaagtctccagaaaaggatatggaaatgcctgattctctttttttgtttccctccaggaagacattctggatgagttactgggtaacatggtgttggccccactcccagatccgggacccccaagcctggctgtagcccctgagccctgccctcagcccctgcggagccccagcttggacaatcccactcccttcccaaacctggggccctctgagaacccactgaagcggctgttggtgccggggga

SEQ ID NO: 12657 - DNA, 800 bp, Homo sapiens
atttcaagaagtcgatcaaaaagaaagccccagcgctctagagctcagctgacgggaaagggggtgcgcagcctcgagtttgagagctacccggagctccaagacaggggccggaccatgggaaccccaaagccacggatcctgccctggctggtgtcgcagctggacctggggcaactggagggcgtggcctgggtgaacaagagccgcacgcgcttccgcatcccttggaagcacggcctacggcaggatgcacagcaggaggatttcggaatcttccaggcctgggccgaggccactggtgcatatgttcccgggagggataagccagacctgccaacctggaagaggaatttccgctctgccctcaaccgcaaagaagggttgcgtttagcagaggaccggagcaaggaccctcacgacccacataaaatctacgagtttgtgaactcaggtctgccagcttggggttcgtgtgggaggctggggccccaagggttcctggcactcctactcccctcaccacttttctcaacaggagttggggacttttcccagccagacacctctccggacaccaatggtggaggcagtacttctgatacccaggaagacattctggatgagttactgggtaacatggtgttggccccactcccagatccgggacccccaagcctggctgtagcccctgagccctgccctcagcccctgcggagccccagcttggacaatcccactcccttcccaaacctggggccctctgagaacccactgaagcggctgttggtgccggggga

SEQ ID NO: 12658 - DNA, 3656 bp, Homo sapiens
ttggttttatttcaagaagtcgatcaaaaagaaagccccagcgctctagagctcagctgacgggaaagggggtgcgcagcctcgagtttgagagctacccggagctccaagacaggggtgggttccagctgcccgcacgccccgaccttccatcgtaggtaacgcggaagagcccgggagagcgttggtggcgtccgagagcgaggagcgggaaagaggatgggtctgcacggagagtggaaaggcaggctgtgtactctggggaaagtggagcaaggaaggagctacagtggccgacgctggaggtcggctgcagaaaaactagaaaaagtagggaggaaagaggaaaagaggaggcgtctacactgagggggttctagagagggaggggtggactccgtagatgggggtagttcagtctcgaaacctggggcgtgctctgtcctggaggagggaggcgggcagtcggaggggaattgaatggaagttctgtgttggaaatgttttgggagatcttctgtagggggactgtggaagggggtctacattggggtaagtgcaggaggtagaggcttacacgtgaatcgattctgcactgaaataactagggaaagaggatgctaccctgaaagtggggatacttactttcgatgatgtgggggagggaggaggtctatactggcggaattgagggagtggagggtctgcactgaagacgctggggaaggatgtgccatggatatgggaaggaaccctagctgattagagagcctctcgggaggatgggaggatgggaagaggaggtttcctgtttgtacccccgaaaatatgggtgaaggacctgtgccgtggcccgtgagaaggaggtctgggtgcggaaactccaggccaggtgggtccgggggaggccggtcgcgcccaggaaatgccctatacgcgcaggccggaccatgggaaccccaaagccacggatcctgccctggctggtgtcgcagctggacctggggcaactggagggcgtggcctgggtgaacaagagccgcacgcgcttccgcatcccttggaagcacggcctacggcaggatgcacagcaggaggatttcggaatcttccaggtgcgtgcgacgacctgggacgctggaaacccggagctgcgcgctgggcggaaaggactcctagtgggcccggctgagaaggcggaggtggcgcgcgaggggcgggctcgtgccaacgctggtgggtggggctagaacgggaggggcggggctagccggatccgctgactgatggtggggcgcaagcagggttggagctgcagggttacgggaataaaaccgggaaagccggttagtacgcaaaggaaatgcatcctgggggtttggggctttctagaggccggggctcttggttgtaggatagatactgggggatggttcttgaaacatcagaggtgaggcctggagccccaaatctgaggttcctaactaccgaattagtatatgccagaggtggtaaacagtgtgaggggcggggttatcacagagggtgtcgcggggcaggtggtgcacgggattagacaccaagttggacttggaagcctggcttagaaagaaaaggtttttgggccgggggcggtggttcacacctgtaatcctagcactttgcaaggccaaggcgggaggatcgcttgagcccaggagtttgaggccagcttgggcaacataggctccatctctttaaaaacaaaagcgaaacaaaacaaaaaccaaagaggtttcaaaggcttttgaagaggccgagcacagtagctcatgcctgtaatcccagcactttgggaggccgaggaggacggatcacctgaggtcaggagttcaagaccagcctggccaacatggtgaaaccccatctctactaaaaatacaaaaattagccaggtgtagtggtgcccacctgtaatcccagctactcaggaggctgagacaggagaatcgcttgaaccggggaggcggaagttgcagtgagctgagattgcaccattgcattccagcctgggtgacaggagtgaaactccatctcaaaaagaaaaaaagccttttgaaaactagaggtgggggatggaggtaggtgggacggggggatttggggatggaccttgcagagttagaacttgccagggaaagagggtggtgttaggactcgggagacagggttagggccccaggagcaggatctaagtcgtcctcccccaccatcctgacaccactgttgccccaggcctgggccgaggccactggtgcatatgttcccgggagggataagccagacctgccaacctggaagaggaatttccgctctgccctcaaccgcaaagaagggttgcgtttagcagaggaccggagcaaggaccctcacgacccacataaaatctacgagtttgtgaactcaggtctgccagcttggggttcgtgtgggaggctggggccccaagggttcctggcactcctactcccctcaccacttttctcaacaggagttggggacttttcccagccagacacctctccggacaccaatggtggaggcagtacttctgatacccaggtgagaatgtgcccaactttcatgcccctcagtctccgacctgtctccatgggccttgtcctctccctctagacgatccccccactcccctgcctccagcctgcccctcacctgagccagtgctgaccctgtctgtccctgccccggtctcctcaggagaaaattccaagtcttcacccagcattcaaggcccgagcacaccttcccgggatttcatggatttcgattcgcagggggctgtcagcctcttgggaactgaaaaactccctcaccttgatcctgctgaggcccaagctgggggagcatcccctctgaaattctacccagcctgctttgcccaggtcttacctgcatagagccagatccttgggttggaatggtagcacctggcgttcattagtgtttgtttggctgttgatgccatggctggctctgtccccaggctggaagccccttgaaggcagagctcaagcctgacctccctgcgttgctgagaacagacctggtccatatgaagtctccagaaaaggatatggaaatgcctgattctctttttttgtttccctccaggaagacattctggatgagttactgggtaacatggtgttggccccactcccagatccgggacccccaagcctggctgtagcccctgagccctgccctcagcccctgcggagccccagcttggacaatcccactcccttcccaaacctggggccctctgagaacccactgaagcggctgttggtgccgggggaaggtgagtgtcagctgcaggctgggagggctgaggtctgggcggcagcccctgattctcaacccctctccccttcatgccgctgctgccgctgctcagagtgggagttcgaggtgacagccttctaccggggccgccaagtcttccagcagaccatctcctgcccggagggcctgcggctggtggggtccgaagtgggagacaggacgctgcctggatggccagtcacactgccagaccctggcatgtccctgacagacaggggagtgatgagctacgtgaggcatgtgctgag

SEQ ID NO: 12659 - DNA, 739 bp, Homo sapiens
ttggttttatttcaagaagtcgatcaaaaagaaagccccagcgctctagagctcagctgacgggaaagggggtgcgcagcctcgagtttgagagctacccggagctccaagacaggggtgggttccagctgcccgcacgccccgaccttccatcgtaggtgcgtgcgacgacctgggacgctggaaacccggagctgcgcgctgggcggaaaggactcctagtgggcccggctgagaaggcggaggtggcgcgcgaggggcgggctcgtgccaacgctggagttggggacttttcccagccagacacctctccggacaccaatggtggaggcagtacttctgatacccaggaagacattctggatgagttactgggtaacatggtgttggccccactcccagatccgggacccccaagcctggctgtagcccctgagccctgccctcagcccctgcggagccccagcttggacaatcccactcccttcccaaacctggggccctctgagaacccactgaagcggctgttggtgccgggggaagagtgggagttcgaggtgacagccttctaccggggccgccaagtcttccagcagaccatctcctgcccggagggcctgcggctggtggggtccgaagtgggagacaggacgctgcctggatggccagtcacactgccagaccctggcatgtccctgacagacaggggagtgatgagctacgtgaggcatgtgctgag

SEQ ID NO: 12660 - DNA, 2149 bp, Homo sapiens
gctagccggatccgctgactgatggtggggcgcaagcagggttggagctgcagggttacgggaataaaaccgggaaagccggttagtacgcaaaggaaatgcatcctgggggtttggggctttctagaggccggggctcttggttgtaggatagatactgggggatggttcttgaaacatcagaggtgaggcctggagccccaaatctgaggttcctaactaccgaattagtatatgccagaggtggtaaacagtgtgaggggcggggttatcacagagggtgtcgcggggcaggtggtgcacgggattagacaccaagttggacttggaagcctggcttagaaagaaaaggtttttgggccgggggcggtggttcacacctgtaatcctagcactttgcaaggccaaggcgggaggatcgcttgagcccaggagtttgaggccagcttgggcaacataggctccatctctttaaaaacaaaagcgaaacaaaacaaaaaccaaagaggtttcaaaggcttttgaagaggccgagcacagtagctcatgcctgtaatcccagcactttgggaggccgaggaggacggatcacctgaggtcaggagttcaagaccagcctggccaacatggtgaaaccccatctctactaaaaatacaaaaattagccaggtgtagtggtgcccacctgtaatcccagctactcaggaggctgagacaggagaatcgcttgaaccggggaggcggaagttgcagtgagctgagattgcaccattgcattccagcctgggtgacaggagtgaaactccatctcaaaaagaaaaaaagccttttgaaaactagaggtgggggatggaggtaggtgggacggggggatttggggatggaccttgcagagttagaacttgccagggaaagagggtggtgttaggactcgggagacagggttagggccccaggagcaggatctaagtcgtcctcccccaccatcctgacaccactgttgccccaggcctgggccgaggccactggtgcatatgttcccgggagggataagccagacctgccaacctggaagaggaatttccgctctgccctcaaccgcaaagaagggttgcgtttagcagaggaccggagcaaggaccctcacgacccacataaaatctacgagtttgtgaactcaggtctgccagcttggggttcgtgtgggaggctggggccccaagggttcctggcactcctactcccctcaccacttttctcaacaggagttggggacttttcccagccagacacctctccggacaccaatggtggaggcagtacttctgatacccaggtgagaatgtgcccaactttcatgcccctcagtctccgacctgtctccatgggccttgtcctctccctctagacgatccccccactcccctgcctccagcctgcccctcacctgagccagtgctgaccctgtctgtccctgccccggtctcctcaggagaaaattccaagtcttcacccagcattcaaggcccgagcacaccttcccgggatttcatggatttcgattcgcagggggctgtcagcctcttgggaactgaaaaactccctcaccttgatcctgctgaggcccaagctgggggagcatcccctctgaaattctacccagcctgctttgcccaggtcttacctgcatagagccagatccttgggttggaatggtagcacctggcgttcattagtgtttgtttggctgttgatgccatggctggctctgtccccaggctggaagccccttgaaggcagagctcaagcctgacctccctgcgttgctgagaacagacctggtccatatgaagtctccagaaaaggatatggaaatgcctgattctctttttttgtttccctccaggaagacattctggatgagttactgggtaacatggtgttggccccactcccagatccgggacccccaagcctggctgtagcccctgagccctgccctcagcccctgcggagccccagcttggacaatcccactcccttcccaaacctggggccctctgagaacccactgaagcggctgttggtgccgggggaaggtgagtgtcagctgcaggctgggagggctgaggtctgggcggcagcccct

SEQ ID NO: 12661 - DNA, 567 bp, Homo sapiens
gctagccggatccgctgactgatggtggggcgcaagcagggttggagctgcagggttacgggaataaaaccgggaaagccggcctgggccgaggccactggtgcatatgttcccgggagggataagccagacctgccaacctggaagaggaatttccgctctgccctcaaccgcaaagaagggttgcgtttagcagaggaccggagcaaggaccctcacgacccacataaaatctacgagtttgtgaactcaggagttggggacttttcccagccagacacctctccggacaccaatggtggaggcagtacttctgatacccaggaagacattctggatgagttactgggtaacatggtgttggccccactcccagatccgggacccccaagcctggctgtagcccctgagccctgccctcagcccctgcggagccccagcttggacaatcccactcccttcccaaacctggggccctctgagaacccactgaagcggctgttggtgccgggggaaggtgagtgtcagctgcaggctgggagggctgaggtctgggcggcagcccct

SEQ ID NO: 12662 - DNA, 1429 bp, Homo sapiens
gatgggagggagggagggagggaaggaggggactttccccaaacaagcagtcccctggtcgaggcagcagagggccttaggtcaggggaggtggtgggggttatcattcaagtttacggggaagggtgggtagagggtcctcttctcatccctgactaggctcctgggcccccagatctgattaccttcacggaaggaagcggacgctcaccacgctatgccctctggttctgtgtgggggagtcatggccccaggaccagccgtggaccaagaggctcgtgatggtcaaggtgcctgcagacctgagtccctggggctgaaaggggtggccttacagagggaagaggttgctcccaggaactccaactcccagagggccctctaaaaaactgcaacttccaagatctctgcaataaccagtttttcatccccgggagctccttcccatggcctcacctgcagaacctgttttgaactctctaaaccagtggcccccaaactatttggcaccagggaccagtctcatggaagataatatttccacggacagggaggtgtggtttcgggatgaaactgctccactgcagatcatcaggcattagattctcttaaggagcagccgatccctcacgtgcgcagttcgatagagtttgtgctcctctgagaatctaatgctgccgctgatctcacagaaggcagagctcaggcagtaatattcccccacccgctgctcacatcctgctgtgcaacctggtccctaacaagccgtaggggggttggggacccctgctctaaaccatgtagaagctggtggactcaagttttagctgccattgtgaggccatggctgtggctcccaggagtcaagatcacagactgctcagccctgacgtgtgtgtgtgtgtgtgtttgtgtgtgtgtgtaaaactacaactcccagcagccctaggcctatggttcagttacagcagggggtgtgtgtgtgtgtgtgtgtgtgtgtgtgtgtgtgtgtgtgtgtaaaactacaactcccagcagccctaggcctatggttcatcctaggttacagcaggggctgcagggagttgtagtcctccaagccctgactcctaccttggtggacagtggctgggtgttttccctgactcctgtccccacttcccctgcaggttgtgcccacgtgcctcagggccttggtagaaatggcccgggtagggggtgcctcctccctggagaatactgtggacctgcacatttccaacagccacccactctccctcacctccgaccagtacaaggcctacctgcaggacttggtggagggcatggatttccagggccctggggagagctgagccctcgctcctcatggtgtgcctccaacccccctgttccccaccacctcaaccaataaactggttcctgcta

SEQ ID NO: 12663 - DNA, 550 bp, Homo sapiens
gatgggagggagggagggagggaaggaggggactttccccaaacaagcagtcccctggtcgaggcagcagagggccttaggtcaggggaggtggtgggggttatcattcaagtttacggggaagggtgggtagagggtcctcttctcatccctgactaggctcctgggcccccagatctgattaccttcacggaaggaagcggacgctcaccacgctatgccctctggttctgtgtgggggagtcatggccccaggaccagccgtggaccaagaggctcgtgatggtcaaggttgtgcccacgtgcctcagggccttggtagaaatggcccgggtagggggtgcctcctccctggagaatactgtggacctgcacatttccaacagccacccactctccctcacctccgaccagtacaaggcctacctgcaggacttggtggagggcatggatttccagggccctggggagagctgagccctcgctcctcatggtgtgcctccaacccccctgttccccaccacctcaaccaataaactggttcctgcta

SEQ ID NO: 12664 - DNA, 5856 bp, Homo sapiens
gggagagcgttggtggcgtccgagagcgaggagcgggaaagaggatgggtctgcacggagagtggaaaggcaggctgtgtactctggggaaagtggagcaaggaaggagctacagtggccgacgctggaggtcggctgcagaaaaactagaaaaagtagggaggaaagaggaaaagaggaggcgtctacactgagggggttctagagagggaggggtggactccgtagatgggggtagttcagtctcgaaacctggggcgtgctctgtcctggaggagggaggcgggcagtcggaggggaattgaatggaagttctgtgttggaaatgttttgggagatcttctgtagggggactgtggaagggggtctacattggggtaagtgcaggaggtagaggcttacacgtgaatcgattctgcactgaaataactagggaaagaggatgctaccctgaaagtggggatacttactttcgatgatgtgggggagggaggaggtctatactggcggaattgagggagtggagggtctgcactgaagacgctggggaaggatgtgccatggatatgggaaggaaccctagctgattagagagcctctcgggaggatgggaggatgggaagaggaggtttcctgtttgtacccccgaaaatatgggtgaaggacctgtgccgtggcccgtgagaaggaggtctgggtgcggaaactccaggccaggtgggtccgggggaggccggtcgcgcccaggaaatgccctatacgcgcaggccggaccatgggaaccccaaagccacggatcctgccctggctggtgtcgcagctggacctggggcaactggagggcgtggcctgggtgaacaagagccgcacgcgcttccgcatcccttggaagcacggcctacggcaggatgcacagcaggaggatttcggaatcttccaggtgcgtgcgacgacctgggacgctggaaacccggagctgcgcgctgggcggaaaggactcctagtgggcccggctgagaaggcggaggtggcgcgcgaggggcgggctcgtgccaacgctggtgggtggggctagaacgggaggggcggggctagccggatccgctgactgatggtggggcgcaagcagggttggagctgcagggttacgggaataaaaccgggaaagccggttagtacgcaaaggaaatgcatcctgggggtttggggctttctagaggccggggctcttggttgtaggatagatactgggggatggttcttgaaacatcagaggtgaggcctggagccccaaatctgaggttcctaactaccgaattagtatatgccagaggtggtaaacagtgtgaggggcggggttatcacagagggtgtcgcggggcaggtggtgcacgggattagacaccaagttggacttggaagcctggcttagaaagaaaaggtttttgggccgggggcggtggttcacacctgtaatcctagcactttgcaaggccaaggcgggaggatcgcttgagcccaggagtttgaggccagcttgggcaacataggctccatctctttaaaaacaaaagcgaaacaaaacaaaaaccaaagaggtttcaaaggcttttgaagaggccgagcacagtagctcatgcctgtaatcccagcactttgggaggccgaggaggacggatcacctgaggtcaggagttcaagaccagcctggccaacatggtgaaaccccatctctactaaaaatacaaaaattagccaggtgtagtggtgcccacctgtaatcccagctactcaggaggctgagacaggagaatcgcttgaaccggggaggcggaagttgcagtgagctgagattgcaccattgcattccagcctgggtgacaggagtgaaactccatctcaaaaagaaaaaaagccttttgaaaactagaggtgggggatggaggtaggtgggacggggggatttggggatggaccttgcagagttagaacttgccagggaaagagggtggtgttaggactcgggagacagggttagggccccaggagcaggatctaagtcgtcctcccccaccatcctgacaccactgttgccccaggcctgggccgaggccactggtgcatatgttcccgggagggataagccagacctgccaacctggaagaggaatttccgctctgccctcaaccgcaaagaagggttgcgtttagcagaggaccggagcaaggaccctcacgacccacataaaatctacgagtttgtgaactcaggtctgccagcttggggttcgtgtgggaggctggggccccaagggttcctggcactcctactcccctcaccacttttctcaacaggagttggggacttttcccagccagacacctctccggacaccaatggtggaggcagtacttctgatacccaggtgagaatgtgcccaactttcatgcccctcagtctccgacctgtctccatgggccttgtcctctccctctagacgatccccccactcccctgcctccagcctgcccctcacctgagccagtgctgaccctgtctgtccctgccccggtctcctcaggagaaaattccaagtcttcacccagcattcaaggcccgagcacaccttcccgggatttcatggatttcgattcgcagggggctgtcagcctcttgggaactgaaaaactccctcaccttgatcctgctgaggcccaagctgggggagcatcccctctgaaattctacccagcctgctttgcccaggtcttacctgcatagagccagatccttgggttggaatggtagcacctggcgttcattagtgtttgtttggctgttgatgccatggctggctctgtccccaggctggaagccccttgaaggcagagctcaagcctgacctccctgcgttgctgagaacagacctggtccatatgaagtctccagaaaaggatatggaaatgcctgattctctttttttgtttccctccaggaagacattctggatgagttactgggtaacatggtgttggccccactcccagatccgggacccccaagcctggctgtagcccctgagccctgccctcagcccctgcggagccccagcttggacaatcccactcccttcccaaacctggggccctctgagaacccactgaagcggctgttggtgccgggggaaggtgagtgtcagctgcaggctgggagggctgaggtctgggcggcagcccctgattctcaacccctctccccttcatgccgctgctgccgctgctcagagtgggagttcgaggtgacagccttctaccggggccgccaagtcttccagcagaccatctcctgcccggagggcctgcggctggtggggtccgaagtgggagacaggacgctgcctggatggccagtcacactgccagaccctggcatgtccctgacagacaggggagtgatgagctacgtgaggcatgtgctgagctgcctgggtgggggactggctctctggcgggccgggcagtggctctgggcccagcggctggggcactgccacacatactgggcagtgagcgaggagctgctccccaacagcgggcatgggcctgatggcgaggtccccaaggacaaggaaggaggcgtgtttgacctggggcccttcattgtaggtgagtgagacaggggcttcgacctggccagtacaaagcagcctgcacagtggttaacaactcaggattggccgggcacggtggctcacgcctgtagtcccagcactttgggaggctgaggtgggcagatgacaagttcaggagttcgagaccagcctggtcaacatagtgaaaccccatctctactaaagatacaaaaaaatagtcgggcgtggtggcacgtgcctgtaatcccagctactcgggaggctgaggcaggagaattgcttgaacccaggaggcggagattgcagtgagctgagatcgcaccactgcactctagcctggtgacagagtaagactccatctcgaacaacaaaaaaaaaagaactcatgattaggactgaattcagacgctggctgcccttggcccgctgtataaccgaggcaaaggactttgccctgagcccgtggaatccaaggatggtctcctctctctacctgcctgccagcgctggggtgagacacaggcccagtacacagagcctgctcagggaattagctgccactgtcatcatcatcgtaactaatgatggtgaacagaccaatagcaggaaagctacatcccttagggtttcgctgtgcagtggcactttctgccatgatggaaatgacagtcacctgcactgtccggtgcagcagccactagccacaggggccaagcactcaggtgaggcgagtgcaaccaggacgtgattcgttttaattggttacaatttaaactgaaataaccttacatgactaatggctgcaattggacaatgcagcctcagacaggactgaatgccaaccagcttctccagattcactgagcatccttgggagcatgggccccctactctgggcctgttatgaatgctgaggcttgggggcttgggggtgtggccttccaacaaccccaccctgatgggagggagggagggagggaaggaggggactttccccaaacaagcagtcccctggtcgaggcagcagagggccttaggtcaggggaggtggtgggggttatcattcaagtttacggggaagggtgggtagagggtcctcttctcatccctgactaggctcctgggcccccagatctgattaccttcacggaaggaagcggacgctcaccacgctatgccctctggttctgtgtgggggagtcatggccccaggaccagccgtggaccaagaggctcgtgatggtcaaggtgcctgcagacctgagtccctggggctgaaaggggtggccttacagagggaagaggttgctcccaggaactccaactcccagagggccctctaaaaaactgcaacttccaagatctctgcaataaccagtttttcatccccgggagctccttcccatggcctcacctgcagaacctgttttgaactctctaaaccagtggcccccaaactatttggcaccagggaccagtctcatggaagataatatttccacggacagggaggtgtggtttcgggatgaaactgctccactgcagatcatcaggcattagattctcttaaggagcagccgatccctcacgtgcgcagttcgatagagtttgtgctcctctgagaatctaatgctgccgctgatctcacagaaggcagagctcaggcagtaatattcccccacccgctgctcacatcctgctgtgcaacctggtccctaacaagccgtaggggggttggggacccctgctctaaaccatgtagaagctggtggactcaagttttagctgccattgtgaggccatggctgtggctcccaggagtcaagatcacagactgctcagccctgacgtgtgtgtgtgtgtgtgtttgtgtgtgtgtgtaaaactacaactcccagcagccctaggcctatggttcagttacagcagggggtgtgtgtgtgtgtgtgtgtgtgtgtgtgtgtgtgtgtgtgtgtaaaactacaactcccagcagccctaggcctatggttcatcctaggttacagcaggggctgcagggagttgtagtcctccaagccctgactcctaccttggtggacagtggctgggtgttttccctgactcctgtccccacttcccctgcaggttgtgcccacgtgcctcagggccttggtagaaatggcccgggtagggggtgcctcctccctggagaatactgtgg

SEQ ID NO: 12665 - DNA, 931 bp, Homo sapiens
gggagagcgttggtggcgtccgagagcgaggagcgggaaagaggatgggtctgcacggagagtggaaaggcaggctgtgtactctggggaaagtggagcaaggaaggagctacagtggccgacgctggaggccggaccatgggaaccccaaagccacggatcctgccctggctggtgtcgcagctggacctggggcaactggagggcgtggcctgggtgaacaagagccgcacgcgcttccgcatcccttggaagcacggcctacggcaggatgcacagcaggaggatttcggaatcttccaggcctgggccgaggccactggtgcatatgttcccgggagggataagccagacctgccaacctggaagaggaatttccgctctgccctcaaccgcaaagaagggttgcgtttagcagaggaccggagcaaggaccctcacgacccacataaaatctacgagtttgtgaactcaggagttggggacttttcccagccagacacctctccggacaccaatggtggaggcagtacttctgatacccaggaagacattctggatgagttactgggtaacatggtgttggccccactcccagatccgggacccccaagcctggctgtagcccctgagccctgccctcagcccctgcggagccccagcttggacaatcccactcccttcccaaacctggggccctctgagaacccactgaagcggctgttggtgccgggggaagatctgattaccttcacggaaggaagcggacgctcaccacgctatgccctctggttctgtgtgggggagtcatggccccaggaccagccgtggaccaagaggctcgtgatggtcaaggttgtgcccacgtgcctcagggccttggtagaaatggcccgggtagggggtgcctcctccctggagaatactgtgg

SEQ ID NO: 12666 - DNA, 6127 bp, Homo sapiens; identical to SEQ ID NO: 12654

SEQ ID NO: 12667 - DNA, 710 bp, Homo sapiens
gagtttgagagctacccggagctccaagacaggggtgggttccagctgcccgcacgccccgaccttccatcgtaggagttggggacttttcccagccagacacctctccggacaccaatggtggaggcagtacttctgatacccaggaagacattctggatgagttactgggtaacatggtgttggccccactcccagatccgggacccccaagcctggctgtagcccctgagccctgccctcagcccctgcggagccccagcttggacaatcccactcccttcccaaacctggggccctctgagaacccactgaagcggctgttggtgccgggggaagatctgattaccttcacggaaggaagcggacgctcaccacgctatgccctctggttctgtgtgggggagtcatggccccaggaccagccgtggaccaagaggctcgtgatggtcaaggttgtgcccacgtgcctcagggccttggtagaaatggcccgggtagggggtgcctcctccctggagaatactgtggacctgcacatttccaacagccacccactctccctcacctccgaccagtacaaggcctacctgcaggacttggtggagggcatggatttccagggccctggggagagctgagccctcgctcctcatggtgtgcctccaacccccctgttccccaccacctcaaccaataaactggttcct

SEQ ID NO: 12668 - DNA, 2139 bp, Homo sapiens
agcacggcctacggcaggatgcacagcaggaggatttcggaatcttccaggtgcgtgcgacgacctgggacgctggaaacccggagctgcgcgctgggcggaaaggactcctagtgggcccggctgagaaggcggaggtggcgcgcgaggggcgggctcgtgccaacgctggtgggtggggctagaacgggaggggcggggctagccggatccgctgactgatggtggggcgcaagcagggttggagctgcagggttacgggaataaaaccgggaaagccggttagtacgcaaaggaaatgcatcctgggggtttggggctttctagaggccggggctcttggttgtaggatagatactgggggatggttcttgaaacatcagaggtgaggcctggagccccaaatctgaggttcctaactaccgaattagtatatgccagaggtggtaaacagtgtgaggggcggggttatcacagagggtgtcgcggggcaggtggtgcacgggattagacaccaagttggacttggaagcctggcttagaaagaaaaggtttttgggccgggggcggtggttcacacctgtaatcctagcactttgcaaggccaaggcgggaggatcgcttgagcccaggagtttgaggccagcttgggcaacataggctccatctctttaaaaacaaaagcgaaacaaaacaaaaaccaaagaggtttcaaaggcttttgaagaggccgagcacagtagctcatgcctgtaatcccagcactttgggaggccgaggaggacggatcacctgaggtcaggagttcaagaccagcctggccaacatggtgaaaccccatctctactaaaaatacaaaaattagccaggtgtagtggtgcccacctgtaatcccagctactcaggaggctgagacaggagaatcgcttgaaccggggaggcggaagttgcagtgagctgagattgcaccattgcattccagcctgggtgacaggagtgaaactccatctcaaaaagaaaaaaagccttttgaaaactagaggtgggggatggaggtaggtgggacggggggatttggggatggaccttgcagagttagaacttgccagggaaagagggtggtgttaggactcgggagacagggttagggccccaggagcaggatctaagtcgtcctcccccaccatcctgacaccactgttgccccaggcctgggccgaggccactggtgcatatgttcccgggagggataagccagacctgccaacctggaagaggaatttccgctctgccctcaaccgcaaagaagggttgcgtttagcagaggaccggagcaaggaccctcacgacccacataaaatctacgagtttgtgaactcaggtctgccagcttggggttcgtgtgggaggctggggccccaagggttcctggcactcctactcccctcaccacttttctcaacaggagttggggacttttcccagccagacacctctccggacaccaatggtggaggcagtacttctgatacccaggtgagaatgtgcccaactttcatgcccctcagtctccgacctgtctccatgggccttgtcctctccctctagacgatccccccactcccctgcctccagcctgcccctcacctgagccagtgctgaccctgtctgtccctgccccggtctcctcaggagaaaattccaagtcttcacccagcattcaaggcccgagcacaccttcccgggatttcatggatttcgattcgcagggggctgtcagcctcttgggaactgaaaaactccctcaccttgatcctgctgaggcccaagctgggggagcatcccctctgaaattctacccagcctgctttgcccaggtcttacctgcatagagccagatccttgggttggaatggtagcacctggcgttcattagtgtttgtttggctgttgatgccatggctggctctgtccccaggctggaagccccttgaaggcagagctcaagcctgacctccctgcgttgctgagaacagacctggtccatatgaagtctccagaaaaggatatggaaatgcctgattctctttttttgtttccctccaggaagacattctggatgagttactgggtaacatg

SEQ ID NO: 12669 - DNA, 447 bp, Homo sapiens
agcacggcctacggcaggatgcacagcaggaggatttcggaatcttccaggtgcgtgcgacgacctgggacgctggaaacccggagctgcgcgctgggcggaaaggactcctagtgggcccggctgagaaggcggaggtggcgcgcgaggggcgggctcgtgccaacgctggcctgggccgaggccactggtgcatatgttcccgggagggataagccagacctgccaacctggaagaggaatttccgctctgccctcaaccgcaaagaagggttgcgtttagcagaggaccggagcaaggaccctcacgacccacataaaatctacgagtttgtgaactcaggagttggggacttttcccagccagacacctctccggacaccaatggtggaggcagtacttctgatacccaggaagacattctggatgagttactgggtaacatg

SEQ ID NO: 12670 - DNA, 6184 bp, Homo sapiens
agccccagcgctctagagctcagctgacgggaaagggggtgcgcagcctcgagtttgagagctacccggagctccaagacaggggtgggttccagctgcccgcacgccccgaccttccatcgtaggtaacgcggaagagcccgggagagcgttggtggcgtccgagagcgaggagcgggaaagaggatgggtctgcacggagagtggaaaggcaggctgtgtactctggggaaagtggagcaaggaaggagctacagtggccgacgctggaggtcggctgcagaaaaactagaaaaagtagggaggaaagaggaaaagaggaggcgtctacactgagggggttctagagagggaggggtggactccgtagatgggggtagttcagtctcgaaacctggggcgtgctctgtcctggaggagggaggcgggcagtcggaggggaattgaatggaagttctgtgttggaaatgttttgggagatcttctgtagggggactgtggaagggggtctacattggggtaagtgcaggaggtagaggcttacacgtgaatcgattctgcactgaaataactagggaaagaggatgctaccctgaaagtggggatacttactttcgatgatgtgggggagggaggaggtctatactggcggaattgagggagtggagggtctgcactgaagacgctggggaaggatgtgccatggatatgggaaggaaccctagctgattagagagcctctcgggaggatgggaggatgggaagaggaggtttcctgtttgtacccccgaaaatatgggtgaaggacctgtgccgtggcccgtgagaaggaggtctgggtgcggaaactccaggccaggtgggtccgggggaggccggtcgcgcccaggaaatgccctatacgcgcaggccggaccatgggaaccccaaagccacggatcctgccctggctggtgtcgcagctggacctggggcaactggagggcgtggcctgggtgaacaagagccgcacgcgcttccgcatcccttggaagcacggcctacggcaggatgcacagcaggaggatttcggaatcttccaggtgcgtgcgacgacctgggacgctggaaacccggagctgcgcgctgggcggaaaggactcctagtgggcccggctgagaaggcggaggtggcgcgcgaggggcgggctcgtgccaacgctggtgggtggggctagaacgggaggggcggggctagccggatccgctgactgatggtggggcgcaagcagggttggagctgcagggttacgggaataaaaccgggaaagccggttagtacgcaaaggaaatgcatcctgggggtttggggctttctagaggccggggctcttggttgtaggatagatactgggggatggttcttgaaacatcagaggtgaggcctggagccccaaatctgaggttcctaactaccgaattagtatatgccagaggtggtaaacagtgtgaggggcggggttatcacagagggtgtcgcggggcaggtggtgcacgggattagacaccaagttggacttggaagcctggcttagaaagaaaaggtttttgggccgggggcggtggttcacacctgtaatcctagcactttgcaaggccaaggcgggaggatcgcttgagcccaggagtttgaggccagcttgggcaacataggctccatctctttaaaaacaaaagcgaaacaaaacaaaaaccaaagaggtttcaaaggcttttgaagaggccgagcacagtagctcatgcctgtaatcccagcactttgggaggccgaggaggacggatcacctgaggtcaggagttcaagaccagcctggccaacatggtgaaaccccatctctactaaaaatacaaaaattagccaggtgtagtggtgcccacctgtaatcccagctactcaggaggctgagacaggagaatcgcttgaaccggggaggcggaagttgcagtgagctgagattgcaccattgcattccagcctgggtgacaggagtgaaactccatctcaaaaagaaaaaaagccttttgaaaactagaggtgggggatggaggtaggtgggacggggggatttggggatggaccttgcagagttagaacttgccagggaaagagggtggtgttaggactcgggagacagggttagggccccaggagcaggatctaagtcgtcctcccccaccatcctgacaccactgttgccccaggcctgggccgaggccactggtgcatatgttcccgggagggataagccagacctgccaacctggaagaggaatttccgctctgccctcaaccgcaaagaagggttgcgtttagcagaggaccggagcaaggaccctcacgacccacataaaatctacgagtttgtgaactcaggtctgccagcttggggttcgtgtgggaggctggggccccaagggttcctggcactcctactcccctcaccacttttctcaacaggagttggggacttttcccagccagacacctctccggacaccaatggtggaggcagtacttctgatacccaggtgagaatgtgcccaactttcatgcccctcagtctccgacctgtctccatgggccttgtcctctccctctagacgatccccccactcccctgcctccagcctgcccctcacctgagccagtgctgaccctgtctgtccctgccccggtctcctcaggagaaaattccaagtcttcacccagcattcaaggcccgagcacaccttcccgggatttcatggatttcgattcgcagggggctgtcagcctcttgggaactgaaaaactccctcaccttgatcctgctgaggcccaagctgggggagcatcccctctgaaattctacccagcctgctttgcccaggtcttacctgcatagagccagatccttgggttggaatggtagcacctggcgttcattagtgtttgtttggctgttgatgccatggctggctctgtccccaggctggaagccccttgaaggcagagctcaagcctgacctccctgcgttgctgagaacagacctggtccatatgaagtctccagaaaaggatatggaaatgcctgattctctttttttgtttccctccaggaagacattctggatgagttactgggtaacatggtgttggccccactcccagatccgggacccccaagcctggctgtagcccctgagccctgccctcagcccctgcggagccccagcttggacaatcccactcccttcccaaacctggggccctctgagaacccactgaagcggctgttggtgccgggggaaggtgagtgtcagctgcaggctgggagggctgaggtctgggcggcagcccctgattctcaacccctctccccttcatgccgctgctgccgctgctcagagtgggagttcgaggtgacagccttctaccggggccgccaagtcttccagcagaccatctcctgcccggagggcctgcggctggtggggtccgaagtgggagacaggacgctgcctggatggccagtcacactgccagaccctggcatgtccctgacagacaggggagtgatgagctacgtgaggcatgtgctgagctgcctgggtgggggactggctctctggcgggccgggcagtggctctgggcccagcggctggggcactgccacacatactgggcagtgagcgaggagctgctccccaacagcgggcatgggcctgatggcgaggtccccaaggacaaggaaggaggcgtgtttgacctggggcccttcattgtaggtgagtgagacaggggcttcgacctggccagtacaaagcagcctgcacagtggttaacaactcaggattggccgggcacggtggctcacgcctgtagtcccagcactttgggaggctgaggtgggcagatgacaagttcaggagttcgagaccagcctggtcaacatagtgaaaccccatctctactaaagatacaaaaaaatagtcgggcgtggtggcacgtgcctgtaatcccagctactcgggaggctgaggcaggagaattgcttgaacccaggaggcggagattgcagtgagctgagatcgcaccactgcactctagcctggtgacagagtaagactccatctcgaacaacaaaaaaaaaagaactcatgattaggactgaattcagacgctggctgcccttggcccgctgtataaccgaggcaaaggactttgccctgagcccgtggaatccaaggatggtctcctctctctacctgcctgccagcgctggggtgagacacaggcccagtacacagagcctgctcagggaattagctgccactgtcatcatcatcgtaactaatgatggtgaacagaccaatagcaggaaagctacatcccttagggtttcgctgtgcagtggcactttctgccatgatggaaatgacagtcacctgcactgtccggtgcagcagccactagccacaggggccaagcactcaggtgaggcgagtgcaaccaggacgtgattcgttttaattggttacaatttaaactgaaataaccttacatgactaatggctgcaattggacaatgcagcctcagacaggactgaatgccaaccagcttctccagattcactgagcatccttgggagcatgggccccctactctgggcctgttatgaatgctgaggcttgggggcttgggggtgtggccttccaacaaccccaccctgatgggagggagggagggagggaaggaggggactttccccaaacaagcagtcccctggtcgaggcagcagagggccttaggtcaggggaggtggtgggggttatcattcaagtttacggggaagggtgggtagagggtcctcttctcatccctgactaggctcctgggcccccagatctgattaccttcacggaaggaagcggacgctcaccacgctatgccctctggttctgtgtgggggagtcatggccccaggaccagccgtggaccaagaggctcgtgatggtcaaggtgcctgcagacctgagtccctggggctgaaaggggtggccttacagagggaagaggttgctcccaggaactccaactcccagagggccctctaaaaaactgcaacttccaagatctctgcaataaccagtttttcatccccgggagctccttcccatggcctcacctgcagaacctgttttgaactctctaaaccagtggcccccaaactatttggcaccagggaccagtctcatggaagataatatttccacggacagggaggtgtggtttcgggatgaaactgctccactgcagatcatcaggcattagattctcttaaggagcagccgatccctcacgtgcgcagttcgatagagtttgtgctcctctgagaatctaatgctgccgctgatctcacagaaggcagagctcaggcagtaatattcccccacccgctgctcacatcctgctgtgcaacctggtccctaacaagccgtaggggggttggggacccctgctctaaaccatgtagaagctggtggactcaagttttagctgccattgtgaggccatggctgtggctcccaggagtcaagatcacagactgctcagccctgacgtgtgtgtgtgtgtgtgtttgtgtgtgtgtgtaaaactacaactcccagcagccctaggcctatggttcagttacagcagggggtgtgtgtgtgtgtgtgtgtgtgtgtgtgtgtgtgtgtgtgtgtaaaactacaactcccagcagccctaggcctatggttcatcctaggttacagcaggggctgcagggagttgtagtcctccaagccctgactcctaccttggtggacagtggctgggtgttttccctgactcctgtccccacttcccctgcaggttgtgcccacgtgcctcagggccttggtagaaatggcccgggtagggggtgcctcctccctggagaatactgtggacctgcacatttccaacagccacccactctccctcacctccgaccagtacaaggcctacctgcaggacttggtggagggcatggatttccagggccctggggagagctgagccctcgctcctcatggtgtgcctccaacccccctgttccccaccacctcaaccaataaactggttcctgctatga

SEQ ID NO: 12671 - DNA, 823 bp, Homo sapiens
agccccagcgctctagagctcagctgacgggaaagggggtgcgcagcctcgagtttgagagctacccggagctccaagacaggggtgggttccagctgcccgcacgccccgaccttccatcgtaggcctgggccgaggccactggtgcatatgttcccgggagggataagccagacctgccaacctggaagaggaatttccgctctgccctcaaccgcaaagaagggttgcgtttagcagaggaccggagcaaggaccctcacgacccacataaaatctacgagtttgtgaactcaggagttggggacttttcccagccagacacctctccggacaccaatggtggaggcagtacttctgatacccaggaagacattctggatgagttactgggtaacatggtgttggccccactcccagatccgggacccccaagcctggctgtagcccctgagccctgccctcagcccctgcggagccccagcttggacaatcccactcccttcccaaacctggggccctctgagaacccactgaagcggctgttggtgccgggggaaggttgtgcccacgtgcctcagggccttggtagaaatggcccgggtagggggtgcctcctccctggagaatactgtggacctgcacatttccaacagccacccactctccctcacctccgaccagtacaaggcctacctgcaggacttggtggagggcatggatttccagggccctggggagagctgagccctcgctcctcatggtgtgcctccaacccccctgttccccaccacctcaaccaataaactggttcctgctatga

SEQ ID NO: 12672 - DNA, 2334 bp, Homo sapiens
gccccagcgctctagagctcagctgacgggaaagggggtgcgcagcctcgagtttgagagctacccggagctccaagacaggggtgggttccagctgcccgcacgccccgaccttccatcgtaggtaacgcggaagagcccgggagagcgttggtggcgtccgagagcgaggagcgggaaagaggatgggtctgcacggagagtggaaaggcaggctgtgtactctggggaaagtggagcaaggaaggagctacagtggccgacgctggaggtcggctgcagaaaaactagaaaaagtagggaggaaagaggaaaagaggaggcgtctacactgagggggttctagagagggaggggtggactccgtagatgggggtagttcagtctcgaaacctggggcgtgctctgtcctggaggagggaggcgggcagtcggaggggaattgaatggaagttctgtgttggaaatgttttgggagatcttctgtagggggactgtggaagggggtctacattggggtaagtgcaggaggtagaggcttacacgtgaatcgattctgcactgaaataactagggaaagaggatgctaccctgaaagtggggatacttactttcgatgatgtgggggagggaggaggtctatactggcggaattgagggagtggagggtctgcactgaagacgctggggaaggatgtgccatggatatgggaaggaaccctagctgattagagagcctctcgggaggatgggaggatgggaagaggaggtttcctgtttgtacccccgaaaatatgggtgaaggacctgtgccgtggcccgtgagaaggaggtctgggtgcggaaactccaggccaggtgggtccgggggaggccggtcgcgcccaggaaatgccctatacgcgcaggccggaccatgggaaccccaaagccacggatcctgccctggctggtgtcgcagctggacctggggcaactggagggcgtggcctgggtgaacaagagccgcacgcgcttccgcatcccttggaagcacggcctacggcaggatgcacagcaggaggatttcggaatcttccaggtgcgtgcgacgacctgggacgctggaaacccggagctgcgcgctgggcggaaaggactcctagtgggcccggctgagaaggcggaggtggcgcgcgaggggcgggctcgtgccaacgctggtgggtggggctagaacgggaggggcggggctagccggatccgctgactgatggtggggcgcaagcagggttggagctgcagggttacgggaataaaaccgggaaagccggttagtacgcaaaggaaatgcatcctgggggtttggggctttctagaggccggggctcttggttgtaggatagatactgggggatggttcttgaaacatcagaggtgaggcctggagccccaaatctgaggttcctaactaccgaattagtatatgccagaggtggtaaacagtgtgaggggcggggttatcacagagggtgtcgcggggcaggtggtgcacgggattagacaccaagttggacttggaagcctggcttagaaagaaaaggtttttgggccgggggcggtggttcacacctgtaatcctagcactttgcaaggccaaggcgggaggatcgcttgagcccaggagtttgaggccagcttgggcaacataggctccatctctttaaaaacaaaagcgaaacaaaacaaaaaccaaagaggtttcaaaggcttttgaagaggccgagcacagtagctcatgcctgtaatcccagcactttgggaggccgaggaggacggatcacctgaggtcaggagttcaagaccagcctggccaacatggtgaaaccccatctctactaaaaatacaaaaattagccaggtgtagtggtgcccacctgtaatcccagctactcaggaggctgagacaggagaatcgcttgaaccggggaggcggaagttgcagtgagctgagattgcaccattgcattccagcctgggtgacaggagtgaaactccatctcaaaaagaaaaaaagccttttgaaaactagaggtgggggatggaggtaggtgggacggggggatttggggatggaccttgcagagttagaacttgccagggaaagagggtggtgttaggactcgggagacagggttagggccccaggagcaggatctaagtcgtcctcccccaccatcctgacaccactgttgccccaggcctgggccgaggccactggtgcatatgttcccgggagggataagccagacctgccaacctggaagaggaatttccgctctgccctcaaccgca

SEQ ID NO: 12673 - DNA, 301 bp, Homo sapiens
gccccagcgctctagagctcagctgacgggaaagggggtgcgcagcctcgagtttgagagctacccggagctccaagacaggggtgggttccagctgcccgcacgccccgaccttccatcgtgcgtgcgacgacctgggacgctggaaacccggagctgcgcgctgggcggaaaggactcctagtgggcccggctgagaaggcggaggcctgggccgaggccactggtgcatatgttcccgggagggataagccagacctgccaacctggaagaggaatttccgctctgccctcaaccgca

SEQ ID NO: 12674 - DNA, 6285 bp, Homo sapiens
ataggggcgggaacagcccagcgggccgtcccatcggcttttgggtctgttacccaaagaatgataaagttggttttatttcaagaagtcgatcaaaaagaaagccccagcgctctagagctcagctgacgggaaagggggtgcgcagcctcgagtttgagagctacccggagctccaagacaggggtgggttccagctgcccgcacgccccgaccttccatcgtaggtaacgcggaagagcccgggagagcgttggtggcgtccgagagcgaggagcgggaaagaggatgggtctgcacggagagtggaaaggcaggctgtgtactctggggaaagtggagcaaggaaggagctacagtggccgacgctggaggtcggctgcagaaaaactagaaaaagtagggaggaaagaggaaaagaggaggcgtctacactgagggggttctagagagggaggggtggactccgtagatgggggtagttcagtctcgaaacctggggcgtgctctgtcctggaggagggaggcgggcagtcggaggggaattgaatggaagttctgtgttggaaatgttttgggagatcttctgtagggggactgtggaagggggtctacattggggtaagtgcaggaggtagaggcttacacgtgaatcgattctgcactgaaataactagggaaagaggatgctaccctgaaagtggggatacttactttcgatgatgtgggggagggaggaggtctatactggcggaattgagggagtggagggtctgcactgaagacgctggggaaggatgtgccatggatatgggaaggaaccctagctgattagagagcctctcgggaggatgggaggatgggaagaggaggtttcctgtttgtacccccgaaaatatgggtgaaggacctgtgccgtggcccgtgagaaggaggtctgggtgcggaaactccaggccaggtgggtccgggggaggccggtcgcgcccaggaaatgccctatacgcgcaggccggaccatgggaaccccaaagccacggatcctgccctggctggtgtcgcagctggacctggggcaactggagggcgtggcctgggtgaacaagagccgcacgcgcttccgcatcccttggaagcacggcctacggcaggatgcacagcaggaggatttcggaatcttccaggtgcgtgcgacgacctgggacgctggaaacccggagctgcgcgctgggcggaaaggactcctagtgggcccggctgagaaggcggaggtggcgcgcgaggggcgggctcgtgccaacgctggtgggtggggctagaacgggaggggcggggctagccggatccgctgactgatggtggggcgcaagcagggttggagctgcagggttacgggaataaaaccgggaaagccggttagtacgcaaaggaaatgcatcctgggggtttggggctttctagaggccggggctcttggttgtaggatagatactgggggatggttcttgaaacatcagaggtgaggcctggagccccaaatctgaggttcctaactaccgaattagtatatgccagaggtggtaaacagtgtgaggggcggggttatcacagagggtgtcgcggggcaggtggtgcacgggattagacaccaagttggacttggaagcctggcttagaaagaaaaggtttttgggccgggggcggtggttcacacctgtaatcctagcactttgcaaggccaaggcgggaggatcgcttgagcccaggagtttgaggccagcttgggcaacataggctccatctctttaaaaacaaaagcgaaacaaaacaaaaaccaaagaggtttcaaaggcttttgaagaggccgagcacagtagctcatgcctgtaatcccagcactttgggaggccgaggaggacggatcacctgaggtcaggagttcaagaccagcctggccaacatggtgaaaccccatctctactaaaaatacaaaaattagccaggtgtagtggtgcccacctgtaatcccagctactcaggaggctgagacaggagaatcgcttgaaccggggaggcggaagttgcagtgagctgagattgcaccattgcattccagcctgggtgacaggagtgaaactccatctcaaaaagaaaaaaagccttttgaaaactagaggtgggggatggaggtaggtgggacggggggatttggggatggaccttgcagagttagaacttgccagggaaagagggtggtgttaggactcgggagacagggttagggccccaggagcaggatctaagtcgtcctcccccaccatcctgacaccactgttgccccaggcctgggccgaggccactggtgcatatgttcccgggagggataagccagacctgccaacctggaagaggaatttccgctctgccctcaaccgcaaagaagggttgcgtttagcagaggaccggagcaaggaccctcacgacccacataaaatctacgagtttgtgaactcaggtctgccagcttggggttcgtgtgggaggctggggccccaagggttcctggcactcctactcccctcaccacttttctcaacaggagttggggacttttcccagccagacacctctccggacaccaatggtggaggcagtacttctgatacccaggtgagaatgtgcccaactttcatgcccctcagtctccgacctgtctccatgggccttgtcctctccctctagacgatccccccactcccctgcctccagcctgcccctcacctgagccagtgctgaccctgtctgtccctgccccggtctcctcaggagaaaattccaagtcttcacccagcattcaaggcccgagcacaccttcccgggatttcatggatttcgattcgcagggggctgtcagcctcttgggaactgaaaaactccctcaccttgatcctgctgaggcccaagctgggggagcatcccctctgaaattctacccagcctgctttgcccaggtcttacctgcatagagccagatccttgggttggaatggtagcacctggcgttcattagtgtttgtttggctgttgatgccatggctggctctgtccccaggctggaagccccttgaaggcagagctcaagcctgacctccctgcgttgctgagaacagacctggtccatatgaagtctccagaaaaggatatggaaatgcctgattctctttttttgtttccctccaggaagacattctggatgagttactgggtaacatggtgttggccccactcccagatccgggacccccaagcctggctgtagcccctgagccctgccctcagcccctgcggagccccagcttggacaatcccactcccttcccaaacctggggccctctgagaacccactgaagcggctgttggtgccgggggaaggtgagtgtcagctgcaggctgggagggctgaggtctgggcggcagcccctgattctcaacccctctccccttcatgccgctgctgccgctgctcagagtgggagttcgaggtgacagccttctaccggggccgccaagtcttccagcagaccatctcctgcccggagggcctgcggctggtggggtccgaagtgggagacaggacgctgcctggatggccagtcacactgccagaccctggcatgtccctgacagacaggggagtgatgagctacgtgaggcatgtgctgagctgcctgggtgggggactggctctctggcgggccgggcagtggctctgggcccagcggctggggcactgccacacatactgggcagtgagcgaggagctgctccccaacagcgggcatgggcctgatggcgaggtccccaaggacaaggaaggaggcgtgtttgacctggggcccttcattgtaggtgagtgagacaggggcttcgacctggccagtacaaagcagcctgcacagtggttaacaactcaggattggccgggcacggtggctcacgcctgtagtcccagcactttgggaggctgaggtgggcagatgacaagttcaggagttcgagaccagcctggtcaacatagtgaaaccccatctctactaaagatacaaaaaaatagtcgggcgtggtggcacgtgcctgtaatcccagctactcgggaggctgaggcaggagaattgcttgaacccaggaggcggagattgcagtgagctgagatcgcaccactgcactctagcctggtgacagagtaagactccatctcgaacaacaaaaaaaaaagaactcatgattaggactgaattcagacgctggctgcccttggcccgctgtataaccgaggcaaaggactttgccctgagcccgtggaatccaaggatggtctcctctctctacctgcctgccagcgctggggtgagacacaggcccagtacacagagcctgctcagggaattagctgccactgtcatcatcatcgtaactaatgatggtgaacagaccaatagcaggaaagctacatcccttagggtttcgctgtgcagtggcactttctgccatgatggaaatgacagtcacctgcactgtccggtgcagcagccactagccacaggggccaagcactcaggtgaggcgagtgcaaccaggacgtgattcgttttaattggttacaatttaaactgaaataaccttacatgactaatggctgcaattggacaatgcagcctcagacaggactgaatgccaaccagcttctccagattcactgagcatccttgggagcatgggccccctactctgggcctgttatgaatgctgaggcttgggggcttgggggtgtggccttccaacaaccccaccctgatgggagggagggagggagggaaggaggggactttccccaaacaagcagtcccctggtcgaggcagcagagggccttaggtcaggggaggtggtgggggttatcattcaagtttacggggaagggtgggtagagggtcctcttctcatccctgactaggctcctgggcccccagatctgattaccttcacggaaggaagcggacgctcaccacgctatgccctctggttctgtgtgggggagtcatggccccaggaccagccgtggaccaagaggctcgtgatggtcaaggtgcctgcagacctgagtccctggggctgaaaggggtggccttacagagggaagaggttgctcccaggaactccaactcccagagggccctctaaaaaactgcaacttccaagatctctgcaataaccagtttttcatccccgggagctccttcccatggcctcacctgcagaacctgttttgaactctctaaaccagtggcccccaaactatttggcaccagggaccagtctcatggaagataatatttccacggacagggaggtgtggtttcgggatgaaactgctccactgcagatcatcaggcattagattctcttaaggagcagccgatccctcacgtgcgcagttcgatagagtttgtgctcctctgagaatctaatgctgccgctgatctcacagaaggcagagctcaggcagtaatattcccccacccgctgctcacatcctgctgtgcaacctggtccctaacaagccgtaggggggttggggacccctgctctaaaccatgtagaagctggtggactcaagttttagctgccattgtgaggccatggctgtggctcccaggagtcaagatcacagactgctcagccctgacgtgtgtgtgtgtgtgtgtttgtgtgtgtgtgtaaaactacaactcccagcagccctaggcctatggttcagttacagcagggggtgtgtgtgtgtgtgtgtgtgtgtgtgtgtgtgtgtgtgtgtgtaaaactacaactcccagcagccctaggcctatggttcatcctaggttacagcaggggctgcagggagttgtagtcctccaagccctgactcctaccttggtggacagtggctgggtgttttccctgactcctgtccccacttcccctgcaggttgtgcccacgtgcctcagggccttggtagaaatggcccgggtagggggtgcctcctccctggagaatactgtggacctgcacatttccaacagccacccactctccctcacctccgaccagtacaaggcctacctgcaggacttggtggagggcatggatttccagggccctggggagagctgagccctcgctcctcatggtgtgcctccaacccccctgttccccaccacctcaaccaataaactggttcctgctatg

SEQ ID NO: 12675 - DNA, 1741 bp, Homo sapiens
ataggggcgggaacagcccagcgggccgtcccatcggcttttgggtctgttacccaaagaatgataaagttggttttatttcaagaagtcgatcaaaaagaaagccccagcgctctagagctcagctgacgggaaagggggtgcgcagcctcgagtttgagagctacccggagctccaagacaggggtgggttccagctgcccgcacgccccgaccttccatcgtaggtaacgcggaagagcccgggagagcgttggtggcgtccgagagcgaggagcgggaaagaggatgggtctgcacggagagtggaaaggcaggctgtgtactctggggaaagtggagcaaggaaggagctacagtggccgacgctggaggccggaccatgggaaccccaaagccacggatcctgccctggctggtgtcgcagctggacctggggcaactggagggcgtggcctgggtgaacaagagccgcacgcgcttccgcatcccttggaagcacggcctacggcaggatgcacagcaggaggatttcggaatcttccaggcctgggccgaggccactggtgcatatgttcccgggagggataagccagacctgccaacctggaagaggaatttccgctctgccctcaaccgcaaagaagggttgcgtttagcagaggaccggagcaaggaccctcacgacccacataaaatctacgagtttgtgaactcaggagttggggacttttcccagccagacacctctccggacaccaatggtggaggcagtacttctgatacccaggaagacattctggatgagttactgggtaacatggtgttggccccactcccagatccgggacccccaagcctggctgtagcccctgagccctgccctcagcccctgcggagccccagcttggacaatcccactcccttcccaaacctggggccctctgagaacccactgaagcggctgttggtgccgggggaagagtgggagttcgaggtgacagccttctaccggggccgccaagtcttccagcagaccatctcctgcccggagggcctgcggctggtggggtccgaagtgggagacaggacgctgcctggatggccagtcacactgccagaccctggcatgtccctgacagacaggggagtgatgagctacgtgaggcatgtgctgagctgcctgggtgggggactggctctctggcgggccgggcagtggctctgggcccagcggctggggcactgccacacatactgggcagtgagcgaggagctgctccccaacagcgggcatgggcctgatggcgaggtccccaaggacaaggaaggaggcgtgtttgacctggggcccttcattgtagatctgattaccttcacggaaggaagcggacgctcaccacgctatgccctctggttctgtgtgggggagtcatggccccaggaccagccgtggaccaagaggctcgtgatggtcaaggttgtgcccacgtgcctcagggccttggtagaaatggcccgggtagggggtgcctcctccctggagaatactgtggacctgcacatttccaacagccacccactctccctcacctccgaccagtacaaggcctacctgcaggacttggtggagggcatggatttccagggccctggggagagctgagccctcgctcctcatggtgtgcctccaacccccctgttccccaccacctcaaccaataaactggttcctgctatg

SEQ ID NO: 12676 - DNA, 634 bp, Homo sapiens
acaaaaattagccaggtgtagtggtgcccacctgtaatcccagctactcaggaggctgagacaggagaatcgcttgaaccggggaggcggaagttgcagtgagctgagattgcaccattgcattccagcctgggtgacaggagtgaaactccatctcaaaaagaaaaaaagccttttgaaaactagaggtgggggatggaggtaggtgggacggggggatttggggatggaccttgcagagttagaacttgccagggaaagagggtggtgttaggactcgggagacagggttagggccccaggagcaggatctaagtcgtcctcccccaccatcctgacaccactgttgccccaggcctgggccgaggccactggtgcatatgttcccgggagggataagccagacctgccaacctggaagaggaatttccgctctgccctcaaccgcaaagaagggttgcgtttagcagaggaccggagcaaggaccctcacgacccacataaaatctacgagtttgtgaactcaggtctgccagcttggggttcgtgtgggaggctggggccccaagggttcctggcactcctactcccctcaccacttttctcaacaggagttggggacttttcccagcca

SEQ ID NO: 12677 - DNA, 550 bp, Homo sapiens
acaaaaattagccaggtgtagtggtgcccacctgtaatcccagctactcaggaggctgagacaggagaatcgcttgaaccggggaggcggaagttgcagtgagctgagattgcaccattgcattccagcctgggtgacaggagtgaaactccatctcaaaaagaaaaaaagccttttgaaaactagaggtgggggatggaggtaggtgggacggggggatttggggatggaccttgcagagttagaacttgccagggaaagagggtggtgttaggactcgggagacagggttagggccccaggagcaggatctaagtcgtcctcccccaccatcctgacaccactgttgccccaggcctgggccgaggccactggtgcatatgttcccgggagggataagccagacctgccaacctggaagaggaatttccgctctgccctcaaccgcaaagaagggttgcgtttagcagaggaccggagcaaggaccctcacgacccacataaaatctacgagtttgtgaactcaggagttggggacttttcccagcca

SEQ ID NO: 12678 - DNA, 6283 bp, Homo sapiens
ataggggcgggaacagcccagcgggccgtcccatcggcttttgggtctgttacccaaagaatgataaagttggttttatttcaagaagtcgatcaaaaagaaagccccagcgctctagagctcagctgacgggaaagggggtgcgcagcctcgagtttgagagctacccggagctccaagacaggggtgggttccagctgcccgcacgccccgaccttccatcgtaggtaacgcggaagagcccgggagagcgttggtggcgtccgagagcgaggagcgggaaagaggatgggtctgcacggagagtggaaaggcaggctgtgtactctggggaaagtggagcaaggaaggagctacagtggccgacgctggaggtcggctgcagaaaaactagaaaaagtagggaggaaagaggaaaagaggaggcgtctacactgagggggttctagagagggaggggtggactccgtagatgggggtagttcagtctcgaaacctggggcgtgctctgtcctggaggagggaggcgggcagtcggaggggaattgaatggaagttctgtgttggaaatgttttgggagatcttctgtagggggactgtggaagggggtctacattggggtaagtgcaggaggtagaggcttacacgtgaatcgattctgcactgaaataactagggaaagaggatgctaccctgaaagtggggatacttactttcgatgatgtgggggagggaggaggtctatactggcggaattgagggagtggagggtctgcactgaagacgctggggaaggatgtgccatggatatgggaaggaaccctagctgattagagagcctctcgggaggatgggaggatgggaagaggaggtttcctgtttgtacccccgaaaatatgggtgaaggacctgtgccgtggcccgtgagaaggaggtctgggtgcggaaactccaggccaggtgggtccgggggaggccggtcgcgcccaggaaatgccctatacgcgcaggccggaccatgggaaccccaaagccacggatcctgccctggctggtgtcgcagctggacctggggcaactggagggcgtggcctgggtgaacaagagccgcacgcgcttccgcatcccttggaagcacggcctacggcaggatgcacagcaggaggatttcggaatcttccaggtgcgtgcgacgacctgggacgctggaaacccggagctgcgcgctgggcggaaaggactcctagtgggcccggctgagaaggcggaggtggcgcgcgaggggcgggctcgtgccaacgctggtgggtggggctagaacgggaggggcggggctagccggatccgctgactgatggtggggcgcaagcagggttggagctgcagggttacgggaataaaaccgggaaagccggttagtacgcaaaggaaatgcatcctgggggtttggggctttctagaggccggggctcttggttgtaggatagatactgggggatggttcttgaaacatcagaggtgaggcctggagccccaaatctgaggttcctaactaccgaattagtatatgccagaggtggtaaacagtgtgaggggcggggttatcacagagggtgtcgcggggcaggtggtgcacgggattagacaccaagttggacttggaagcctggcttagaaagaaaaggtttttgggccgggggcggtggttcacacctgtaatcctagcactttgcaaggccaaggcgggaggatcgcttgagcccaggagtttgaggccagcttgggcaacataggctccatctctttaaaaacaaaagcgaaacaaaacaaaaaccaaagaggtttcaaaggcttttgaagaggccgagcacagtagctcatgcctgtaatcccagcactttgggaggccgaggaggacggatcacctgaggtcaggagttcaagaccagcctggccaacatggtgaaaccccatctctactaaaaatacaaaaattagccaggtgtagtggtgcccacctgtaatcccagctactcaggaggctgagacaggagaatcgcttgaaccggggaggcggaagttgcagtgagctgagattgcaccattgcattccagcctgggtgacaggagtgaaactccatctcaaaaagaaaaaaagccttttgaaaactagaggtgggggatggaggtaggtgggacggggggatttggggatggaccttgcagagttagaacttgccagggaaagagggtggtgttaggactcgggagacagggttagggccccaggagcaggatctaagtcgtcctcccccaccatcctgacaccactgttgccccaggcctgggccgaggccactggtgcatatgttcccgggagggataagccagacctgccaacctggaagaggaatttccgctctgccctcaaccgcaaagaagggttgcgtttagcagaggaccggagcaaggaccctcacgacccacataaaatctacgagtttgtgaactcaggtctgccagcttggggttcgtgtgggaggctggggccccaagggttcctggcactcctactcccctcaccacttttctcaacaggagttggggacttttcccagccagacacctctccggacaccaatggtggaggcagtacttctgatacccaggtgagaatgtgcccaactttcatgcccctcagtctccgacctgtctccatgggccttgtcctctccctctagacgatccccccactcccctgcctccagcctgcccctcacctgagccagtgctgaccctgtctgtccctgccccggtctcctcaggagaaaattccaagtcttcacccagcattcaaggcccgagcacaccttcccgggatttcatggatttcgattcgcagggggctgtcagcctcttgggaactgaaaaactccctcaccttgatcctgctgaggcccaagctgggggagcatcccctctgaaattctacccagcctgctttgcccaggtcttacctgcatagagccagatccttgggttggaatggtagcacctggcgttcattagtgtttgtttggctgttgatgccatggctggctctgtccccaggctggaagccccttgaaggcagagctcaagcctgacctccctgcgttgctgagaacagacctggtccatatgaagtctccagaaaaggatatggaaatgcctgattctctttttttgtttccctccaggaagacattctggatgagttactgggtaacatggtgttggccccactcccagatccgggacccccaagcctggctgtagcccctgagccctgccctcagcccctgcggagccccagcttggacaatcccactcccttcccaaacctggggccctctgagaacccactgaagcggctgttggtgccgggggaaggtgagtgtcagctgcaggctgggagggctgaggtctgggcggcagcccctgattctcaacccctctccccttcatgccgctgctgccgctgctcagagtgggagttcgaggtgacagccttctaccggggccgccaagtcttccagcagaccatctcctgcccggagggcctgcggctggtggggtccgaagtgggagacaggacgctgcctggatggccagtcacactgccagaccctggcatgtccctgacagacaggggagtgatgagctacgtgaggcatgtgctgagctgcctgggtgggggactggctctctggcgggccgggcagtggctctgggcccagcggctggggcactgccacacatactgggcagtgagcgaggagctgctccccaacagcgggcatgggcctgatggcgaggtccccaaggacaaggaaggaggcgtgtttgacctggggcccttcattgtaggtgagtgagacaggggcttcgacctggccagtacaaagcagcctgcacagtggttaacaactcaggattggccgggcacggtggctcacgcctgtagtcccagcactttgggaggctgaggtgggcagatgacaagttcaggagttcgagaccagcctggtcaacatagtgaaaccccatctctactaaagatacaaaaaaatagtcgggcgtggtggcacgtgcctgtaatcccagctactcgggaggctgaggcaggagaattgcttgaacccaggaggcggagattgcagtgagctgagatcgcaccactgcactctagcctggtgacagagtaagactccatctcgaacaacaaaaaaaaaagaactcatgattaggactgaattcagacgctggctgcccttggcccgctgtataaccgaggcaaaggactttgccctgagcccgtggaatccaaggatggtctcctctctctacctgcctgccagcgctggggtgagacacaggcccagtacacagagcctgctcagggaattagctgccactgtcatcatcatcgtaactaatgatggtgaacagaccaatagcaggaaagctacatcccttagggtttcgctgtgcagtggcactttctgccatgatggaaatgacagtcacctgcactgtccggtgcagcagccactagccacaggggccaagcactcaggtgaggcgagtgcaaccaggacgtgattcgttttaattggttacaatttaaactgaaataaccttacatgactaatggctgcaattggacaatgcagcctcagacaggactgaatgccaaccagcttctccagattcactgagcatccttgggagcatgggccccctactctgggcctgttatgaatgctgaggcttgggggcttgggggtgtggccttccaacaaccccaccctgatgggagggagggagggagggaaggaggggactttccccaaacaagcagtcccctggtcgaggcagcagagggccttaggtcaggggaggtggtgggggttatcattcaagtttacggggaagggtgggtagagggtcctcttctcatccctgactaggctcctgggcccccagatctgattaccttcacggaaggaagcggacgctcaccacgctatgccctctggttctgtgtgggggagtcatggccccaggaccagccgtggaccaagaggctcgtgatggtcaaggtgcctgcagacctgagtccctggggctgaaaggggtggccttacagagggaagaggttgctcccaggaactccaactcccagagggccctctaaaaaactgcaacttccaagatctctgcaataaccagtttttcatccccgggagctccttcccatggcctcacctgcagaacctgttttgaactctctaaaccagtggcccccaaactatttggcaccagggaccagtctcatggaagataatatttccacggacagggaggtgtggtttcgggatgaaactgctccactgcagatcatcaggcattagattctcttaaggagcagccgatccctcacgtgcgcagttcgatagagtttgtgctcctctgagaatctaatgctgccgctgatctcacagaaggcagagctcaggcagtaatattcccccacccgctgctcacatcctgctgtgcaacctggtccctaacaagccgtaggggggttggggacccctgctctaaaccatgtagaagctggtggactcaagttttagctgccattgtgaggccatggctgtggctcccaggagtcaagatcacagactgctcagccctgacgtgtgtgtgtgtgtgtgtttgtgtgtgtgtgtaaaactacaactcccagcagccctaggcctatggttcagttacagcagggggtgtgtgtgtgtgtgtgtgtgtgtgtgtgtgtgtgtgtgtgtgtaaaactacaactcccagcagccctaggcctatggttcatcctaggttacagcaggggctgcagggagttgtagtcctccaagccctgactcctaccttggtggacagtggctgggtgttttccctgactcctgtccccacttcccctgcaggttgtgcccacgtgcctcagggccttggtagaaatggcccgggtagggggtgcctcctccctggagaatactgtggacctgcacatttccaacagccacccactctccctcacctccgaccagtacaaggcctacctgcaggacttggtggagggcatggatttccagggccctggggagagctgagccctcgctcctcatggtgtgcctccaacccccctgttccccaccacctcaaccaataaactggttcctgcta

SEQ ID NO: 12679 - DNA, 2874 bp, Homo sapiens
ataggggcgggaacagcccagcgggccgtcccatcggcttttgggtctgttacccaaagaatgataaagttggttttatttcaagaagtcgatcaaaaagaaagccccagcgctctagagctcagctgacgggaaagggggtgcgcagcctcgagtttgagagctacccggagctccaagacaggggtgggttccagctgcccgcacgccccgaccttccatcgtaggtaacgcggaagagcccgggagagcgttggtggcgtccgagagcgaggagcgggaaagaggatgggtctgcacggagagtggaaaggcaggctgtgtactctggggaaagtggagcaaggaaggagctacagtggccgacgctggaggtcggctgcagaaaaactagaaaaagtagggaggaaagaggaaaagaggaggcgtctacactgagggggttctagagagggaggggtggactccgtagatgggggtagttcagtctcgaaacctggggcgtgctctgtcctggaggagggaggcgggcagtcggaggggaattgaatggaagttctgtgttggaaatgttttgggagatcttctgtagggggactgtggaagggggtctacattggggtaagtgcaggaggtagaggcttacacgtgaatcgattctgcactgaaataactagggaaagaggatgctaccctgaaagtggggatacttactttcgatgatgtgggggagggaggaggtctatactggcggaattgagggagtggagggtctgcactgaagacgctggggaaggatgtgccatggatatgggaaggaaccctagctgattagagagcctctcgggaggatgggaggatgggaagaggaggtttcctgtttgtacccccgaaaatatgggtgaaggacctgtgccgtggcccgtgagaaggaggtctgggtgcggaaactccaggccaggtgggtccgggggaggccggtcgcgcccaggaaatgccctatacgcgcaggccggaccatgggaaccccaaagccacggatcctgccctggctggtgtcgcagctggacctggggcaactggagggcgtggcctgggtgaacaagagccgcacgcgcttccgcatcccttggaagcacggcctacggcaggatgcacagcaggaggatttcggaatcttccaggcctgggccgaggccactggtgcatatgttcccgggagggataagccagacctgccaacctggaagaggaatttccgctctgccctcaaccgcaaagaagggttgcgtttagcagaggaccggagcaaggaccctcacgacccacataaaatctacgagtttgtgaactcaggagttggggacttttcccagccagacacctctccggacaccaatggtggaggcagtacttctgatacccaggaagacattctggatgagttactgggtaacatggtgttggccccactcccagatccgggacccccaagcctggctgtagcccctgagccctgccctcagcccctgcggagccccagcttggacaatcccactcccttcccaaacctggggccctctgagaacccactgaagcggctgttggtgccgggggaagagtgggagttcgaggtgacagccttctaccggggccgccaagtcttccagcagaccatctcctgcccggagggcctgcggctggtggggtccgaagtgggagacaggacgctgcctggatggccagtcacactgccagaccctggcatgtccctgacagacaggggagtgatgagctacgtgaggcatgtgctgagctgcctgggtgggggactggctctctggcgggccgggcagtggctctgggcccagcggctggggcactgccacacatactgggcagtgagcgaggagctgctccccaacagcgggcatgggcctgatggcgaggtccccaaggacaaggaaggaggcgtgtttgacctggggcccttcattgtaggtgagtgagacaggggcttcgacctggccagtacaaagcagcctgcacagtggttaacaactcaggattggccgggcacggtggctcacgcctgtagtcccagcactttgggaggctgaggtgggcagatgacaagttcaggagttcgagaccagcctggtcaacatagtgaaaccccatctctactaaagatacaaaaaaatagtcgggcgtggtggcacgtgcctgtaatcccagctactcgggaggctgaggcaggagaattgcttgaacccaggaggcggagattgcagtgagctgagatcgcaccactgcactctagcctggtgacagagtaagactccatctcgaacaacaaaaaaaaaagaactcatgattaggactgaattcagacgctggctgcccttggcccgctgtataaccgaggcaaaggactttgccctgagcccgtggaatccaaggatggtctcctctctctacctgcctgccagcgctgggatctgattaccttcacggaaggaagcggacgctcaccacgctatgccctctggttctgtgtgggggagtcatggccccaggaccagccgtggaccaagaggctcgtgatggtcaaggttgtgcccacgtgcctcagggccttggtagaaatggcccgggtagggggtgcctcctccctggagaatactgtggacctgcacatttccaacagccacccactctccctcacctccgaccagtacaaggcctacctgcaggacttggtggagggcatggatttccagggccctggggagagctgagccctcgctcctcatggtgtgcctccaacccccctgttccccaccacctcaaccaataaactggttcctgcta

SEQ ID NO: 12680 - DNA, 3711 bp, Homo sapiens
tttcaagaagtcgatcaaaaagaaagccccagcgctctagagctcagctgacgggaaagggggtgcgcagcctcgagtttgagagctacccggagctccaagacaggggtgggttccagctgcccgcacgccccgaccttccatcgtaggtaacgcggaagagcccgggagagcgttggtggcgtccgagagcgaggagcgggaaagaggatgggtctgcacggagagtggaaaggcaggctgtgtactctggggaaagtggagcaaggaaggagctacagtggccgacgctggaggtcggctgcagaaaaactagaaaaagtagggaggaaagaggaaaagaggaggcgtctacactgagggggttctagagagggaggggtggactccgtagatgggggtagttcagtctcgaaacctggggcgtgctctgtcctggaggagggaggcgggcagtcggaggggaattgaatggaagttctgtgttggaaatgttttgggagatcttctgtagggggactgtggaagggggtctacattggggtaagtgcaggaggtagaggcttacacgtgaatcgattctgcactgaaataactagggaaagaggatgctaccctgaaagtggggatacttactttcgatgatgtgggggagggaggaggtctatactggcggaattgagggagtggagggtctgcactgaagacgctggggaaggatgtgccatggatatgggaaggaaccctagctgattagagagcctctcgggaggatgggaggatgggaagaggaggtttcctgtttgtacccccgaaaatatgggtgaaggacctgtgccgtggcccgtgagaaggaggtctgggtgcggaaactccaggccaggtgggtccgggggaggccggtcgcgcccaggaaatgccctatacgcgcaggccggaccatgggaaccccaaagccacggatcctgccctggctggtgtcgcagctggacctggggcaactggagggcgtggcctgggtgaacaagagccgcacgcgcttccgcatcccttggaagcacggcctacggcaggatgcacagcaggaggatttcggaatcttccaggtgcgtgcgacgacctgggacgctggaaacccggagctgcgcgctgggcggaaaggactcctagtgggcccggctgagaaggcggaggtggcgcgcgaggggcgggctcgtgccaacgctggtgggtggggctagaacgggaggggcggggctagccggatccgctgactgatggtggggcgcaagcagggttggagctgcagggttacgggaataaaaccgggaaagccggttagtacgcaaaggaaatgcatcctgggggtttggggctttctagaggccggggctcttggttgtaggatagatactgggggatggttcttgaaacatcagaggtgaggcctggagccccaaatctgaggttcctaactaccgaattagtatatgccagaggtggtaaacagtgtgaggggcggggttatcacagagggtgtcgcggggcaggtggtgcacgggattagacaccaagttggacttggaagcctggcttagaaagaaaaggtttttgggccgggggcggtggttcacacctgtaatcctagcactttgcaaggccaaggcgggaggatcgcttgagcccaggagtttgaggccagcttgggcaacataggctccatctctttaaaaacaaaagcgaaacaaaacaaaaaccaaagaggtttcaaaggcttttgaagaggccgagcacagtagctcatgcctgtaatcccagcactttgggaggccgaggaggacggatcacctgaggtcaggagttcaagaccagcctggccaacatggtgaaaccccatctctactaaaaatacaaaaattagccaggtgtagtggtgcccacctgtaatcccagctactcaggaggctgagacaggagaatcgcttgaaccggggaggcggaagttgcagtgagctgagattgcaccattgcattccagcctgggtgacaggagtgaaactccatctcaaaaagaaaaaaagccttttgaaaactagaggtgggggatggaggtaggtgggacggggggatttggggatggaccttgcagagttagaacttgccagggaaagagggtggtgttaggactcgggagacagggttagggccccaggagcaggatctaagtcgtcctcccccaccatcctgacaccactgttgccccaggcctgggccgaggccactggtgcatatgttcccgggagggataagccagacctgccaacctggaagaggaatttccgctctgccctcaaccgcaaagaagggttgcgtttagcagaggaccggagcaaggaccctcacgacccacataaaatctacgagtttgtgaactcaggtctgccagcttggggttcgtgtgggaggctggggccccaagggttcctggcactcctactcccctcaccacttttctcaacaggagttggggacttttcccagccagacacctctccggacaccaatggtggaggcagtacttctgatacccaggtgagaatgtgcccaactttcatgcccctcagtctccgacctgtctccatgggccttgtcctctccctctagacgatccccccactcccctgcctccagcctgcccctcacctgagccagtgctgaccctgtctgtccctgccccggtctcctcaggagaaaattccaagtcttcacccagcattcaaggcccgagcacaccttcccgggatttcatggatttcgattcgcagggggctgtcagcctcttgggaactgaaaaactccctcaccttgatcctgctgaggcccaagctgggggagcatcccctctgaaattctacccagcctgctttgcccaggtcttacctgcatagagccagatccttgggttggaatggtagcacctggcgttcattagtgtttgtttggctgttgatgccatggctggctctgtccccaggctggaagccccttgaaggcagagctcaagcctgacctccctgcgttgctgagaacagacctggtccatatgaagtctccagaaaaggatatggaaatgcctgattctctttttttgtttccctccaggaagacattctggatgagttactgggtaacatggtgttggccccactcccagatccgggacccccaagcctggctgtagcccctgagccctgccctcagcccctgcggagccccagcttggacaatcccactcccttcccaaacctggggccctctgagaacccactgaagcggctgttggtgccgggggaaggtgagtgtcagctgcaggctgggagggctgaggtctgggcggcagcccctgattctcaacccctctccccttcatgccgctgctgccgctgctcagagtgggagttcgaggtgacagccttctaccggggccgccaagtcttccagcagaccatctcctgcccggagggcctgcggctggtggggtccgaagtgggagacaggacgctgcctggatggccagtcacactgccagaccctggcatgtccctgacagacaggggagtgatgagctacgtgaggcatgtgctgagctgcctgggtgggggactggctctctggcgggccgggcagtggctctgggcccagcggctgggg

SEQ ID NO: 12681 - DNA, 1118 bp, Homo sapiens
tttcaagaagtcgatcaaaaagaaagccccagcgctctagagctcagctgacgggaaagggggtgcgcagcctcgagtttgagagctacccggagctccaagacaggggtgggttccagctgcccgcacgccccgaccttccatcgacctgtgccgtggcccgtgagaaggaggtctgggtgcggaaactccaggccaggtgggtccgggggaggccggtcgcgcccaggaaatgccctatacgcgcaggccggaccatgggaaccccaaagccacggatcctgccctggctggtgtcgcagctggacctggggcaactggagggcgtggcctgggtgaacaagagccgcacgcgcttccgcatcccttggaagcacggcctacggcaggatgcacagcaggaggatttcggaatcttccaggcctgggccgaggccactggtgcatatgttcccgggagggataagccagacctgccaacctggaagaggaatttccgctctgccctcaaccgcaaagaagggttgcgtttagcagaggaccggagcaaggaccctcacgacccacataaaatctacgagtttgtgaactcaggagttggggacttttcccagccagacacctctccggacaccaatggtggaggcagtacttctgatacccaggaagacattctggatgagttactgggtaacatggtgttggccccactcccagatccgggacccccaagcctggctgtagcccctgagccctgccctcagcccctgcggagccccagcttggacaatcccactcccttcccaaacctggggccctctgagaacccactgaagcggctgttggtgccgggggaagagtgggagttcgaggtgacagccttctaccggggccgccaagtcttccagcagaccatctcctgcccggagggcctgcggctggtggggtccgaagtgggagacaggacgctgcctggatggccagtcacactgccagaccctggcatgtccctgacagacaggggagtgatgagctacgtgaggcatgtgctgagctgcctgggtgggggactggctctctggcgggccgggcagtggctctgggcccagcggctgggg

SEQ ID NO: 12682 - DNA, 6211 bp, Homo sapiens
gcccagcgggccgtcccatcggcttttgggtctgttacccaaagaatgataaagttggttttatttcaagaagtcgatcaaaaagaaagccccagcgctctagagctcagctgacgggaaagggggtgcgcagcctcgagtttgagagctacccggagctccaagacaggggtgggttccagctgcccgcacgccccgaccttccatcgtaggtaacgcggaagagcccgggagagcgttggtggcgtccgagagcgaggagcgggaaagaggatgggtctgcacggagagtggaaaggcaggctgtgtactctggggaaagtggagcaaggaaggagctacagtggccgacgctggaggtcggctgcagaaaaactagaaaaagtagggaggaaagaggaaaagaggaggcgtctacactgagggggttctagagagggaggggtggactccgtagatgggggtagttcagtctcgaaacctggggcgtgctctgtcctggaggagggaggcgggcagtcggaggggaattgaatggaagttctgtgttggaaatgttttgggagatcttctgtagggggactgtggaagggggtctacattggggtaagtgcaggaggtagaggcttacacgtgaatcgattctgcactgaaataactagggaaagaggatgctaccctgaaagtggggatacttactttcgatgatgtgggggagggaggaggtctatactggcggaattgagggagtggagggtctgcactgaagacgctggggaaggatgtgccatggatatgggaaggaaccctagctgattagagagcctctcgggaggatgggaggatgggaagaggaggtttcctgtttgtacccccgaaaatatgggtgaaggacctgtgccgtggcccgtgagaaggaggtctgggtgcggaaactccaggccaggtgggtccgggggaggccggtcgcgcccaggaaatgccctatacgcgcaggccggaccatgggaaccccaaagccacggatcctgccctggctggtgtcgcagctggacctggggcaactggagggcgtggcctgggtgaacaagagccgcacgcgcttccgcatcccttggaagcacggcctacggcaggatgcacagcaggaggatttcggaatcttccaggtgcgtgcgacgacctgggacgctggaaacccggagctgcgcgctgggcggaaaggactcctagtgggcccggctgagaaggcggaggtggcgcgcgaggggcgggctcgtgccaacgctggtgggtggggctagaacgggaggggcggggctagccggatccgctgactgatggtggggcgcaagcagggttggagctgcagggttacgggaataaaaccgggaaagccggttagtacgcaaaggaaatgcatcctgggggtttggggctttctagaggccggggctcttggttgtaggatagatactgggggatggttcttgaaacatcagaggtgaggcctggagccccaaatctgaggttcctaactaccgaattagtatatgccagaggtggtaaacagtgtgaggggcggggttatcacagagggtgtcgcggggcaggtggtgcacgggattagacaccaagttggacttggaagcctggcttagaaagaaaaggtttttgggccgggggcggtggttcacacctgtaatcctagcactttgcaaggccaaggcgggaggatcgcttgagcccaggagtttgaggccagcttgggcaacataggctccatctctttaaaaacaaaagcgaaacaaaacaaaaaccaaagaggtttcaaaggcttttgaagaggccgagcacagtagctcatgcctgtaatcccagcactttgggaggccgaggaggacggatcacctgaggtcaggagttcaagaccagcctggccaacatggtgaaaccccatctctactaaaaatacaaaaattagccaggtgtagtggtgcccacctgtaatcccagctactcaggaggctgagacaggagaatcgcttgaaccggggaggcggaagttgcagtgagctgagattgcaccattgcattccagcctgggtgacaggagtgaaactccatctcaaaaagaaaaaaagccttttgaaaactagaggtgggggatggaggtaggtgggacggggggatttggggatggaccttgcagagttagaacttgccagggaaagagggtggtgttaggactcgggagacagggttagggccccaggagcaggatctaagtcgtcctcccccaccatcctgacaccactgttgccccaggcctgggccgaggccactggtgcatatgttcccgggagggataagccagacctgccaacctggaagaggaatttccgctctgccctcaaccgcaaagaagggttgcgtttagcagaggaccggagcaaggaccctcacgacccacataaaatctacgagtttgtgaactcaggtctgccagcttggggttcgtgtgggaggctggggccccaagggttcctggcactcctactcccctcaccacttttctcaacaggagttggggacttttcccagccagacacctctccggacaccaatggtggaggcagtacttctgatacccaggtgagaatgtgcccaactttcatgcccctcagtctccgacctgtctccatgggccttgtcctctccctctagacgatccccccactcccctgcctccagcctgcccctcacctgagccagtgctgaccctgtctgtccctgccccggtctcctcaggagaaaattccaagtcttcacccagcattcaaggcccgagcacaccttcccgggatttcatggatttcgattcgcagggggctgtcagcctcttgggaactgaaaaactccctcaccttgatcctgctgaggcccaagctgggggagcatcccctctgaaattctacccagcctgctttgcccaggtcttacctgcatagagccagatccttgggttggaatggtagcacctggcgttcattagtgtttgtttggctgttgatgccatggctggctctgtccccaggctggaagccccttgaaggcagagctcaagcctgacctccctgcgttgctgagaacagacctggtccatatgaagtctccagaaaaggatatggaaatgcctgattctctttttttgtttccctccaggaagacattctggatgagttactgggtaacatggtgttggccccactcccagatccgggacccccaagcctggctgtagcccctgagccctgccctcagcccctgcggagccccagcttggacaatcccactcccttcccaaacctggggccctctgagaacccactgaagcggctgttggtgccgggggaaggtgagtgtcagctgcaggctgggagggctgaggtctgggcggcagcccctgattctcaacccctctccccttcatgccgctgctgccgctgctcagagtgggagttcgaggtgacagccttctaccggggccgccaagtcttccagcagaccatctcctgcccggagggcctgcggctggtggggtccgaagtgggagacaggacgctgcctggatggccagtcacactgccagaccctggcatgtccctgacagacaggggagtgatgagctacgtgaggcatgtgctgagctgcctgggtgggggactggctctctggcgggccgggcagtggctctgggcccagcggctggggcactgccacacatactgggcagtgagcgaggagctgctccccaacagcgggcatgggcctgatggcgaggtccccaaggacaaggaaggaggcgtgtttgacctggggcccttcattgtaggtgagtgagacaggggcttcgacctggccagtacaaagcagcctgcacagtggttaacaactcaggattggccgggcacggtggctcacgcctgtagtcccagcactttgggaggctgaggtgggcagatgacaagttcaggagttcgagaccagcctggtcaacatagtgaaaccccatctctactaaagatacaaaaaaatagtcgggcgtggtggcacgtgcctgtaatcccagctactcgggaggctgaggcaggagaattgcttgaacccaggaggcggagattgcagtgagctgagatcgcaccactgcactctagcctggtgacagagtaagactccatctcgaacaacaaaaaaaaaagaactcatgattaggactgaattcagacgctggctgcccttggcccgctgtataaccgaggcaaaggactttgccctgagcccgtggaatccaaggatggtctcctctctctacctgcctgccagcgctggggtgagacacaggcccagtacacagagcctgctcagggaattagctgccactgtcatcatcatcgtaactaatgatggtgaacagaccaatagcaggaaagctacatcccttagggtttcgctgtgcagtggcactttctgccatgatggaaatgacagtcacctgcactgtccggtgcagcagccactagccacaggggccaagcactcaggtgaggcgagtgcaaccaggacgtgattcgttttaattggttacaatttaaactgaaataaccttacatgactaatggctgcaattggacaatgcagcctcagacaggactgaatgccaaccagcttctccagattcactgagcatccttgggagcatgggccccctactctgggcctgttatgaatgctgaggcttgggggcttgggggtgtggccttccaacaaccccaccctgatgggagggagggagggagggaaggaggggactttccccaaacaagcagtcccctggtcgaggcagcagagggccttaggtcaggggaggtggtgggggttatcattcaagtttacggggaagggtgggtagagggtcctcttctcatccctgactaggctcctgggcccccagatctgattaccttcacggaaggaagcggacgctcaccacgctatgccctctggttctgtgtgggggagtcatggccccaggaccagccgtggaccaagaggctcgtgatggtcaaggtgcctgcagacctgagtccctggggctgaaaggggtggccttacagagggaagaggttgctcccaggaactccaactcccagagggccctctaaaaaactgcaacttccaagatctctgcaataaccagtttttcatccccgggagctccttcccatggcctcacctgcagaacctgttttgaactctctaaaccagtggcccccaaactatttggcaccagggaccagtctcatggaagataatatttccacggacagggaggtgtggtttcgggatgaaactgctccactgcagatcatcaggcattagattctcttaaggagcagccgatccctcacgtgcgcagttcgatagagtttgtgctcctctgagaatctaatgctgccgctgatctcacagaaggcagagctcaggcagtaatattcccccacccgctgctcacatcctgctgtgcaacctggtccctaacaagccgtaggggggttggggacccctgctctaaaccatgtagaagctggtggactcaagttttagctgccattgtgaggccatggctgtggctcccaggagtcaagatcacagactgctcagccctgacgtgtgtgtgtgtgtgtgtttgtgtgtgtgtgtaaaactacaactcccagcagccctaggcctatggttcagttacagcagggggtgtgtgtgtgtgtgtgtgtgtgtgtgtgtgtgtgtgtgtgtgtaaaactacaactcccagcagccctaggcctatggttcatcctaggttacagcaggggctgcagggagttgtagtcctccaagccctgactcctaccttggtggacagtggctgggtgttttccctgactcctgtccccacttcccctgcaggttgtgcccacgtgcctcagggccttggtagaaatggcccgggtagggggtgcctcctccctggagaatactgtggacctgcacatttccaacagccacccactctccctcacctccgaccagtacaaggcctacctgcaggacttggtggagggcatggatttccagggccctggggagagctgagccctcgctcctcatg

SEQ ID NO: 12683 - DNA, 1468 bp, Homo sapiens
gcccagcgggccgtcccatcggcttttgggtctgttacccaaagaatgataaagttggttttatttcaagaagtcgatcaaaaagaaagccccagcgctctagagctcagctgacgggaaagggggtgcgcagcctcgagtttgagagctacccggagctccaagacaggggtgggttccagctgcccgcacgccccgaccttccatcgtaggtgcgtgcgacgacctgggacgctggaaacccggagctgcgcgctgggcggaaaggactcctagtgggcccggctgagaaggcggaggtggcgcgcgaggggcgggctcgtgccaacgctggcctgggccgaggccactggtgcatatgttcccgggagggataagccagacctgccaacctggaagaggaatttccgctctgccctcaaccgcaaagaagggttgcgtttagcagaggaccggagcaaggaccctcacgacccacataaaatctacgagtttgtgaactcaggagttggggacttttcccagccagacacctctccggacaccaatggtggaggcagtacttctgatacccaggaagacattctggatgagttactgggtaacatggtgttggccccactcccagatccgggacccccaagcctggctgtagcccctgagccctgccctcagcccctgcggagccccagcttggacaatcccactcccttcccaaacctggggccctctgagaacccactgaagcggctgttggtgccgggggaagagtgggagttcgaggtgacagccttctaccggggccgccaagtcttccagcagaccatctcctgcccggagggcctgcggctggtggggtccgaagtgggagacaggacgctgcctggatggccagtcacactgccagaccctggcatgtccctgacagacaggggagtgatgagctacgtgaggcatgtgctgagctgcctgggtgggggactggctctctggcgggccgggcagtggctctgggcccagcggctggggcactgccacacatactgggcagtgagcgaggagctgctccccaacagcgggcatgggcctgatggcgaggtccccaaggacaaggaaggaggcgtgtttgacctggggcccttcattgtagatctgattaccttcacggaaggaagcggacgctcaccacgctatgccctctggttctgtgtgggggagtcatggccccaggaccagccgtggaccaagaggctcgtgatggtcaaggttgtgcccacgtgcctcagggccttggtagaaatggcccgggtagggggtgcctcctccctggagaatactgtggacctgcacatttccaacagccacccactctccctcacctccgaccagtacaaggcctacctgcaggacttggtggagggcatggatttccagggccctggggagagctgagccctcgctcctcatg

SEQ ID NO: 12684 - DNA, 6153 bp, Homo sapiens
tgacgggaaagggggtgcgcagcctcgagtttgagagctacccggagctccaagacaggggtgggttccagctgcccgcacgccccgaccttccatcgtaggtaacgcggaagagcccgggagagcgttggtggcgtccgagagcgaggagcgggaaagaggatgggtctgcacggagagtggaaaggcaggctgtgtactctggggaaagtggagcaaggaaggagctacagtggccgacgctggaggtcggctgcagaaaaactagaaaaagtagggaggaaagaggaaaagaggaggcgtctacactgagggggttctagagagggaggggtggactccgtagatgggggtagttcagtctcgaaacctggggcgtgctctgtcctggaggagggaggcgggcagtcggaggggaattgaatggaagttctgtgttggaaatgttttgggagatcttctgtagggggactgtggaagggggtctacattggggtaagtgcaggaggtagaggcttacacgtgaatcgattctgcactgaaataactagggaaagaggatgctaccctgaaagtggggatacttactttcgatgatgtgggggagggaggaggtctatactggcggaattgagggagtggagggtctgcactgaagacgctggggaaggatgtgccatggatatgggaaggaaccctagctgattagagagcctctcgggaggatgggaggatgggaagaggaggtttcctgtttgtacccccgaaaatatgggtgaaggacctgtgccgtggcccgtgagaaggaggtctgggtgcggaaactccaggccaggtgggtccgggggaggccggtcgcgcccaggaaatgccctatacgcgcaggccggaccatgggaaccccaaagccacggatcctgccctggctggtgtcgcagctggacctggggcaactggagggcgtggcctgggtgaacaagagccgcacgcgcttccgcatcccttggaagcacggcctacggcaggatgcacagcaggaggatttcggaatcttccaggtgcgtgcgacgacctgggacgctggaaacccggagctgcgcgctgggcggaaaggactcctagtgggcccggctgagaaggcggaggtggcgcgcgaggggcgggctcgtgccaacgctggtgggtggggctagaacgggaggggcggggctagccggatccgctgactgatggtggggcgcaagcagggttggagctgcagggttacgggaataaaaccgggaaagccggttagtacgcaaaggaaatgcatcctgggggtttggggctttctagaggccggggctcttggttgtaggatagatactgggggatggttcttgaaacatcagaggtgaggcctggagccccaaatctgaggttcctaactaccgaattagtatatgccagaggtggtaaacagtgtgaggggcggggttatcacagagggtgtcgcggggcaggtggtgcacgggattagacaccaagttggacttggaagcctggcttagaaagaaaaggtttttgggccgggggcggtggttcacacctgtaatcctagcactttgcaaggccaaggcgggaggatcgcttgagcccaggagtttgaggccagcttgggcaacataggctccatctctttaaaaacaaaagcgaaacaaaacaaaaaccaaagaggtttcaaaggcttttgaagaggccgagcacagtagctcatgcctgtaatcccagcactttgggaggccgaggaggacggatcacctgaggtcaggagttcaagaccagcctggccaacatggtgaaaccccatctctactaaaaatacaaaaattagccaggtgtagtggtgcccacctgtaatcccagctactcaggaggctgagacaggagaatcgcttgaaccggggaggcggaagttgcagtgagctgagattgcaccattgcattccagcctgggtgacaggagtgaaactccatctcaaaaagaaaaaaagccttttgaaaactagaggtgggggatggaggtaggtgggacggggggatttggggatggaccttgcagagttagaacttgccagggaaagagggtggtgttaggactcgggagacagggttagggccccaggagcaggatctaagtcgtcctcccccaccatcctgacaccactgttgccccaggcctgggccgaggccactggtgcatatgttcccgggagggataagccagacctgccaacctggaagaggaatttccgctctgccctcaaccgcaaagaagggttgcgtttagcagaggaccggagcaaggaccctcacgacccacataaaatctacgagtttgtgaactcaggtctgccagcttggggttcgtgtgggaggctggggccccaagggttcctggcactcctactcccctcaccacttttctcaacaggagttggggacttttcccagccagacacctctccggacaccaatggtggaggcagtacttctgatacccaggtgagaatgtgcccaactttcatgcccctcagtctccgacctgtctccatgggccttgtcctctccctctagacgatccccccactcccctgcctccagcctgcccctcacctgagccagtgctgaccctgtctgtccctgccccggtctcctcaggagaaaattccaagtcttcacccagcattcaaggcccgagcacaccttcccgggatttcatggatttcgattcgcagggggctgtcagcctcttgggaactgaaaaactccctcaccttgatcctgctgaggcccaagctgggggagcatcccctctgaaattctacccagcctgctttgcccaggtcttacctgcatagagccagatccttgggttggaatggtagcacctggcgttcattagtgtttgtttggctgttgatgccatggctggctctgtccccaggctggaagccccttgaaggcagagctcaagcctgacctccctgcgttgctgagaacagacctggtccatatgaagtctccagaaaaggatatggaaatgcctgattctctttttttgtttccctccaggaagacattctggatgagttactgggtaacatggtgttggccccactcccagatccgggacccccaagcctggctgtagcccctgagccctgccctcagcccctgcggagccccagcttggacaatcccactcccttcccaaacctggggccctctgagaacccactgaagcggctgttggtgccgggggaaggtgagtgtcagctgcaggctgggagggctgaggtctgggcggcagcccctgattctcaacccctctccccttcatgccgctgctgccgctgctcagagtgggagttcgaggtgacagccttctaccggggccgccaagtcttccagcagaccatctcctgcccggagggcctgcggctggtggggtccgaagtgggagacaggacgctgcctggatggccagtcacactgccagaccctggcatgtccctgacagacaggggagtgatgagctacgtgaggcatgtgctgagctgcctgggtgggggactggctctctggcgggccgggcagtggctctgggcccagcggctggggcactgccacacatactgggcagtgagcgaggagctgctccccaacagcgggcatgggcctgatggcgaggtccccaaggacaaggaaggaggcgtgtttgacctggggcccttcattgtaggtgagtgagacaggggcttcgacctggccagtacaaagcagcctgcacagtggttaacaactcaggattggccgggcacggtggctcacgcctgtagtcccagcactttgggaggctgaggtgggcagatgacaagttcaggagttcgagaccagcctggtcaacatagtgaaaccccatctctactaaagatacaaaaaaatagtcgggcgtggtggcacgtgcctgtaatcccagctactcgggaggctgaggcaggagaattgcttgaacccaggaggcggagattgcagtgagctgagatcgcaccactgcactctagcctggtgacagagtaagactccatctcgaacaacaaaaaaaaaagaactcatgattaggactgaattcagacgctggctgcccttggcccgctgtataaccgaggcaaaggactttgccctgagcccgtggaatccaaggatggtctcctctctctacctgcctgccagcgctggggtgagacacaggcccagtacacagagcctgctcagggaattagctgccactgtcatcatcatcgtaactaatgatggtgaacagaccaatagcaggaaagctacatcccttagggtttcgctgtgcagtggcactttctgccatgatggaaatgacagtcacctgcactgtccggtgcagcagccactagccacaggggccaagcactcaggtgaggcgagtgcaaccaggacgtgattcgttttaattggttacaatttaaactgaaataaccttacatgactaatggctgcaattggacaatgcagcctcagacaggactgaatgccaaccagcttctccagattcactgagcatccttgggagcatgggccccctactctgggcctgttatgaatgctgaggcttgggggcttgggggtgtggccttccaacaaccccaccctgatgggagggagggagggagggaaggaggggactttccccaaacaagcagtcccctggtcgaggcagcagagggccttaggtcaggggaggtggtgggggttatcattcaagtttacggggaagggtgggtagagggtcctcttctcatccctgactaggctcctgggcccccagatctgattaccttcacggaaggaagcggacgctcaccacgctatgccctctggttctgtgtgggggagtcatggccccaggaccagccgtggaccaagaggctcgtgatggtcaaggtgcctgcagacctgagtccctggggctgaaaggggtggccttacagagggaagaggttgctcccaggaactccaactcccagagggccctctaaaaaactgcaacttccaagatctctgcaataaccagtttttcatccccgggagctccttcccatggcctcacctgcagaacctgttttgaactctctaaaccagtggcccccaaactatttggcaccagggaccagtctcatggaagataatatttccacggacagggaggtgtggtttcgggatgaaactgctccactgcagatcatcaggcattagattctcttaaggagcagccgatccctcacgtgcgcagttcgatagagtttgtgctcctctgagaatctaatgctgccgctgatctcacagaaggcagagctcaggcagtaatattcccccacccgctgctcacatcctgctgtgcaacctggtccctaacaagccgtaggggggttggggacccctgctctaaaccatgtagaagctggtggactcaagttttagctgccattgtgaggccatggctgtggctcccaggagtcaagatcacagactgctcagccctgacgtgtgtgtgtgtgtgtgtttgtgtgtgtgtgtaaaactacaactcccagcagccctaggcctatggttcagttacagcagggggtgtgtgtgtgtgtgtgtgtgtgtgtgtgtgtgtgtgtgtgtgtaaaactacaactcccagcagccctaggcctatggttcatcctaggttacagcaggggctgcagggagttgtagtcctccaagccctgactcctaccttggtggacagtggctgggtgttttccctgactcctgtccccacttcccctgcaggttgtgcccacgtgcctcagggccttggtagaaatggcccgggtagggggtgcctcctccctggagaatactgtggacctgcacatttccaacagccacccactctccctcacctccgaccagtacaaggcctacctgcaggacttggtggagggcatggatttccagggccctggggagagctgagccctcgctcctcatggtgtgcctccaacccccctgttccccaccacctcaaccaataaactggttcct

SEQ ID NO: 12685 - DNA, 1117 bp, Homo sapiens
tgacgggaaagggggtgcgcagcctcgagtttgagagctacccggagctccaagacaggggtgggttccagctgcccgcacgccccgaccttccatcgtaggagttggggacttttcccagccagacacctctccggacaccaatggtggaggcagtacttctgatacccaggaagacattctggatgagttactgggtaacatggtgttggccccactcccagatccgggacccccaagcctggctgtagcccctgagccctgccctcagcccctgcggagccccagcttggacaatcccactcccttcccaaacctggggccctctgagaacccactgaagcggctgttggtgccgggggaagagtgggagttcgaggtgacagccttctaccggggccgccaagtcttccagcagaccatctcctgcccggagggcctgcggctggtggggtccgaagtgggagacaggacgctgcctggatggccagtcacactgccagaccctggcatgtccctgacagacaggggagtgatgagctacgtgaggcatgtgctgagctgcctgggtgggggactggctctctggcgggccgggcagtggctctgggcccagcggctggggcactgccacacatactgggcagtgagcgaggagctgctccccaacagcgggcatgggcctgatggcgaggtccccaaggacaaggaaggaggcgtgtttgacctggggcccttcattgtagatctgattaccttcacggaaggaagcggacgctcaccacgctatgccctctggttctgtgtgggggagtcatggccccaggaccagccgtggaccaagaggctcgtgatggtcaaggttgtgcccacgtgcctcagggccttggtagaaatggcccgggtagggggtgcctcctccctggagaatactgtggacctgcacatttccaacagccacccactctccctcacctccgaccagtacaaggcctacctgcaggacttggtggagggcatggatttccagggccctggggagagctgagccctcgctcctcatggtgtgcctccaacccccctgttccccaccacctcaaccaataaactggttcct

SEQ ID NO: 12686 - DNA, 6127 bp, Homo sapiens; identical to SEQ ID NO: 12654

SEQ ID NO: 12687 - DNA, 1055 bp, Homo sapiens
gagtttgagagctacccggagctccaagacaggggtgggttccagctgcccgcacgccccgaccttccatcgtaggccggaccatgggaaccccaaagccacggatcctgccctggctggtgtcgcagctggacctggggcaactggagggcgtggcctgggtgaacaagagccgcacgcgcttccgcatcccttggaagcacggcctacggcaggatgcacagcaggaggatttcggaatcttccaggcctgggccgaggccactggtgcatatgttcccgggagggataagccagacctgccaacctggaagaggaatttccgctctgccctcaaccgcaaagaagggttgcgtttagcagaggaccggagcaaggaccctcacgacccacataaaatctacgagtttgtgaactcaggagttggggacttttcccagccagacacctctccggacaccaatggtggaggcagtacttctgatacccaggaagacattctggatgagttactgggtaacatggtgttggccccactcccagatccgggacccccaagcctggctgtagcccctgagccctgccctcagcccctgcggagccccagcttggacaatcccactcccttcccaaacctggggccctctgagaacccactgaagcggctgttggtgccgggggaagatctgattaccttcacggaaggaagcggacgctcaccacgctatgccctctggttctgtgtgggggagtcatggccccaggaccagccgtggaccaagaggctcgtgatggtcaaggttgtgcccacgtgcctcagggccttggtagaaatggcccgggtagggggtgcctcctccctggagaatactgtggacctgcacatttccaacagccacccactctccctcacctccgaccagtacaaggcctacctgcaggacttggtggagggcatggatttccagggccctggggagagctgagccctcgctcctcatggtgtgcctccaacccccctgttccccaccacctcaaccaataaactggttcct

SEQ ID NO: 12688 - DNA, 1956 bp, Homo sapiens
gaggcaaaggactttgccctgagcccgtggaatccaaggatggtctcctctctctacctgcctgccagcgctggggtgagacacaggcccagtacacagagcctgctcagggaattagctgccactgtcatcatcatcgtaactaatgatggtgaacagaccaatagcaggaaagctacatcccttagggtttcgctgtgcagtggcactttctgccatgatggaaatgacagtcacctgcactgtccggtgcagcagccactagccacaggggccaagcactcaggtgaggcgagtgcaaccaggacgtgattcgttttaattggttacaatttaaactgaaataaccttacatgactaatggctgcaattggacaatgcagcctcagacaggactgaatgccaaccagcttctccagattcactgagcatccttgggagcatgggccccctactctgggcctgttatgaatgctgaggcttgggggcttgggggtgtggccttccaacaaccccaccctgatgggagggagggagggagggaaggaggggactttccccaaacaagcagtcccctggtcgaggcagcagagggccttaggtcaggggaggtggtgggggttatcattcaagtttacggggaagggtgggtagagggtcctcttctcatccctgactaggctcctgggcccccagatctgattaccttcacggaaggaagcggacgctcaccacgctatgccctctggttctgtgtgggggagtcatggccccaggaccagccgtggaccaagaggctcgtgatggtcaaggtgcctgcagacctgagtccctggggctgaaaggggtggccttacagagggaagaggttgctcccaggaactccaactcccagagggccctctaaaaaactgcaacttccaagatctctgcaataaccagtttttcatccccgggagctccttcccatggcctcacctgcagaacctgttttgaactctctaaaccagtggcccccaaactatttggcaccagggaccagtctcatggaagataatatttccacggacagggaggtgtggtttcgggatgaaactgctccactgcagatcatcaggcattagattctcttaaggagcagccgatccctcacgtgcgcagttcgatagagtttgtgctcctctgagaatctaatgctgccgctgatctcacagaaggcagagctcaggcagtaatattcccccacccgctgctcacatcctgctgtgcaacctggtccctaacaagccgtaggggggttggggacccctgctctaaaccatgtagaagctggtggactcaagttttagctgccattgtgaggccatggctgtggctcccaggagtcaagatcacagactgctcagccctgacgtgtgtgtgtgtgtgtgtttgtgtgtgtgtgtaaaactacaactcccagcagccctaggcctatggttcagttacagcagggggtgtgtgtgtgtgtgtgtgtgtgtgtgtgtgtgtgtgtgtgtgtaaaactacaactcccagcagccctaggcctatggttcatcctaggttacagcaggggctgcagggagttgtagtcctccaagccctgactcctaccttggtggacagtggctgggtgttttccctgactcctgtccccacttcccctgcaggttgtgcccacgtgcctcagggccttggtagaaatggcccgggtagggggtgcctcctccctggagaatactgtggacctgcacatttccaacagccacccactctccctcacctccgaccagtacaaggcctacctgcaggacttggtggagggcatggatttccagggccctggggagagctgagccctcgctcctcatggtgtgcctccaacccccctgttccccaccacctcaaccaataaactggttcctgctatgatca

SEQ ID NO: 12689 - DNA, 472 bp, Homo sapiens
gaggcaaaggactttgccctgagcccgtggaatccaaggatggtctcctctctctacctgcctgccagcgctggggctcctgggcccccagatctgattaccttcacggaaggaagcggacgctcaccacgctatgccctctggttctgtgtgggggagtcatggccccaggaccagccgtggaccaagaggctcgtgatggtcaaggttgtgcccacgtgcctcagggccttggtagaaatggcccgggtagggggtgcctcctccctggagaatactgtggacctgcacatttccaacagccacccactctccctcacctccgaccagtacaaggcctacctgcaggacttggtggagggcatggatttccagggccctggggagagctgagccctcgctcctcatggtgtgcctccaacccccctgttccccaccacctcaaccaataaactggttcctgctatgatca

SEQ ID NO: 12690 - DNA, 6127 bp, Homo sapiens; identical to SEQ ID NO: 12654

SEQ ID NO: 12691 - DNA, 882 bp, Homo sapiens
gagtttgagagctacccggagctccaagacaggggtgggttccagctgcccgcacgccccgaccttccatcgtaggcctgggccgaggccactggtgcatatgttcccgggagggataagccagacctgccaacctggaagaggaatttccgctctgccctcaaccgcaaagaagggttgcgtttagcagaggaccggagcaaggaccctcacgacccacataaaatctacgagtttgtgaactcaggagttggggacttttcccagccagacacctctccggacaccaatggtggaggcagtacttctgatacccaggaagacattctggatgagttactgggtaacatggtgttggccccactcccagatccgggacccccaagcctggctgtagcccctgagccctgccctcagcccctgcggagccccagcttggacaatcccactcccttcccaaacctggggccctctgagaacccactgaagcggctgttggtgccgggggaagatctgattaccttcacggaaggaagcggacgctcaccacgctatgccctctggttctgtgtgggggagtcatggccccaggaccagccgtggaccaagaggctcgtgatggtcaaggttgtgcccacgtgcctcagggccttggtagaaatggcccgggtagggggtgcctcctccctggagaatactgtggacctgcacatttccaacagccacccactctccctcacctccgaccagtacaaggcctacctgcaggacttggtggagggcatggatttccagggccctggggagagctgagccctcgctcctcatggtgtgcctccaacccccctgttccccaccacctcaaccaataaactggttcct

SEQ ID NO: 12692 - DNA, 2471 bp, Homo sapiens
agcccagcgggccgtcccatcggcttttgggtctgttacccaaagaatgataaagttggttttatttcaagaagtcgatcaaaaagaaagccccagcgctctagagctcagctgacgggaaagggggtgcgcagcctcgagtttgagagctacccggagctccaagacaggggtgggttccagctgcccgcacgccccgaccttccatcgtaggtaacgcggaagagcccgggagagcgttggtggcgtccgagagcgaggagcgggaaagaggatgggtctgcacggagagtggaaaggcaggctgtgtactctggggaaagtggagcaaggaaggagctacagtggccgacgctggaggtcggctgcagaaaaactagaaaaagtagggaggaaagaggaaaagaggaggcgtctacactgagggggttctagagagggaggggtggactccgtagatgggggtagttcagtctcgaaacctggggcgtgctctgtcctggaggagggaggcgggcagtcggaggggaattgaatggaagttctgtgttggaaatgttttgggagatcttctgtagggggactgtggaagggggtctacattggggtaagtgcaggaggtagaggcttacacgtgaatcgattctgcactgaaataactagggaaagaggatgctaccctgaaagtggggatacttactttcgatgatgtgggggagggaggaggtctatactggcggaattgagggagtggagggtctgcactgaagacgctggggaaggatgtgccatggatatgggaaggaaccctagctgattagagagcctctcgggaggatgggaggatgggaagaggaggtttcctgtttgtacccccgaaaatatgggtgaaggacctgtgccgtggcccgtgagaaggaggtctgggtgcggaaactccaggccaggtgggtccgggggaggccggtcgcgcccaggaaatgccctatacgcgcaggccggaccatgggaaccccaaagccacggatcctgccctggctggtgtcgcagctggacctggggcaactggagggcgtggcctgggtgaacaagagccgcacgcgcttccgcatcccttggaagcacggcctacggcaggatgcacagcaggaggatttcggaatcttccaggtgcgtgcgacgacctgggacgctggaaacccggagctgcgcgctgggcggaaaggactcctagtgggcccggctgagaaggcggaggtggcgcgcgaggggcgggctcgtgccaacgctggtgggtggggctagaacgggaggggcggggctagccggatccgctgactgatggtggggcgcaagcagggttggagctgcagggttacgggaataaaaccgggaaagccggttagtacgcaaaggaaatgcatcctgggggtttggggctttctagaggccggggctcttggttgtaggatagatactgggggatggttcttgaaacatcagaggtgaggcctggagccccaaatctgaggttcctaactaccgaattagtatatgccagaggtggtaaacagtgtgaggggcggggttatcacagagggtgtcgcggggcaggtggtgcacgggattagacaccaagttggacttggaagcctggcttagaaagaaaaggtttttgggccgggggcggtggttcacacctgtaatcctagcactttgcaaggccaaggcgggaggatcgcttgagcccaggagtttgaggccagcttgggcaacataggctccatctctttaaaaacaaaagcgaaacaaaacaaaaaccaaagaggtttcaaaggcttttgaagaggccgagcacagtagctcatgcctgtaatcccagcactttgggaggccgaggaggacggatcacctgaggtcaggagttcaagaccagcctggccaacatggtgaaaccccatctctactaaaaatacaaaaattagccaggtgtagtggtgcccacctgtaatcccagctactcaggaggctgagacaggagaatcgcttgaaccggggaggcggaagttgcagtgagctgagattgcaccattgcattccagcctgggtgacaggagtgaaactccatctcaaaaagaaaaaaagccttttgaaaactagaggtgggggatggaggtaggtgggacggggggatttggggatggaccttgcagagttagaacttgccagggaaagagggtggtgttaggactcgggagacagggttagggccccaggagcaggatctaagtcgtcctcccccaccatcctgacaccactgttgccccaggcctgggccgaggccactggtgcatatgttcccgggagggataagccagacctgccaacctggaagaggaatttccgctctgccctcaaccgcaaagaagggttgcgtttagcagaggaccggagcaaggaccctcacgacc

SEQ ID NO: 12693 - DNA, 700 bp, Homo sapiens
agcccagcgggccgtcccatcggcttttgggtctgttacccaaagaatgataaagttggttttatttcaagaagtcgatcaaaaagaaagccccagcgctctagagctcagctgacgggaaagggggtgcgcagcctcgagtttgagagctacccggagctccaagacaggggtgggttccagctgcccgcacgccccgaccttccatcgtaggtaacgcggaagagcccgggagagcgttggtggcgtccgagagcgaggagcgggaaagaggatgggtctgcacggagagtggaaaggcaggctgtgtactctggggaaagtggagcaaggaaggagctacagtggccgacgctggaggtcggctgcagaaaaactagaaaaagccggaccatgggaaccccaaagccacggatcctgccctggctggtgtcgcagctggacctggggcaactggagggcgtggcctgggtgaacaagagccgcacgcgcttccgcatcccttggaagcacggcctacggcaggatgcacagcaggaggatttcggaatcttccaggcctgggccgaggccactggtgcatatgttcccgggagggataagccagacctgccaacctggaagaggaatttccgctctgccctcaaccgcaaagaagggttgcgtttagcagaggaccggagcaaggaccctcacgacc

SEQ ID NO: 12694 - DNA, 5660 bp, Homo sapiens
tgcaggaggtagaggcttacacgtgaatcgattctgcactgaaataactagggaaagaggatgctaccctgaaagtggggatacttactttcgatgatgtgggggagggaggaggtctatactggcggaattgagggagtggagggtctgcactgaagacgctggggaaggatgtgccatggatatgggaaggaaccctagctgattagagagcctctcgggaggatgggaggatgggaagaggaggtttcctgtttgtacccccgaaaatatgggtgaaggacctgtgccgtggcccgtgagaaggaggtctgggtgcggaaactccaggccaggtgggtccgggggaggccggtcgcgcccaggaaatgccctatacgcgcaggccggaccatgggaaccccaaagccacggatcctgccctggctggtgtcgcagctggacctggggcaactggagggcgtggcctgggtgaacaagagccgcacgcgcttccgcatcccttggaagcacggcctacggcaggatgcacagcaggaggatttcggaatcttccaggtgcgtgcgacgacctgggacgctggaaacccggagctgcgcgctgggcggaaaggactcctagtgggcccggctgagaaggcggaggtggcgcgcgaggggcgggctcgtgccaacgctggtgggtggggctagaacgggaggggcggggctagccggatccgctgactgatggtggggcgcaagcagggttggagctgcagggttacgggaataaaaccgggaaagccggttagtacgcaaaggaaatgcatcctgggggtttggggctttctagaggccggggctcttggttgtaggatagatactgggggatggttcttgaaacatcagaggtgaggcctggagccccaaatctgaggttcctaactaccgaattagtatatgccagaggtggtaaacagtgtgaggggcggggttatcacagagggtgtcgcggggcaggtggtgcacgggattagacaccaagttggacttggaagcctggcttagaaagaaaaggtttttgggccgggggcggtggttcacacctgtaatcctagcactttgcaaggccaaggcgggaggatcgcttgagcccaggagtttgaggccagcttgggcaacataggctccatctctttaaaaacaaaagcgaaacaaaacaaaaaccaaagaggtttcaaaggcttttgaagaggccgagcacagtagctcatgcctgtaatcccagcactttgggaggccgaggaggacggatcacctgaggtcaggagttcaagaccagcctggccaacatggtgaaaccccatctctactaaaaatacaaaaattagccaggtgtagtggtgcccacctgtaatcccagctactcaggaggctgagacaggagaatcgcttgaaccggggaggcggaagttgcagtgagctgagattgcaccattgcattccagcctgggtgacaggagtgaaactccatctcaaaaagaaaaaaagccttttgaaaactagaggtgggggatggaggtaggtgggacggggggatttggggatggaccttgcagagttagaacttgccagggaaagagggtggtgttaggactcgggagacagggttagggccccaggagcaggatctaagtcgtcctcccccaccatcctgacaccactgttgccccaggcctgggccgaggccactggtgcatatgttcccgggagggataagccagacctgccaacctggaagaggaatttccgctctgccctcaaccgcaaagaagggttgcgtttagcagaggaccggagcaaggaccctcacgacccacataaaatctacgagtttgtgaactcaggtctgccagcttggggttcgtgtgggaggctggggccccaagggttcctggcactcctactcccctcaccacttttctcaacaggagttggggacttttcccagccagacacctctccggacaccaatggtggaggcagtacttctgatacccaggtgagaatgtgcccaactttcatgcccctcagtctccgacctgtctccatgggccttgtcctctccctctagacgatccccccactcccctgcctccagcctgcccctcacctgagccagtgctgaccctgtctgtccctgccccggtctcctcaggagaaaattccaagtcttcacccagcattcaaggcccgagcacaccttcccgggatttcatggatttcgattcgcagggggctgtcagcctcttgggaactgaaaaactccctcaccttgatcctgctgaggcccaagctgggggagcatcccctctgaaattctacccagcctgctttgcccaggtcttacctgcatagagccagatccttgggttggaatggtagcacctggcgttcattagtgtttgtttggctgttgatgccatggctggctctgtccccaggctggaagccccttgaaggcagagctcaagcctgacctccctgcgttgctgagaacagacctggtccatatgaagtctccagaaaaggatatggaaatgcctgattctctttttttgtttccctccaggaagacattctggatgagttactgggtaacatggtgttggccccactcccagatccgggacccccaagcctggctgtagcccctgagccctgccctcagcccctgcggagccccagcttggacaatcccactcccttcccaaacctggggccctctgagaacccactgaagcggctgttggtgccgggggaaggtgagtgtcagctgcaggctgggagggctgaggtctgggcggcagcccctgattctcaacccctctccccttcatgccgctgctgccgctgctcagagtgggagttcgaggtgacagccttctaccggggccgccaagtcttccagcagaccatctcctgcccggagggcctgcggctggtggggtccgaagtgggagacaggacgctgcctggatggccagtcacactgccagaccctggcatgtccctgacagacaggggagtgatgagctacgtgaggcatgtgctgagctgcctgggtgggggactggctctctggcgggccgggcagtggctctgggcccagcggctggggcactgccacacatactgggcagtgagcgaggagctgctccccaacagcgggcatgggcctgatggcgaggtccccaaggacaaggaaggaggcgtgtttgacctggggcccttcattgtaggtgagtgagacaggggcttcgacctggccagtacaaagcagcctgcacagtggttaacaactcaggattggccgggcacggtggctcacgcctgtagtcccagcactttgggaggctgaggtgggcagatgacaagttcaggagttcgagaccagcctggtcaacatagtgaaaccccatctctactaaagatacaaaaaaatagtcgggcgtggtggcacgtgcctgtaatcccagctactcgggaggctgaggcaggagaattgcttgaacccaggaggcggagattgcagtgagctgagatcgcaccactgcactctagcctggtgacagagtaagactccatctcgaacaacaaaaaaaaaagaactcatgattaggactgaattcagacgctggctgcccttggcccgctgtataaccgaggcaaaggactttgccctgagcccgtggaatccaaggatggtctcctctctctacctgcctgccagcgctggggtgagacacaggcccagtacacagagcctgctcagggaattagctgccactgtcatcatcatcgtaactaatgatggtgaacagaccaatagcaggaaagctacatcccttagggtttcgctgtgcagtggcactttctgccatgatggaaatgacagtcacctgcactgtccggtgcagcagccactagccacaggggccaagcactcaggtgaggcgagtgcaaccaggacgtgattcgttttaattggttacaatttaaactgaaataaccttacatgactaatggctgcaattggacaatgcagcctcagacaggactgaatgccaaccagcttctccagattcactgagcatccttgggagcatgggccccctactctgggcctgttatgaatgctgaggcttgggggcttgggggtgtggccttccaacaaccccaccctgatgggagggagggagggagggaaggaggggactttccccaaacaagcagtcccctggtcgaggcagcagagggccttaggtcaggggaggtggtgggggttatcattcaagtttacggggaagggtgggtagagggtcctcttctcatccctgactaggctcctgggcccccagatctgattaccttcacggaaggaagcggacgctcaccacgctatgccctctggttctgtgtgggggagtcatggccccaggaccagccgtggaccaagaggctcgtgatggtcaaggtgcctgcagacctgagtccctggggctgaaaggggtggccttacagagggaagaggttgctcccaggaactccaactcccagagggccctctaaaaaactgcaacttccaagatctctgcaataaccagtttttcatccccgggagctccttcccatggcctcacctgcagaacctgttttgaactctctaaaccagtggcccccaaactatttggcaccagggaccagtctcatggaagataatatttccacggacagggaggtgtggtttcgggatgaaactgctccactgcagatcatcaggcattagattctcttaaggagcagccgatccctcacgtgcgcagttcgatagagtttgtgctcctctgagaatctaatgctgccgctgatctcacagaaggcagagctcaggcagtaatattcccccacccgctgctcacatcctgctgtgcaacctggtccctaacaagccgtaggggggttggggacccctgctctaaaccatgtagaagctggtggactcaagttttagctgccattgtgaggccatggctgtggctcccaggagtcaagatcacagactgctcagccctgacgtgtgtgtgtgtgtgtgtttgtgtgtgtgtgtaaaactacaactcccagcagccctaggcctatggttcagttacagcagggggtgtgtgtgtgtgtgtgtgtgtgtgtgtgtgtgtgtgtgtgtgtaaaactacaactcccagcagccctaggcctatggttcatcctaggttacagcaggggctgcagggagttgtagtcctccaagccctgactcctaccttggtggacagtggctgggtgttttccctgactcctgtccccacttcccctgcaggttgtgcccacgtgcctcagggccttggtagaaatggcccgggtagggggtgcctcctccctggagaatactgtggacctgcacatttccaacagccacccactctccctcacctccgaccagtacaaggcctacctgcaggacttggtggagggcatggatttccagggccctggggagagctgagccctcgctcctcatggtgtgcctccaacccccctgttccccaccacctcaaccaataaactggttcctgctatga

SEQ ID NO: 12695 - DNA, 1637 bp, Homo sapiens
tgcaggaggtagaggcttacacgtgaatcgattctgcactgaaataactagggaaagaggatgctaccctgaaagtggggatacttactttcgatgatgtgggggagggaggaggtctatactggcggaattgagggagtggagggtctgcactgaagacgctggggaaggatgtgccatggatatgggaaggaaccctagctgattagagagcctctcgggaggatgggaggatgggaagaggaggtttcctgtttgtacccccgaaaatatgggtgaaggacctgtgccgtggcccgtgagaaggaggtctgggtgcggaaactccaggccaggtgggtccgggggaggccggtcgcgcccaggaaatgccctatacgcgcaggccggaccatgggaaccccaaagccacggatcctgccctggctggtgtcgcagctggacctggggcaactggagggcgtggcctgggtgaacaagagccgcacgcgcttccgcatcccttggaagcacggcctacggcaggatgcacagcaggaggatttcggaatcttccaggcctgggccgaggccactggtgcatatgttcccgggagggataagccagacctgccaacctggaagaggaatttccgctctgccctcaaccgcaaagaagggttgcgtttagcagaggaccggagcaaggaccctcacgacccacataaaatctacgagtttgtgaactcaggagttggggacttttcccagccagacacctctccggacaccaatggtggaggcagtacttctgatacccaggaagacattctggatgagttactgggtaacatggtgttggccccactcccagatccgggacccccaagcctggctgtagcccctgagccctgccctcagcccctgcggagccccagcttggacaatcccactcccttcccaaacctggggccctctgagaacccactgaagcggctgttggtgccgggggaagagtgggagttcgaggtgacagccttctaccggggccgccaagtcttccagcagaccatctcctgcccggagggcctgcggctggtggggtccgaagtgggagacaggacgctgcctggatggccagtcacactgccagaccctggcatgtccctgacagacaggggagtgatgagctacgtgaggcatgtgctgagctgcctgggtgggggactggctctctggcgggccgggcagtggctctgggcccagcggctggggcactgccacacatactgggcagtgagcgaggagctgctccccaacagcgggcatgggcctgatggcgaggtccccaaggacaaggaaggaggcgtgtttgacctggggcccttcattgtaggttgtgcccacgtgcctcagggccttggtagaaatggcccgggtagggggtgcctcctccctggagaatactgtggacctgcacatttccaacagccacccactctccctcacctccgaccagtacaaggcctacctgcaggacttggtggagggcatggatttccagggccctggggagagctgagccctcgctcctcatggtgtgcctccaacccccctgttccccaccacctcaaccaataaactggttcctgctatga

SEQ ID NO: 12696 - DNA, 6231 bp, Homo sapiens
aaagaatgataaagttggttttatttcaagaagtcgatcaaaaagaaagccccagcgctctagagctcagctgacgggaaagggggtgcgcagcctcgagtttgagagctacccggagctccaagacaggggtgggttccagctgcccgcacgccccgaccttccatcgtaggtaacgcggaagagcccgggagagcgttggtggcgtccgagagcgaggagcgggaaagaggatgggtctgcacggagagtggaaaggcaggctgtgtactctggggaaagtggagcaaggaaggagctacagtggccgacgctggaggtcggctgcagaaaaactagaaaaagtagggaggaaagaggaaaagaggaggcgtctacactgagggggttctagagagggaggggtggactccgtagatgggggtagttcagtctcgaaacctggggcgtgctctgtcctggaggagggaggcgggcagtcggaggggaattgaatggaagttctgtgttggaaatgttttgggagatcttctgtagggggactgtggaagggggtctacattggggtaagtgcaggaggtagaggcttacacgtgaatcgattctgcactgaaataactagggaaagaggatgctaccctgaaagtggggatacttactttcgatgatgtgggggagggaggaggtctatactggcggaattgagggagtggagggtctgcactgaagacgctggggaaggatgtgccatggatatgggaaggaaccctagctgattagagagcctctcgggaggatgggaggatgggaagaggaggtttcctgtttgtacccccgaaaatatgggtgaaggacctgtgccgtggcccgtgagaaggaggtctgggtgcggaaactccaggccaggtgggtccgggggaggccggtcgcgcccaggaaatgccctatacgcgcaggccggaccatgggaaccccaaagccacggatcctgccctggctggtgtcgcagctggacctggggcaactggagggcgtggcctgggtgaacaagagccgcacgcgcttccgcatcccttggaagcacggcctacggcaggatgcacagcaggaggatttcggaatcttccaggtgcgtgcgacgacctgggacgctggaaacccggagctgcgcgctgggcggaaaggactcctagtgggcccggctgagaaggcggaggtggcgcgcgaggggcgggctcgtgccaacgctggtgggtggggctagaacgggaggggcggggctagccggatccgctgactgatggtggggcgcaagcagggttggagctgcagggttacgggaataaaaccgggaaagccggttagtacgcaaaggaaatgcatcctgggggtttggggctttctagaggccggggctcttggttgtaggatagatactgggggatggttcttgaaacatcagaggtgaggcctggagccccaaatctgaggttcctaactaccgaattagtatatgccagaggtggtaaacagtgtgaggggcggggttatcacagagggtgtcgcggggcaggtggtgcacgggattagacaccaagttggacttggaagcctggcttagaaagaaaaggtttttgggccgggggcggtggttcacacctgtaatcctagcactttgcaaggccaaggcgggaggatcgcttgagcccaggagtttgaggccagcttgggcaacataggctccatctctttaaaaacaaaagcgaaacaaaacaaaaaccaaagaggtttcaaaggcttttgaagaggccgagcacagtagctcatgcctgtaatcccagcactttgggaggccgaggaggacggatcacctgaggtcaggagttcaagaccagcctggccaacatggtgaaaccccatctctactaaaaatacaaaaattagccaggtgtagtggtgcccacctgtaatcccagctactcaggaggctgagacaggagaatcgcttgaaccggggaggcggaagttgcagtgagctgagattgcaccattgcattccagcctgggtgacaggagtgaaactccatctcaaaaagaaaaaaagccttttgaaaactagaggtgggggatggaggtaggtgggacggggggatttggggatggaccttgcagagttagaacttgccagggaaagagggtggtgttaggactcgggagacagggttagggccccaggagcaggatctaagtcgtcctcccccaccatcctgacaccactgttgccccaggcctgggccgaggccactggtgcatatgttcccgggagggataagccagacctgccaacctggaagaggaatttccgctctgccctcaaccgcaaagaagggttgcgtttagcagaggaccggagcaaggaccctcacgacccacataaaatctacgagtttgtgaactcaggtctgccagcttggggttcgtgtgggaggctggggccccaagggttcctggcactcctactcccctcaccacttttctcaacaggagttggggacttttcccagccagacacctctccggacaccaatggtggaggcagtacttctgatacccaggtgagaatgtgcccaactttcatgcccctcagtctccgacctgtctccatgggccttgtcctctccctctagacgatccccccactcccctgcctccagcctgcccctcacctgagccagtgctgaccctgtctgtccctgccccggtctcctcaggagaaaattccaagtcttcacccagcattcaaggcccgagcacaccttcccgggatttcatggatttcgattcgcagggggctgtcagcctcttgggaactgaaaaactccctcaccttgatcctgctgaggcccaagctgggggagcatcccctctgaaattctacccagcctgctttgcccaggtcttacctgcatagagccagatccttgggttggaatggtagcacctggcgttcattagtgtttgtttggctgttgatgccatggctggctctgtccccaggctggaagccccttgaaggcagagctcaagcctgacctccctgcgttgctgagaacagacctggtccatatgaagtctccagaaaaggatatggaaatgcctgattctctttttttgtttccctccaggaagacattctggatgagttactgggtaacatggtgttggccccactcccagatccgggacccccaagcctggctgtagcccctgagccctgccctcagcccctgcggagccccagcttggacaatcccactcccttcccaaacctggggccctctgagaacccactgaagcggctgttggtgccgggggaaggtgagtgtcagctgcaggctgggagggctgaggtctgggcggcagcccctgattctcaacccctctccccttcatgccgctgctgccgctgctcagagtgggagttcgaggtgacagccttctaccggggccgccaagtcttccagcagaccatctcctgcccggagggcctgcggctggtggggtccgaagtgggagacaggacgctgcctggatggccagtcacactgccagaccctggcatgtccctgacagacaggggagtgatgagctacgtgaggcatgtgctgagctgcctgggtgggggactggctctctggcgggccgggcagtggctctgggcccagcggctggggcactgccacacatactgggcagtgagcgaggagctgctccccaacagcgggcatgggcctgatggcgaggtccccaaggacaaggaaggaggcgtgtttgacctggggcccttcattgtaggtgagtgagacaggggcttcgacctggccagtacaaagcagcctgcacagtggttaacaactcaggattggccgggcacggtggctcacgcctgtagtcccagcactttgggaggctgaggtgggcagatgacaagttcaggagttcgagaccagcctggtcaacatagtgaaaccccatctctactaaagatacaaaaaaatagtcgggcgtggtggcacgtgcctgtaatcccagctactcgggaggctgaggcaggagaattgcttgaacccaggaggcggagattgcagtgagctgagatcgcaccactgcactctagcctggtgacagagtaagactccatctcgaacaacaaaaaaaaaagaactcatgattaggactgaattcagacgctggctgcccttggcccgctgtataaccgaggcaaaggactttgccctgagcccgtggaatccaaggatggtctcctctctctacctgcctgccagcgctggggtgagacacaggcccagtacacagagcctgctcagggaattagctgccactgtcatcatcatcgtaactaatgatggtgaacagaccaatagcaggaaagctacatcccttagggtttcgctgtgcagtggcactttctgccatgatggaaatgacagtcacctgcactgtccggtgcagcagccactagccacaggggccaagcactcaggtgaggcgagtgcaaccaggacgtgattcgttttaattggttacaatttaaactgaaataaccttacatgactaatggctgcaattggacaatgcagcctcagacaggactgaatgccaaccagcttctccagattcactgagcatccttgggagcatgggccccctactctgggcctgttatgaatgctgaggcttgggggcttgggggtgtggccttccaacaaccccaccctgatgggagggagggagggagggaaggaggggactttccccaaacaagcagtcccctggtcgaggcagcagagggccttaggtcaggggaggtggtgggggttatcattcaagtttacggggaagggtgggtagagggtcctcttctcatccctgactaggctcctgggcccccagatctgattaccttcacggaaggaagcggacgctcaccacgctatgccctctggttctgtgtgggggagtcatggccccaggaccagccgtggaccaagaggctcgtgatggtcaaggtgcctgcagacctgagtccctggggctgaaaggggtggccttacagagggaagaggttgctcccaggaactccaactcccagagggccctctaaaaaactgcaacttccaagatctctgcaataaccagtttttcatccccgggagctccttcccatggcctcacctgcagaacctgttttgaactctctaaaccagtggcccccaaactatttggcaccagggaccagtctcatggaagataatatttccacggacagggaggtgtggtttcgggatgaaactgctccactgcagatcatcaggcattagattctcttaaggagcagccgatccctcacgtgcgcagttcgatagagtttgtgctcctctgagaatctaatgctgccgctgatctcacagaaggcagagctcaggcagtaatattcccccacccgctgctcacatcctgctgtgcaacctggtccctaacaagccgtaggggggttggggacccctgctctaaaccatgtagaagctggtggactcaagttttagctgccattgtgaggccatggctgtggctcccaggagtcaagatcacagactgctcagccctgacgtgtgtgtgtgtgtgtgtttgtgtgtgtgtgtaaaactacaactcccagcagccctaggcctatggttcagttacagcagggggtgtgtgtgtgtgtgtgtgtgtgtgtgtgtgtgtgtgtgtgtgtaaaactacaactcccagcagccctaggcctatggttcatcctaggttacagcaggggctgcagggagttgtagtcctccaagccctgactcctaccttggtggacagtggctgggtgttttccctgactcctgtccccacttcccctgcaggttgtgcccacgtgcctcagggccttggtagaaatggcccgggtagggggtgcctcctccctggagaatactgtggacctgcacatttccaacagccacccactctccctcacctccgaccagtacaaggcctacctgcaggacttggtggagggcatggatttccagggccctggggagagctgagccctcgctcctcatggtgtgcctccaacccccctgttccccaccacctcaaccaataaactggttcctgctatga

SEQ ID NO: 12697 - DNA, 1556 bp, Homo sapiens
aaagaatgataaagttggttttatttcaagaagtcgatcaaaaagaaagccccagcgctctagagctcagctgacgggaaagggggtgcgcagcctcgagtttgagagctacccggagctccaagacaggggtgggttccagctgcccgcacgccccgaccttccatcgtaggccggaccatgggaaccccaaagccacggatcctgccctggctggtgtcgcagctggacctggggcaactggagggcgtggcctgggtgaacaagagccgcacgcgcttccgcatcccttggaagcacggcctacggcaggatgcacagcaggaggatttcggaatcttccaggcctgggccgaggccactggtgcatatgttcccgggagggataagccagacctgccaacctggaagaggaatttccgctctgccctcaaccgcaaagaagggttgcgtttagcagaggaccggagcaaggaccctcacgacccacataaaatctacgagtttgtgaactcaggagttggggacttttcccagccagacacctctccggacaccaatggtggaggcagtacttctgatacccaggaagacattctggatgagttactgggtaacatggtgttggccccactcccagatccgggacccccaagcctggctgtagcccctgagccctgccctcagcccctgcggagccccagcttggacaatcccactcccttcccaaacctggggccctctgagaacccactgaagcggctgttggtgccgggggaagagtgggagttcgaggtgacagccttctaccggggccgccaagtcttccagcagaccatctcctgcccggagggcctgcggctggtggggtccgaagtgggagacaggacgctgcctggatggccagtcacactgccagaccctggcatgtccctgacagacaggggagtgatgagctacgtgaggcatgtgctgagctgcctgggtgggggactggctctctggcgggccgggcagtggctctgggcccagcggctggggcactgccacacatactgggcagtgagcgaggagctgctccccaacagcgggcatgggcctgatggcgaggtccccaaggacaaggaaggaggcgtgtttgacctggggcccttcattgtaggctcctgggcccccagatctgattaccttcacggaaggaagcggacgctcaccacgctatgccctctggttctgtgtgggggagtcatggccccaggaccagccgtggaccaagaggctcgtgatggtcaaggttgtgcccacgtgcctcagggccttggtagaaatggcccgggtagggggtgcctcctccctggagaatactgtggacctgcacatttccaacagccacccactctccctcacctccgaccagtacaaggcctacctgcaggacttggtggagggcatggatttccagggccctggggagagctgagccctcgctcctcatggtgtgcctccaacccccctgttccccaccacctcaaccaataaactggttcctgctatga

SEQ ID NO: 12698 - DNA, 3546 bp, Homo sapiens
ttttatttcaagaagtcgatcaaaaagaaagccccagcgctctagagctcagctgacgggaaagggggtgcgcagcctcgagtttgagagctacccggagctccaagacaggggtgggttccagctgcccgcacgccccgaccttccatcgtaggtaacgcggaagagcccgggagagcgttggtggcgtccgagagcgaggagcgggaaagaggatgggtctgcacggagagtggaaaggcaggctgtgtactctggggaaagtggagcaaggaaggagctacagtggccgacgctggaggtcggctgcagaaaaactagaaaaagtagggaggaaagaggaaaagaggaggcgtctacactgagggggttctagagagggaggggtggactccgtagatgggggtagttcagtctcgaaacctggggcgtgctctgtcctggaggagggaggcgggcagtcggaggggaattgaatggaagttctgtgttggaaatgttttgggagatcttctgtagggggactgtggaagggggtctacattggggtaagtgcaggaggtagaggcttacacgtgaatcgattctgcactgaaataactagggaaagaggatgctaccctgaaagtggggatacttactttcgatgatgtgggggagggaggaggtctatactggcggaattgagggagtggagggtctgcactgaagacgctggggaaggatgtgccatggatatgggaaggaaccctagctgattagagagcctctcgggaggatgggaggatgggaagaggaggtttcctgtttgtacccccgaaaatatgggtgaaggacctgtgccgtggcccgtgagaaggaggtctgggtgcggaaactccaggccaggtgggtccgggggaggccggtcgcgcccaggaaatgccctatacgcgcaggccggaccatgggaaccccaaagccacggatcctgccctggctggtgtcgcagctggacctggggcaactggagggcgtggcctgggtgaacaagagccgcacgcgcttccgcatcccttggaagcacggcctacggcaggatgcacagcaggaggatttcggaatcttccaggtgcgtgcgacgacctgggacgctggaaacccggagctgcgcgctgggcggaaaggactcctagtgggcccggctgagaaggcggaggtggcgcgcgaggggcgggctcgtgccaacgctggtgggtggggctagaacgggaggggcggggctagccggatccgctgactgatggtggggcgcaagcagggttggagctgcagggttacgggaataaaaccgggaaagccggttagtacgcaaaggaaatgcatcctgggggtttggggctttctagaggccggggctcttggttgtaggatagatactgggggatggttcttgaaacatcagaggtgaggcctggagccccaaatctgaggttcctaactaccgaattagtatatgccagaggtggtaaacagtgtgaggggcggggttatcacagagggtgtcgcggggcaggtggtgcacgggattagacaccaagttggacttggaagcctggcttagaaagaaaaggtttttgggccgggggcggtggttcacacctgtaatcctagcactttgcaaggccaaggcgggaggatcgcttgagcccaggagtttgaggccagcttgggcaacataggctccatctctttaaaaacaaaagcgaaacaaaacaaaaaccaaagaggtttcaaaggcttttgaagaggccgagcacagtagctcatgcctgtaatcccagcactttgggaggccgaggaggacggatcacctgaggtcaggagttcaagaccagcctggccaacatggtgaaaccccatctctactaaaaatacaaaaattagccaggtgtagtggtgcccacctgtaatcccagctactcaggaggctgagacaggagaatcgcttgaaccggggaggcggaagttgcagtgagctgagattgcaccattgcattccagcctgggtgacaggagtgaaactccatctcaaaaagaaaaaaagccttttgaaaactagaggtgggggatggaggtaggtgggacggggggatttggggatggaccttgcagagttagaacttgccagggaaagagggtggtgttaggactcgggagacagggttagggccccaggagcaggatctaagtcgtcctcccccaccatcctgacaccactgttgccccaggcctgggccgaggccactggtgcatatgttcccgggagggataagccagacctgccaacctggaagaggaatttccgctctgccctcaaccgcaaagaagggttgcgtttagcagaggaccggagcaaggaccctcacgacccacataaaatctacgagtttgtgaactcaggtctgccagcttggggttcgtgtgggaggctggggccccaagggttcctggcactcctactcccctcaccacttttctcaacaggagttggggacttttcccagccagacacctctccggacaccaatggtggaggcagtacttctgatacccaggtgagaatgtgcccaactttcatgcccctcagtctccgacctgtctccatgggccttgtcctctccctctagacgatccccccactcccctgcctccagcctgcccctcacctgagccagtgctgaccctgtctgtccctgccccggtctcctcaggagaaaattccaagtcttcacccagcattcaaggcccgagcacaccttcccgggatttcatggatttcgattcgcagggggctgtcagcctcttgggaactgaaaaactccctcaccttgatcctgctgaggcccaagctgggggagcatcccctctgaaattctacccagcctgctttgcccaggtcttacctgcatagagccagatccttgggttggaatggtagcacctggcgttcattagtgtttgtttggctgttgatgccatggctggctctgtccccaggctggaagccccttgaaggcagagctcaagcctgacctccctgcgttgctgagaacagacctggtccatatgaagtctccagaaaaggatatggaaatgcctgattctctttttttgtttccctccaggaagacattctggatgagttactgggtaacatggtgttggccccactcccagatccgggacccccaagcctggctgtagcccctgagccctgccctcagcccctgcggagccccagcttggacaatcccactcccttcccaaacctggggccctctgagaacccactgaagcggctgttggtgccgggggaaggtgagtgtcagctgcaggctgggagggctgaggtctgggcggcagcccctgattctcaacccctctccccttcatgccgctgctgccgctgctcagagtgggagttcgaggtgacagccttctaccggggccgccaagtcttccagcagaccatctcctgcccggagggcctgcggctggtggggt

SEQ ID NO: 12699 - DNA, 680 bp, Homo sapiens
ttttatttcaagaagtcgatcaaaaagaaagccccagcgctctagagctcagctgacgggaaagggggtgcgcagcctcgagtttgagagctacccggagctccaagacaggggtgggttccagctgcccgcacgccccgaccttccatcgtaggcctgggccgaggccactggtgcatatgttcccgggagggataagccagacctgccaacctggaagaggaatttccgctctgccctcaaccgcaaagaagggttgcgtttagcagaggaccggagcaaggaccctcacgacccacataaaatctacgagtttgtgaactcaggagttggggacttttcccagccagacacctctccggacaccaatggtggaggcagtacttctgatacccaggaagacattctggatgagttactgggtaacatggtgttggccccactcccagatccgggacccccaagcctggctgtagcccctgagccctgccctcagcccctgcggagccccagcttggacaatcccactcccttcccaaacctggggccctctgagaacccactgaagcggctgttggtgccgggggaagagtgggagttcgaggtgacagccttctaccggggccgccaagtcttccagcagaccatctcctgcccggagggcctgcggctggtggggt

SEQ ID NO: 12700 - DNA, 3406 bp, Homo sapiens
gcataggggcgggaacagcccagcgggccgtcccatcggcttttgggtctgttacccaaagaatgataaagttggttttatttcaagaagtcgatcaaaaagaaagccccagcgctctagagctcagctgacgggaaagggggtgcgcagcctcgagtttgagagctacccggagctccaagacaggggtgggttccagctgcccgcacgccccgaccttccatcgtaggtaacgcggaagagcccgggagagcgttggtggcgtccgagagcgaggagcgggaaagaggatgggtctgcacggagagtggaaaggcaggctgtgtactctggggaaagtggagcaaggaaggagctacagtggccgacgctggaggtcggctgcagaaaaactagaaaaagtagggaggaaagaggaaaagaggaggcgtctacactgagggggttctagagagggaggggtggactccgtagatgggggtagttcagtctcgaaacctggggcgtgctctgtcctggaggagggaggcgggcagtcggaggggaattgaatggaagttctgtgttggaaatgttttgggagatcttctgtagggggactgtggaagggggtctacattggggtaagtgcaggaggtagaggcttacacgtgaatcgattctgcactgaaataactagggaaagaggatgctaccctgaaagtggggatacttactttcgatgatgtgggggagggaggaggtctatactggcggaattgagggagtggagggtctgcactgaagacgctggggaaggatgtgccatggatatgggaaggaaccctagctgattagagagcctctcgggaggatgggaggatgggaagaggaggtttcctgtttgtacccccgaaaatatgggtgaaggacctgtgccgtggcccgtgagaaggaggtctgggtgcggaaactccaggccaggtgggtccgggggaggccggtcgcgcccaggaaatgccctatacgcgcaggccggaccatgggaaccccaaagccacggatcctgccctggctggtgtcgcagctggacctggggcaactggagggcgtggcctgggtgaacaagagccgcacgcgcttccgcatcccttggaagcacggcctacggcaggatgcacagcaggaggatttcggaatcttccaggtgcgtgcgacgacctgggacgctggaaacccggagctgcgcgctgggcggaaaggactcctagtgggcccggctgagaaggcggaggtggcgcgcgaggggcgggctcgtgccaacgctggtgggtggggctagaacgggaggggcggggctagccggatccgctgactgatggtggggcgcaagcagggttggagctgcagggttacgggaataaaaccgggaaagccggttagtacgcaaaggaaatgcatcctgggggtttggggctttctagaggccggggctcttggttgtaggatagatactgggggatggttcttgaaacatcagaggtgaggcctggagccccaaatctgaggttcctaactaccgaattagtatatgccagaggtggtaaacagtgtgaggggcggggttatcacagagggtgtcgcggggcaggtggtgcacgggattagacaccaagttggacttggaagcctggcttagaaagaaaaggtttttgggccgggggcggtggttcacacctgtaatcctagcactttgcaaggccaaggcgggaggatcgcttgagcccaggagtttgaggccagcttgggcaacataggctccatctctttaaaaacaaaagcgaaacaaaacaaaaaccaaagaggtttcaaaggcttttgaagaggccgagcacagtagctcatgcctgtaatcccagcactttgggaggccgaggaggacggatcacctgaggtcaggagttcaagaccagcctggccaacatggtgaaaccccatctctactaaaaatacaaaaattagccaggtgtagtggtgcccacctgtaatcccagctactcaggaggctgagacaggagaatcgcttgaaccggggaggcggaagttgcagtgagctgagattgcaccattgcattccagcctgggtgacaggagtgaaactccatctcaaaaagaaaaaaagccttttgaaaactagaggtgggggatggaggtaggtgggacggggggatttggggatggaccttgcagagttagaacttgccagggaaagagggtggtgttaggactcgggagacagggttagggccccaggagcaggatctaagtcgtcctcccccaccatcctgacaccactgttgccccaggcctgggccgaggccactggtgcatatgttcccgggagggataagccagacctgccaacctggaagaggaatttccgctctgccctcaaccgcaaagaagggttgcgtttagcagaggaccggagcaaggaccctcacgacccacataaaatctacgagtttgtgaactcaggtctgccagcttggggttcgtgtgggaggctggggccccaagggttcctggcactcctactcccctcaccacttttctcaacaggagttggggacttttcccagccagacacctctccggacaccaatggtggaggcagtacttctgatacccaggtgagaatgtgcccaactttcatgcccctcagtctccgacctgtctccatgggccttgtcctctccctctagacgatccccccactcccctgcctccagcctgcccctcacctgagccagtgctgaccctgtctgtccctgccccggtctcctcaggagaaaattccaagtcttcacccagcattcaaggcccgagcacaccttcccgggatttcatggatttcgattcgcagggggctgtcagcctcttgggaactgaaaaactccctcaccttgatcctgctgaggcccaagctgggggagcatcccctctgaaattctacccagcctgctttgcccaggtcttacctgcatagagccagatccttgggttggaatggtagcacctggcgttcattagtgtttgtttggctgttgatgccatggctggctctgtccccaggctggaagccccttgaaggcagagctcaagcctgacctccctgcgttgctgagaacagacctggtccatatgaagtctccagaaaaggatatggaaatgcctgattctctttttttgtttccctccaggaagacattctggatgagttactgggtaacatggtgttggccccactcccagatccgggacccccaagcctggctgtagcccctgagccctgccctcagcccctgcggagccccagcttggacaatcccactcccttcccaaacctggggccctctgagaaccc

SEQ ID NO: 12701 - DNA, 768 bp, Homo sapiens
gcataggggcgggaacagcccagcgggccgtcccatcggcttttgggtctgttacccaaagaatgataaagttggttttatttcaagaagtcgatcaaaaagaaagccccagcgctctagagctcagctgacgggaaagggggtgcgcagcctcgagtttgagagctacccggagctccaagacaggggccggaccatgggaaccccaaagccacggatcctgccctggctggtgtcgcagctggacctggggcaactggagggcgtggcctgggtgaacaagagccgcacgcgcttccgcatcccttggaagcacggcctacggcaggatgcacagcaggaggatttcggaatcttccaggcctgggccgaggccactggtgcatatgttcccgggagggataagccagacctgccaacctggaagaggaatttccgctctgccctcaaccgcaaagaagggttgcgtttagcagaggaccggagcaaggaccctcacgacccacataaaatctacgagtttgtgaactcaggagttggggacttttcccagccagacacctctccggacaccaatggtggaggcagtacttctgatacccaggaagacattctggatgagttactgggtaacatggtgttggccccactcccagatccgggacccccaagcctggctgtagcccctgagccctgccctcagcccctgcggagccccagcttggacaatcccactcccttcccaaacctggggccctctgagaaccc

SEQ ID NO: 12702 - DNA, 735 bp, Homo sapiens
gagtgggagttcgaggtgacagccttctaccggggccgccaagtcttccagcagaccatctcctgcccggagggcctgcggctggtggggtccgaagtgggagacaggacgctgcctggatggccagtcacactgccagaccctggcatgtccctgacagacaggggagtgatgagctacgtgaggcatgtgctgagctgcctgggtgggggactggctctctggcgggccgggcagtggctctgggcccagcggctggggcactgccacacatactgggcagtgagcgaggagctgctccccaacagcgggcatgggcctgatggcgaggtccccaaggacaaggaaggaggcgtgtttgacctggggcccttcattgtaggtgagtgagacaggggcttcgacctggccagtacaaagcagcctgcacagtggttaacaactcaggattggccgggcacggtggctcacgcctgtagtcccagcactttgggaggctgaggtgggcagatgacaagttcaggagttcgagaccagcctggtcaacatagtgaaaccccatctctactaaagatacaaaaaaatagtcgggcgtggtggcacgtgcctgtaatcccagctactcgggaggctgaggcaggagaattgcttgaacccaggaggcggagattgcagtgagctgagatcgcaccactgcactctagcctggtgacagagtaagactccatctcgaac

SEQ ID NO: 12703 - DNA, 413 bp, Homo sapiens
gagtgggagttcgaggtgacagccttctaccggggccgccaagtcttccagcagaccatctcctgcccggagggcctgcggctggtggggtccgaagtgggagacaggacgctgcctggatggccagtcacactgccagaccctggcatgtccctgacagacaggggagtgatgagctacgtgaggcatgtgctgagctgcctgggtgggggactggctctctggcgggccgggcagtggctctgggcccagcggctggggcactgccacacatactgggcagtgagcgaggagctgctccccaacagcgggcatgggcctgatggcgaggtccccaaggacaaggaaggaggcgtgtttgacctggggcccttcattgtagcctggtgacagagtaagactccatctcgaac

SEQ ID NO: 12704 - DNA, 4019 bp, Homo sapiens
attctaggcggcagtggcgggcgaagcgtgagcgctgcggtattttgtcccgaacggtgacccctcctcccaggcaggctgcggcggcgtcggtggcagcggagcacggagaagaggcccgggcggcccggcggcctggaggccgcgaaaggtggaggccgggccgcccttgtgcaccgcaggattgacccgggaaggggcagaagctagcgagccccgcccggccgccgggaaggtgggggaagccccgtgcaccccccgccctccggccgccgccgccccgctggccctgcagccgtcgccgctgcctcgggctacagccccgggctcggcggtcccggctggggaaggagggcggcgagcgcgtccggagccgccggagatggcgggagggcactgcggcagcttccccgcggcggcggccggcagcggcgagatcgtccaactgaacgtaggggggaccagatttagtacctcaagacaaactcttatgtggattccagattcttttttttccagtttgctgagtgggagaatttcaacacttcgagatgaaactggtgctatatttattgatagagatccagcagcatttgcacccattttaaattttcttcggacaaaagaactagacttaaggggagtgagtattaatgttctcaggcatgaagcagaattttacgggatcactccattagtaagaaggcttctcttatgtgaagaattggagcgttcctcttgtggcagtgtcctttttcatggttacttgcccccaccaggtattcctagtcgtaaaataaacaacacagtcagatctgctgattctaggaatggtctaaattctacagaaggtgaagcccggggaaatggtacacagcctgttctctctggaacgggagaagaaactgttaggctaggatttcctgtggatccacgaaaggtgctaatagtagctggccatcacaactggattgtagctgcatatgcccattttgctgtgtgttacagaatcaaagaatcttcaggatggcagcaagtgtttacgagcccatatttggattggactatcgaacgagtagctttaaatgcaaaggtggttggagggccacatggagacaaagacaaaatggttgctgttgcctcagagagtagcatcatcttgtggagtgttcaggatgggggaagtggaagtgaaattggagtgttcagcctgggtgttcctgtagatgctctcttctttattggtaaccagttggtggccacgagtcatacagggaaagtgggagtgtggaatgctgtcactcagcactggcaggttcaagatgttgttcctataactagttatgacactgctggatcattccttctgcttggatgtaacaatggatcaatatattacatagatatgcagaagttccccttgcgaatgaaagataatgatcttcttgtaactgaactgtatcatgatccttcaaatgatgctattactgctctgagtgtttacctcacacccaaaacaagtgtcagtggtaactggatcgagatcgcctatggtacgagctctggagcagtacgagtgattgtacaacacccagagacagttgggtcaggtcctcagctttttcagactttcacagttcaccgaagtcccgtaacaaaaatcatgctatcagagaagcatcttgtatcagtctgtgcagataataatcatgtccggacgtggacagtaacacgattcagaggaatgatctctactcagccaggttctactcctttagcgtcattcaagatactatccctggaggagacagaaagtcatggtagctattcctctggaaatgacataggaccttttggagagcgagacgatcaacaggtgtttatccagaaagttgttcccatcaccaacaaactatttgtaagactctcatcgactggaaaaagaatatgtgagatccaggctgttgactgtactacaatatcctcatttacagtgagggaatgtgagggatccagtaggatgggctcaagaccaaggcgctacttgttcacaggccatacaaatggcagtattcaaatgtgggatctgaccactgctatggatatggttaacaaaagtgaagataaggatgtaggtggtccaaccgaagaagagctactcaaattactcgatcaatgtgatttgagcacatctcgctgtgctactcctaacatcagtccagcaacttccgtagttcagcatagccacttacgagaatcaaattctagccttcagcttcagcaccatgataccacccatgaagcagctacttacggttccatgaggccttacagagaaagtcctttattagcaagggcaagaaggactgagagctttcacagttatagggacttccagactattaatttgaacagaaatgtagaaagagctgtccctgaaaatggtaacttgggtccaatacaagctgaagtgaaaggggcaacaggggaatgtaatatatctgagagaaagtctcctggagtagaaataaaaagtttgagagaattggatagtggattggaagtgcataaaatagctgaaggtttttcagaatccaagaaaaggtcatcagaagatgaaaatgaaaataaaatagagtttaggaagaaaggaggatttgaagggggaggattccttggaagaaagaaagttccctatctggcgtcatcaccaagtacttccgatggaggaactgactcacctggtactgcgtccccatctcctacaaagactactccatctcctcggcataaaaaaagtgattcttcaggtcaggagtacagcttgtgaaaactcaccaaaatgaatagttgtttcgttacatttagatgaaagttaaactttactgaatttcagtacattagtttttacactaaaactttacaagataaaattggacttcatttagtatctttttaacagaattacttggaataatgagatacaataatcatatctcttttgacattttggaaatttttttaattttacaagtacatttaacagatcatttataaagcaggagtccattttaacacttaccgactttttttggtttggaaacatattaccacgtcttaataggatggtgcccatataggtgagcatccctttagatcatgggaaccagcagactgcattcctaatcttcattatgcctgagacttgtcttacaatgttacctttaagtgaatcacataattgtctttggaacttggtctcccaacacttattgtgattgcaaagtgtttaccagatatttgatgaggtgctatgtttgtgaaaaacatatcatgtaattcaaaaacactattgatattgaataccagataccactatgtagtaagtcttttaggatgattttaatttagtcgtgcgtcattttctgattctcatcattgggagatcttaaatcttagcaagcattagcaatattaaatgccaaaattccattgaaactttcaagttggagcaattgtctgtgtttgaaaagatgaaataaaaataataatcaagggcaaagctttgagtgcccagaagggaaagctgtaccagttgctaacctgtcttgtttcaggagccaccatgtttttttttcagtgttaacaacaatcatgataattaaattaaaacactagtttgttcacttgtaggactgcagttctgaattttgggttaaaggttttggctgctgtaagaatgtgaatttgaatgtattttgaattgtaagagcaaaagaacgtttttgtacaattttttttcatttaattggaatgatcttcaggtttctacaaatagggtaattgtaaatttaaagcattagcatttattggtgaataatgtatatatccccattccaagaaatataagtgagtgaagttgaaataaaatctttaaaatttactatattgccagtggtttcacaacagttctcttgtatttatttatcaattaaatcaaataaaaatgattatgtcaa

SEQ ID NO: 12705 - DNA, 7394 bp, Homo sapiens
atttagtacctcaagacaaactcttatgtggattccagattcttttttttccaggtatgtcttataattctttagtgtatattttaatacatttatttaccaaaatataataatgtttgtcagttaaattttttttaataaaaaaggttaactcttaaaattatatatttttgaacttggaagatagataacttacttttagtggtctttaacatttggtaaagaattagcacatttgtttatactcagattttaaaaactaactttagattattaatgacttccagtttgctgagtgggagaatttcaacacttcgagatgaaactggtgctgtgagtataataataattgatacatattcctaaattaatgcttatagtgcttggtcctaacatatagttactctaagaatataggagaactgatattttaataatcactgaatgaaagtggcataattttatttcttgtcatatgtagttttttataatcagagaagatccctaagtagggaatactatatatggcaatttaagtattcatgattagagagattgtaggatatgagcttacattggcattagaagaaatttttttagatcaataattgaaactttaacagtaagtggataaatgtaaatattctaatatttttatattagaatataagaggttaaattagtaaactcctacagttttttattttattttggagaataaccttgcgaatttgtttatacagcattggtacagtgagggaaggaaagaattgtaaagtttcagtgcaaaaaaattggtttatccatttggaggcaacaaagtgaccaatggtatttatttgctgtggtgagatttgcagatgaaataaggcaacaaatgcagatatgtccatgtgaaattataaaaagttatcaataataagatctccacaaatctgtgatgtctcttcgatttttgatgtgctctaatgaaaacaaaagaaaatttataaagcttagaagaatctcattgattgtatatatatagttgatcatagtaggaagagttttattactggctgccatttccctttctaattgatttacataagctttaaaagatgttccgtttttatggccagatcttttgtaaatgattcaaaataggtgttggtataaatttccataaaaagttatcaattatgggctgggtggggtggcttatgcctgtaattccagcactttaggaggtcgaggcaagtggattacctgaggtcagaagttcaagaccagcatggccaacatggtgaaaccccctctctactaaaaacagaaaaattaacccggcatagtggcaggtgcctctaatcccagctactcaggaggctgaggcaggagaattgcttgaacttaggaggtggaggttgcagtgagcccagatcgtgccactgcactccagcctagatgagagagcaggatgctgtctcaaaacaaacaaacaaacaaaagttaccaattatgtattttacatttttaagcaatttgttttcctcttatgtattctgtggtgctttagtttaaaaaaaaaaaattgtcattacctttccccagctctgaaggaaattgagattagtaaaagtattatgagaatagtattcttttccacttttgacagcagtgtgcagtatttacttttctcaagtacccctgtgtgcattattaaagtacattgtagttttaatgattgaacagtataagaaagtattatttattcatgttttcgaagtattaattgaattctagactgtttcagataaaaatgtttcctcaggtgtcacttttaccaaaggtatcaatacaagtgattttattagacaagattttttctatgtattaaaatatcagtttaataataactattcagaggaagaaaaagacaccatctcaagaaaaagacaccatctcatgaaatgcacacagactacattccaattttagaaacattaaagtttaagagtggaaacaaggaaatgtagtatttaagtaattaagacttcattccctattagtgttacagatattaaagttaaaagattaatttgtaatttgaaaataaaactgttctcttttttacagatatttattgatagagatccagcagcatttgcacccattttaaattttcttcggacaaaagaactagacttaaggtaagaaatgcactctttttaaagtaaattcttactgataaatatgtgtttttaatatgttttatgaaataaaaggttttttttgtttgtttttttttttccttgagttgcagtcttgctctgttgcccaggctggagtgcaggagtgcagtggcatgatctctgctcactgcaacctccgcctttcaggttcaaacaattctcctgcctcagcctcccgagtagctgggactgtaggcacatgccaccatgcccggctgattttttgtattttagtagagaaggggtttcactgtgttgcccaggctgattgcaaacgcctgagctcaggcagtctccccgccttagcctcccaaagtgcagggattacaggaatgagccactacgcccagccagaaaaggtttttttttttttactaagactttgattaaaagtttcctcacactgaaactggatgtggtggtacacgcctataatcccagctactctagagaagaagctgaggcaggaggatcccttgaggccgggagtttgaggctgcagtgagttatgatcatgcctctggccagtactgctgtactgttaacacaaatagtttcgaaatagaataagaaagtttgaagctttttttttttgagactgagtcttactctgtcacccagactcactgcaatctccacctcccgggttcacgccattctcctgccttagcctcccaagtagctgggactacaggcacccgccaccacacccggctaatttttttgtatttttagtagagatggggtttcaccgttttagtcatgatggtctccatctcctcacctcgtaatccacccgccttggcctcccaaagtgctgggattacaggtgtgagccaccgcccccagacacaaagttttaagcatttttaatgttaaactagtcataaccagtttcacaaataaaaacaatttaacatagtaattgtatatatttatcaaggctggggaatatttttaaaataaggacaaattacaactgaaacctaagatgaattattagtattataagttctgaatcttccattttttaaaaattttatttcatgttacttaactttactactatgaagtagcatcatttcatctggataacatagcccttcccaaggctagtcttttttttttttctattttatttgttcaacaaatatttattacataactattttatacaagcactatgctaggcactgtgaggtatacaaacatagatcagaaatagatcatgctcgcagggaatttatagtgtaattggggagattaagatagatatgtatagaaataattgcgataaaaagttaaaagcaactaatgccataaaagaatggtttccattctatcgtttgccttctagacaatttatttgtactagcctgatagagccctaatctctcctttagtgacccaattcatatatatgtatatatatgaatggtttttaagtagataacagaatatttttgttcacatgcagtttttatttacactttttaatgattaaggataatagaaataaagagtattaggaggaaaataatttttaaagccttatgactatatacatgaagaacctagaattttttcctttcatgtcagatgataatacaggtttccagtgttagagaatttacatcatttgtttctttgtaggggagtgagtattaatgttctcaggcatgaagcagaattttacgggatcactccattaggtatgtgctcttttaatatttggtgtttatgatttgactcatgtatgaaagttgccctaaatgaaatgtgtttatatcaggtcctaatttttgatggacttgttcagtgcttagtttttgtggattttcatagtaaaaagatgttgtcaactctgacttaattaaaattttccttttctttccttatcctcttgaactagagaaaataaaaatggagtactgtttttctgtttgcatgtactcttgacaagtttgctttgaaatgtttttagtaagaaggcttctcttatgtgaagaattggagcgttcctcttgtggcagtgtcctttttcatggttacttgcccccaccaggtattttcactttattaaatcttttaaaaaattccttgtatcattaagcaagtacaagcatatgaataggaaaaactgctccttgattattgagttttttgtctataaatctattagaaatggtaagaacttttgatttttatagaaattaagtcacattatatattggagcaggggtttggcaaactttttctgtaaagagccagatagattttgtgagccagaggatctctgtgacagccacttaactccgctgtgtatactacatgaagactaggtttaactgtaaccactacaactttatttacataaatagcattgattgggctggattttccatggcccatagtttgctgacccatatgttagagcactggttgtcaaactgcttttttgcaaaatttaaggaattctgcagagataagtcagtgtcacctcagccccactttagttagaagagcctgattttacctgtgttataatggacttctgagcaagatttcattttaaaaaatgttcccctgtcaaataaaaaatgtttgaaagtatggggaatttcagttctaaagcagttaaattattacatagtacctaacacataatacctgtaccataattgtaaagagtggctggcagactgaattaattacccattaattcagtaacctaaagcttatttattgtaaacagtatgacaataccagaaatctgttgacagaattttgtctttgtctttgtttttttcattttcattttattttttaattgtaattaaattatttgtaataatttgctatattggaagatgtatttcggctttaatgaaattcacatttttgtttctttgtcacaatgtgatatttttaatttttgaaaggtgaacttaggaatgtatttgttttcttcttctctttataggtattcctagtcgtaaaataaacaacacagtcagatctgctgattctaggaatggtctaaattctacagaaggtgaagcccggggaaatggtacacagcctgttctctctggaacgggagaagaaactgttaggctaggtaagcaaagattacagaaatagaaaaagaaaaatacgtatgtttttagtgctgggtgatattgagtaattacttttaaagatttttgcctcatctccttttttatccagatttatcatttatatcttggaaaggtctcatttaacacttaatttttatttaaaatgttgtgtaatcttctatcttctctgaatctttagaacagggttgccaaaatttatctggtaagagccagagattaaatattttaggctttgtgggccacgtgttctctgtcagacctactcaactttgccattgtagcatgaacacataatggacaatatgtaacaagtaagcatggctgggttctaacaaaactatttttttttttttttttgagacggagtctcgctctgtcgctcaggctggagtgcagtggtgccatcttggctcactgcaagctctgcctcctgggtttacgccattctcctgcctcagcctccggagtagctgggactacaggcggccgccaccatgccagactaattttttgtatttttaatagagatgaggtttcaccgtgttagccagtatggtctcgatcccctgacctcatgatccgcccgcctcggcctcccaaagtgctgggattacaggtgtgagccactgtgcccggctcttaacaaaactattaaccaaaacaggcagaaggctgaaactggcctggtggctgtaatttgccaacccccggtttagaatgtaaaatatttctttttccaaaatcaacaggatttcctgtggatccacgaaaggtgctaatagtagctggccatcacaactggattgtagctgcatatgcccattttgctgtgtgttacaggtagtgtataattaataatgctttgcttttacaggtggcagtttgaaaattaattgtgattttatatttttagattgaaaagctatttttttttagtcatcaagttttttccctgcatattttacccatgtctgtatcatctgattaagatttagtgtacttttattttcacagctaatttggtaaatgtttctgatagcctttatctgttgtaaacatttagcagacaagtgtgaattgtcatgtaactgagatatcctgatgtattatttattgcttatacctagcttctgagactgtagtatataatgatgttagacaggattattaatgtgagctccctgatggtctatctctaatgattcagtgttttgtattctatagcaagggagagtacattggtcataaataccacattttgggaagtgaggtagtaaagcaggacagttattgcacaagtggtatagtttaatatctaatatgtgaaacttacaaagaagtagtttggttttactaatgcttacattctcagagcctgagaagcaatgaagaatagtgtagaccggtgatttttttttttttaattgggaaagtgataggactcttagttcaaaatcactgtactcattgagaaatgttgatgacagagaatggtgtagaagcacaaaagtggttggaatatactagcttagattattatttcatttaattgcagaaaaatcaaagatacataaactatttgtttatcactgttgagttcggttaagaaaaatagtcacaataagctgaaaaatatctaaaatgtcttctaaagtttacagatatagtttaaagaatcccagatgtattttttttttaaaaatctgaatttatgaaaggtttggcatgtctggtaagtgctgtttatatcagtaatctcaggtttatattttccttgtagtaatgattaagtgcagacttttatgttttaagagtgttttggctgggcacggtgggtcacgcctgtaatcccagcactttgggaggccgagatgggtggagttcaagatcagcccgaccaacatggtgaaaccccatctctactgaagatacaaaaattagccaggtgtggtgatgcatgcctgtaatcccagctactcgggaggctgaggcaggagaatcacttgaacccaggaggtgg

SEQ ID NO: 12706 - DNA, 751 bp, Homo sapiens
atttagtacctcaagacaaactcttatgtggattccagattcttttttttccagtttgctgagtgggagaatttcaacacttcgagatgaaactggtgctatatttattgatagagatccagcagcatttgcacccattttaaattttcttcggacaaaagaactagacttaaggggagtgagtattaatgttctcaggcatgaagcagaattttacgggatcactccattagtaagaaggcttctcttatgtgaagaattggagcgttcctcttgtggcagtgtcctttttcatggttacttgcccccaccaggtattcctagtcgtaaaataaacaacacagtcagatctgctgattctaggaatggtctaaattctacagaaggtgaagcccggggaaatggtacacagcctgttctctctggaacgggagaagaaactgttaggctaggatttcctgtggatccacgaaaggtgctaatagtagctggccatcacaactggattgtagctgcatatgcccattttgctgtgtgttacagagtgttttggctgggcacggtgggtcacgcctgtaatcccagcactttgggaggccgagatgggtggagttcaagatcagcccgaccaacatggtgaaaccccatctctactgaagatacaaaaattagccaggtgtggtgatgcatgcctgtaatcccagctactcgggaggctgaggcaggagaatcacttgaacccaggaggtgg

SEQ ID NO: 12707 - DNA, 16782 bp, Homo sapiens
tgctctgagtgtttacctcacacccaaaacaagttagtacatggccaattatatacattcttgactttttatctttttattcattagtttattatgtgactaggtcaaattaaactggtttatttctttttgagaactgcagtgcctaaggatttcatctctactaagtctaaaatttgtattcagttttatactgaagtcaaacatgaccagtaaacaaacataatttgaggtggaaaattggaactccccttacgctgaattgcatttgttgagccatattattataatgttagctgaaatttcaaaaaaaaaaaaaattctgcacatttgtcttcctattaaaataactaatttttcacttaaaaattaggagctttttaaaaaataaaaagttcttagactactgctggaaactaagcttattttcttgggaatttaaaaatttaagctgtagaaaaaaggcattttataactttcagtgcattttagaggccattgcaataaaagtaacagactagttctgtaaagtagtaagaatttttgtattctggagtaaaagataagcacaaatgggaaatttaaaatttatctgtaatgaaaggagttctaagaaacaatttgtattcagtaatactaataggtttggatgtgctacttatataagtcatcatttcatttaagttattaaaagaaaccataatttttagtatgaaagaaatattcaagagtatacctatgaatttgactgaaaccatagtaggacttaaattgtattgctctagaaatagggtttagtaaaccacggatttctagccaagctggctctttttgataccactgtctttggatgtttttatgccacaatgacagaattgagaggttgtgacagagacagtgtggcatgcagagtttaaaatgtttactacttggccccttacggaaagtgtaccaacccctgctctagaatgagctgtggattttttttttaaatctagttaaaaggcaggcataaaactgggaaagttttacaaatcaaagcacttcttttgtagtggcagggggattttaaggcatgaaaaatggagtcatctttctggttctaggaggtgtttttcatgacatgctttttttcctttgattcaagtattttcagatgaatcagttagtaaaactagaacagccagtaaagctaagatgttctctatccatgaagcttttaagagtataggtcactgaattttttcctatctaaatttgcaatggggtctgggcactttttgaaaaaaagaaaacaaaagacacagctgaaccttagatgattagaagaaacaacatattttaagtatgatgtaagcaatgtaatgggtatgtttattccctagcacagtgttttgaaacttaaatagtatatttaatgcttgattatttgagaatgatttagtattgtagtttaagtaaagcagatggtaattctaggctagacataataaggaatattgcttttggaatactatgctgtttcagtagtgttcttggcatggcagatttatgaattctttaaactatgttgagtacctgcggtgtctcaggcactctgtgaggtgacagataaaaagatgattatgattcagtctttgtcaataaggaatagaagtagctagacatagaaataagtacagaattagtgtgttataattactgtgatagaacctaatagtgcaaggcaggaggtgaatagttacgtcttggagtgagggttaggaaaagatttatcaaggaaataatgattttaagatgaccggagaagtcttaagatttttttttttactgaactggatttggggctgatataaacagtgaatccagctctgcctattttatcatagggaagctttgcgagggtagcttttttattatcgttccataatgtatcacctgtcaactcttgactttatataggtgtcagtggtaactggatcgagatcgcctatggtacgagctctggagcagtacgagtgattgtacaacacccagagacagttgggtcaggtcctcagctttttcagactttcacagttcaccgaagtcccgtaacaaaaatcatgctatcagagaagcatcttgtatcaggtaaaatgatttcattatactggtaaggaacttggctctgtgtgttattttcattaaaagaatgaaaacgcagtgtttatgtgagaaaaatatactaaaagaagtactagaaaagtttaatgactgaagaaattatgattgtcttttaaagatttctttgagctggtcgtggtggctcatgcctataaatcctagcagtttaggaggccaaggcaggtggattggtttagcccaggagttgaagactagcctgggcaacatggtgaaaccccacctctaccaaaaaagaggaaaacaaaaaaaagatgttttttattttacctggttttaatatacttaaatttaggagatgtgatttttttttttttttttgctctcttggcatatcttattgcaaaatatttattatgaccctgctaagaggaatttttattaaatttttcaagttttacttttaatataaattgggttgattatattatggtttaatgctaaaactgtagatttaaatgtgtattttgatattttgtcatctcaaaaataataaaaattacaattgtagagattatttgaagaaaataagcttttcttgggtttgtagttcttcataatataaaatttttaattaaatattaattggatacataaaaaattaaatactaattttcaagtttaacgaatagtactttctgattacaaagtaaaattctattgaagaaattcattgtgtatggaagatgatttctaaaaggctttgtgaaaattgcattgtgagttgggtgtgtcagtaaagcttgctttctagaggagtcttacattaactccttttgtagagcagttcttgcccaacttaaaatttttacaaacatggttttcatgtgtcagatttgtttttgtgaaggctggctagaagataatgcatcttttgtgaaagatgtagtgaaagtttctcaatctaattaaacaccatgtggagctgaaattcagtccatagctgaatgattatgcttttattgaatgtgtaattgtttgtggtataagtatgccttgctaaaacagtctctgttaggttttcataaaacattactcccctgccccactgaggagtttctaactcttgctggttcctcatcttttgcccagttgctgagtgttggattgcccttgagctctttcctggactctgtattctttatctgcactttcctagttatttgaatagtaattatatgtcagtggttcccaaactttcctccacctgtgaccatccaaagagttccaaaccctgtatatccagtgtctggatctctggttgtatgtttaataggcatctcaaatttaagttggacaaaataaaacttaatgatttctccctcaaaagccatcttagtatacagtatcaccatctacttatctactcaagctgaaaatctaggaatcacccttgatttctccctttctttcacctcccacatagtacaattcatcagtaagtcctgttggttttgctgccacattatgtcacaaatccagtcacttttcattgctgtcagtctagtgtctcacgtcatcatcctttctcccctagatgactgtagtaacttctcaacttttccctctctatggtacatgttccacacagcagccagaagcatcttttagaaacacaaacgaagtttgattcctgatggcttctaattgtatttagaataaatttaaatttctaccatagcctgtatggcttttcttgttctagattctacctacctttaaaatttcttcccaatcccatgtcacttttctcattgctgataacactctaacctgttggcttttctatttcttaaaaatgccttcgaacttttgtgtttgttctttttatttgaaatggtttgcccataggtatttgtttgactgcattcttgtcattctggtgccgtttcaaagcccttctcaatgagtgccccttggccacctgctttaaattaaattagccaaacctctgtccaacaataactttctctaacggtaccttgctttgtgttcttcatagctttatcacttattcatttatttgcttgtttattatctctatctcttctagaaaattctccaatagcagaaactttgttgtgttctcagcacttagcataattctgacacgtaaaagatgctgaataaatgttatgaaataaggcaattcagttctctgagaaaatgggccgttttgaagggttattgtgatgtttagatgataatgtatagagatactctgtaataattgctattattttggtggttataatgttattgtgggatgtgataccaaggaactactttgtaaaacttgcattttaacatcagatatttcatgtaggtttgaaacttttgtaagtttgtcaagagaaatatcctttttaacaaaaaatctggagtattttgtgtatactcagttatgttattctgccacctggtggatattaacacatatgtaatgacattgttttccctatagtgcattttaatcccttaaagaaaaactttggataatgactaatattagcaaaattgacgtaattgtccaattgaatcaactaaaaatatttaaattatttttctgaatcctagtaagcttagtagtgaaatcaggaaatgatttcccgtgaaactaaatagcctagaacaaaatgtccccttttcaccagaaaactgacagtctaataattgagaattttgttatataagaatagaaagtacacagatgttacttattgctgtttgccaaaattaaatttctttctaaagttttgtttaaaatatgtgtaactgtagaatatgtaacacatttttacccagtagtaaatattatgtatgtgtgtatataagaaattttagatactttcctaatatttactgatgagttcatagttcattgctaataataacatattttctaaaatcataaatggcaaaatcagtatattttttattaaagcatgccaaaaaaagtagtttttgcattagtgatacactttatggtgtatattttcaaatagagtatctactcagacaaaaaaaagtacagctagacgaggagacatttcagtatatgctcagttaatattctattcacaaaataaataaaactaattggagtatgttttttaaatacagactttatataaaaataatgctcagctttagtacagaatcttaattttccttaatgtaactatgagttggcaataaatagctgattgctcaagatgtttgacaaatgtcatttgtgccaataatttttcggtaagttctgatctaggttaatagttgagtagcataagcagaaacagtttctatagttaggaaaaataaactaggaaactgtttactatgtagtttggccacagaacaggataatattcagcatcttttttcttacacacacattatttttaacctttactacatttataacctacaagctatttttatgaggatctgtaggtttacttaatgtaccttatattttgcagcaaggtaaaacatccagttttctcacttttgttaagtagtcacaaatcaagtatagttttaagataaatatgtcatttgccacttatactctgatctgtgtaatatagatgatagtgaaaaaagttaaaatgagtttttaaaagtaattttgtattcttttgtgttctctttctctgctagtctgtgcagataataatcatgtccggacgtggacagtaacacgattcagaggaatgatctctactcagccaggttctactcctttagcgtcattcaagatactatccctggaggagacagaaagtcatggtagctattcctctggaaatgacataggtgggttaggttattttagggcatttttaggtactatattaactgttcagaagaagcatatcaactaataaaaccacaaaaatgagttttaaatacaaattttccattttaattttgaaattctaaacagaattttagtgtgtttttctgattaaattctataaattcacaaaattattttattgcagcgtttttccttaaaatgttagagcaaatttttcctcttattaatgtttcatcatttaaagaatgtcatcttcacatgttaactacttttatttattattaaaactatgataactgtgtacatttgacatttgaaattttttttgttaatctactgaaaataaaatttgaagctagaaaaacgttggtccctataaatgagagtcattttgatgacatcgtaatattcattaggaaacaatgtagtatgtctcctttgatattctctgatttcagcaaaaggtgtataagtttagtttaggttttctctctatacaccatacatacgtgtgcacatgggcactcacacatccacacatgtgtgcatacacatatacagtcttcatagagatagatcattccacccccggccccatttgaaagaatctcactgtccttataagctacttaagagaattctactaccacagccttactatttttagaaagagaaatatgcagtgttaccagttttaacagttgttatataatcccagttctctgcatgattctaggcactggaagtttatattgttatttattcaacaaatatttatcgagtacttgtgttctagatattagaaattttaaaaagtgcggtgaacatcaacttacaatgtagtgagcagtgggaattaaaataaaacagttgcattttgcaactttgcttaaaggcataggtcaaaaagaacccggaggagatagtgccaggatctatgttagaggttgtaatatatgctctcgtttaatcttgacaatttaggaggtagataccccacttaatgttgacagaagctgacattcagacagagaacacacagaggttttaatgtttgaactgatacatgaaggatagacatttgttgggtgtggaaggttctaaggttggaacattcctggcagagaaaacagcaagttaaaagggtagaggccaagggaacttgacaagtttagaaaatgtcaagaaggtcattaattgttggattataggatatgtgggtaagaatagtaagacatactgagtgaataggccagtgccggatcgtggaaggcatctatacatcaaactaagaaatttagattttatcttgtaagtaatggagaccttttgaagaattttgagaatgatactagatttgtgatatatataattcatctttcaagagcatgcaagaagacttgacagtgaagacatgagagagtgaagcaaggaaaccagaaaggaggaatttattaaccaaagtgcatggtggtcattgactagatgtggcaggcatgagagaggaaggagtctaaagtgaccctaaggattcttgagaaatggagtagctgagtattatttactaaataaagaaatataggaagaagaacttattttgaaaacaaagatgaattcagacttgtatattttgagtgatgatgcatatggatactattctgtggtatgaagatatacctggttctgtggtatgaagatatacctggtttctggagaaagaacttaactagaagttatgtttatgagtattcagcatataagaagcacctgaaagccccaggagtagatgtattgttcagggagagcatgtgtattgtgaataaaaagatatttataaacagccctgtaaattaattataaaacccagtaagataaaggggacagggaggcttttcattcctctttatagtggtatttaaaatatatatatcttcatagacaaatggacatacagattagtggaacagagtagagtccagattcagtagagtggtaaaggtgaaatctacattgtaatgggtaatggggtaatagatattggaggtgaccatgaaataaagaagtaatggagctagttggaaggcagggaagttcaaaggtcatatttttacacatgatcttagccaaaaggccaagaagcgatcaaaggtcatttttttttattcctccaactttctccctcattaaagttaagaaagacctaggaatattttgtattccaaggaaaggagccagtttgggaagggaaactataaatgggaggtgggggaagcgagggcaaagaaggtatgaagaataggttatgggtcagtctcatgtcaacatgaagttcaaagggagagaagatacagttctatagtcttctcattcctagttattttattctgagttattcattgtcaatattttgactttgtttatgagttattgaatgaggattgtcatttcattttaataaaattagagatcagaaggttccagtaattgagcaactgcataatatactgaagagccagacaggtttgtttgaattccacttccatcatataggacctatgagaactttggttaactaatctcttggtgccttatttttttcatctgtaaaatggagatggtaaataatagtacctcccttatgtggttattatggtgattaaaatgagtatatatttggaaagcatttacggtggcacatagtaagtacagtgtaagtattagctaataataaagatgacattggttcatttaataagtacatgtatgattcatgtaacataacgggatatattgtctttaaaatttttattgtaaatctttttacaatactttttatgaattgtaagttgatattattttagctactaagtgtaatgggaaaagagaattattaaaattttatgtttaagttttaaacaaaaactttttttctttacattgttgttcaggatctttctaaaatataatgggctatttatctgtcttgccaaatacaataaagtgaaaataattgaatctttccttttagattgaaaagcttcagggtgcaactcagtagtacattttatactgtactttaatcttcatactgtgtttttctcttggtttaccaattaccttatataaaattgtgtgtgtgtttttttaatttgcatctttaaaaagaagaaatgtggttaacagaagcttcaactaattacattccatctgatgaagtttcactttatattttaagattttgtgtgttgtcttctaaaaagtaaaatcactacatgaaatgacttaatgtatacgtctcttttaagttataagaatctaagcacatccccaaagatagtaaatatcttaacaggtctcctgctagtactgttaatgtggcaccttaggaaattttttcttttagcttttacagccttagttatatataaaatataatttagaaataattgtgtatttctttaaaaatgttctaatgcaaattgaagtacttgtatacatttattgcatgtctgatgttgagctgaaatgtgataccatattggtacgtataagaaattcttttcttatattaatattaatgttccttttgtaaaatgagaaaaaataaaattttaattaattttttgacatttttgttttctgatcaaggaccttttggagagcgagacgatcaacaggtgtttatccagaaagttgttcccatcaccaacaaactatttgtaagactctcatcgactggaaaaaggtaacactttattgtaaaaatatttgtattcagaagccaccttttgtcttacaaaacatatggcataatttgacatattgaccaaagagtgctactagaaacaaattgttgggacagaagtctgttatctcataatcataactcaaaattaagacagtagactttatgcttactttctgggatttaagagtttcactgatgctgtggacagttaggagggactagtgatagaataagaacacagtgaactttttttcatggccaaacataaatacttattaattttgttattataaacagtttctatctttaaaaaacctggaacttaaatattttccatcccatataaatctgtatacattattgatgtttctcaaataaaacattacagatttcctgattcagtatccccttttaaaataaaaatgatattaataacactaatttgcataatcttggcacagcttacaacatagcacacattttttttttctattttagacctatttccatctactttaacatggagagaaattgtctgtctccgtgagagtaggattcctgtctttatgcagtctcctcagtatttgtttgtgaatgctgcacttatgcttccattatatggcactggcagtattcctctgcttttgtcttcagaaatgatttctattcaaacttaaagaacatagtgaatttgctggcagacggctgaactaattctggcacttcctgttactagctatgtaaatacaactcaagttattttatttcccttatcccagtttctttataaaataaggttcaacgactttggcaggatttcataggataaaataaatttcaaaaatgaaatatctctcatagtacctaaccataatagatgtacagtagaagttaatttcctcttccttttctattgactgaaattttacttcttttaaaattattatttataacctcagattttgcttcaacattcctctgcattaaacaaatttttttgacgatgagaacacatggacacatggaagggaacaacacacaacaaggagcctgttgggggtgagcggggccggggagagagagagcatcaggaagaatagctaatggatgctgggtttaatacctaggtgatgggttgatctatgcagcaaaccactatggcacatgtgtaacagacctgcacatcccgcacatgtaccccagaacttaaaagttacagggaaaaagttttttgcatgtcaaacaaatgaaaaaagtaactttcctgttaatagtccattaggaaggttattgttttcattttatttatttatgaatgagacggagtcttgctcttttgccaggctagagtgctgtggtgtgatctcagctcactgcaacctccagacatgtgtctgttcgtgtcgtttgcccactttctaatggagtcatgttttacttgttgatttgagttccttatagatgctggatattagacctttgtcagatgcttagtttgcagatattttctcctatcctgtaggttgtctgtttactctgttgatagtttcttttgtggtgcaagtgctctttactttaataaggtcccacttgtcaatttttgtttttgttgcagttgcttttggagtctttgtcatgagatctttgccagggctgatgtccaggttgatatttcctaggtttccttctagggtttttacagttttaggttttacatttaagtctttactgcatcttctgttgatttttgtatgtagtaagaggaaggggttgagtttgaatcttctgcaaatggctagccagtaatcccagcaccatttattgaatagggagtcttttccccattgtttattatcagctttgttgaagatcaggtggttttaagtatatggctttgttttctgggttctgcatcctgttgctttggtctatgtgtttgtttttgtaccggtaccatgctgttttggttattgtagccttgtagaatagtttaaagttgggtagtgtgacgtctctggctttgttcatttgcttaggattgctttgtctattttatttgggctcttttttggtttcataggaactttagaatagttttttttttttttttttttttttttttttaagagacagagtctcactctgtcacccaggctggagtgcagtggtgtaatatcagcttactgcaagctctgcctcccgggttcacactattctcctgcgtcagttcctgagtagctgggattacaaatgcatgccaccacgcctggctaattttttgcatctttagtagagacggggtttcactgtgttagccaggatggtctcgatctcctgacctcatgatccgctcacctccgcctcccaaagtgctgggattacaggcgtgagccactgcatccggcctagaaatagttttttctaattctgtgaaaaatgtcattggtagtttgataagaatagcattgatgtaattactttgtgtagcatggccattttaacaatattaattctttctatccatggtcatggaatgttgttccacttgtttgtgttgtctgctttcttcgagcagtgtttttgtaattcttgtcttaaagatctttcacctctgtggtttgctgtatttctaggtattttattctttttgtggcttttgtgaatgggattgcattcttgatttggctctcagttttaatgttaattggtgtatagaaatgctactgatttttgtacattgattttgttttttaaaactttgctgaagttgtttattagatgtaggagcctttggcagagactgtggggttttctaggtatagaatcattttattttcattttaatgttactaatcctgttcattttaaaattttatggctgcattttcaacatatctgttaatattttgatgaataaattctttgagatgaattttttacatcaaagttcattatcaaattgcataaatgactgtgatgtagtgttctctgcatagtgaagaaactgccaaatgttattaaaactggtatcataacattctctaacaatgtagtatatcatatttacttattcaattctaatatcccctcttctgttatttctgatatccccctttctgttatttctaacagtaacactgtgcaatttctgcataataaaacaaattttataatttttaagtttatgattccaaaggaaaagctatagttacaaaaataacatgcagaaattactctgtagaattgaatagaaaattagccctttataaagctatagtgaaccaaagattttgtttaaggacagttcaggctcttaatagtgagaagtgaaatgaaagggttttatttaaaggaagcaagaaaaaaccttgtagaaaattttaaataaaggagtagttttaagaaatctatcccggccgggcgtggtggctcacggctgtagtcccagcactttgggaggccgaggcgggcagatcacaaggtcaggagattgagaccatcctggctaacacggtgaaaccctgtctctactaaaaataccaaaaattagccaggcgtggtggcgggtgcctgtagtcccagctacttgggaggctgaggcaggagaatggcatgaacccgggagatggagcttgcagtgagctgagatcgcgccactgcactccagcctgggcgacagagcaggcctccgtctcaagaaaaaaaaaaaaaagaaatctgcatagggggaaaaaagttcaaaattatgtttgttttgtggaagcagaagggtcacagcagatacccctttaacaaaagataggctagcaagagaaaacattacaaattgattttattatacttttatatgacacgagagccttcagaatgaagacccaaagacacaaggaaaagtgtccatttttatgcttaggttagaagaagcagggacagccatgtagaactgtgactggacaaaaagttgtaagttaacagaaatagactgagtagggaactccagtggagactgtctctgtgtggcattcctttctcccagggatggggcagaacccctctgtagtgagggccttaatttctttatggctagctgttcacagaaagatagggacatgttagggtaatatttttatgcttcatggctagctttggggaaagagcgttctggtttctgtgagccaccttggggaaaaagaagattgtctctatggcttgccttgcaggtcagagagaaactttgcttctgagggtattttctgagacccaagttttcatatgcatacaaatgttgatttgttttatttgaaacataaacaggactctgaggagggagttgttgaacattttaaatcaatttacagatattatttaaaaataaatgtaattcactaaattatgatcatcttgataaatacaggaataaaatctgataatttgtcacctatttatgatttaaaaaaaccctagcaactaaaaaaagggaaattttaaaatctgataatgcccatgaaaataattctttcaaactttatattggcgaaatattaaaaacttccaggccgggtgcggtggctcacacctgtaatcccagcactttgggaggctgaggtgggcggatcacctgaggtcgggagttcaagatcagcctgaccaacatggagaaaccccatctctactaaaaatacaaaattagccaggcctggtggcacacgcctgtaatcccagctactcaggaggctgaggcaggagaatcgcttgaacccaggaggcagaggttgcagtgagccgagatcacgccattgcactccagcctgggcaacaagagcaaaactccgtctaatgaaaaaaaataataatttcctttgtgtgatattgtgaaatacatatttggtctttgtctctgtttcctggtatattccttcaaaaattcttaaagtcttccaaatgataagtgtctttttgtatgccaatgagttgactgatggcaggtcaccagaaagaccaagatgggagtagaaggttggcactttcagccccacccagcaacctttgagaaggggagaggagccgaaggctaagttgatcaatggccaatgatttaatcaatcatgcctatataatggagccattataaaataataataataaactgagttcagagcgcttccagatagctgaaaacctggaggttctgaagggtggcgtgcccagggagggcatggaagctctatgctccttcccacacaccttaccctgggaatctattgttcatctgtattctttgtaattaactcgtaaatgcgagctttcctttgaattctgtgagccactctagcaaattagttgaacctaaggaggaggctgtgggaaccctgatttacagtcagtcagttagaagcacaggcaaaataacctgaggcttgtgatcagcctctgaagtggggctcagctttgtgagaccgagtcttctacccgtgtgatatgacagatagtgtcagaattaaattgagttagaggacacttagctggtgtctgctgcagaatcgactgcttgcttggtgtttggtgaacccctccaccccatttggtcacagaacccttttttttgccaaggagtgaaggacattctgccccaaaataggccaaattggtatattgattattttgaggtgaaaacattagagaaattgtcatttcagaaggggatagctgacctctctcttcctacatgcagcaagccaaaagattttctcggagttttatcctccctgtaccaggacaggagagtgggaactgggggctgcagtggacctgagtgaatatgcttaccttccactagttttacattgtcccactatatatatatataatgtatatatataatacatatttaatatatattaaatatatattacatatatttagtatatacgtaatatatattaaatatatataatatatatgtatatcttctagtgactcccttagaaatttactgcctctagtcagattttctttatcctgtcatttgttctacagtttatcattctttgtctgaattgtataaaagcatcttgctgtggccacttctttggacctcactctcttgtgaagattcccatgtacatgtaaaactaataaaatgtatatgcttctctcttgtcagtctgtgtggtgtcagtttggtttctagatccagccaagagcccacataactaaaagggcatttggaggtaaactttcactttccttagagttgattgttgcatgagagtacaggaaaaatactttggtttgtttattcctgtattcacaaaccttgagctcaagaatgagactaggatagtctttatcactacatgtgggcatgtaggaattatctttttccctcctttttgtccggcctactaggaagctcatctaagcttcatattctattcctgtatgcttctcaaattcatgtggattgtatttttttttgtctatttttttgaccttgcgtttgcctatactgatttttcttttttaataaactccctcaactcttttgaagtaggctgggataactaattcagtcaagtacaattcagttagcccttacgtgactttggaacaatcatttgctgatgttatcccattgtttcctgatccgtcaatgtggataaaaattgttctctctcaggttcttttatcttttatgaaaatcaactaaaaagtcataaaaatctttttttgaagttgagtattatcctaatgatggatacaatatgggccatctccatagagctgtatattttttctggtttcagattttaaagatttacacataaattttaaatgattttttaaaagtcttttctagtataacatgtttgctttctttctttctgtctttttagtttcatagcttctttttaaataattgctcattcccatcagggctctttctgcttttcttttgcagaatatgtgagatccaggctgttgactgtactacaatatcctcatttacagtgagggaatgtgaggg

SEQ ID NO: 12708 - DNA, 589 bp, Homo sapiens
tgctctgagtgtttacctcacacccaaaacaagtgtcagtggtaactggatcgagatcgcctatggtacgagctctggagcagtacgagtgattgtacaacacccagagacagttgggtcaggtcctcagctttttcagactttcacagttcaccgaagtcccgtaacaaaaatcatgctatcagagaagcatcttgtatcagtctgtgcagataataatcatgtccggacgtggacagtaacacgattcagaggaatgatctctactcagccaggttctactcctttagcgtcattcaagatactatccctggaggagacagaaagtcatggtagctattcctctggaaatgacataggaccttttggagagcgagacgatcaacaggtgtttatccagaaagttgttcccatcaccaacaaactatttgtaagactctcatcgactggaaaaagtctgtgtggtgtcagtttggtttctagatccagccaagagcccacataactaaaagggcatttggagaatatgtgagatccaggctgttgactgtactacaatatcctcatttacagtgagggaatgtgaggg

SEQ ID NO: 12709 - DNA, 1499 bp, Homo sapiens
gagctgtatattttttctggtttcagattttaaagatttacacataaattttaaatgattttttaaaagtcttttctagtataacatgtttgctttctttctttctgtctttttagtttcatagcttctttttaaataattgctcattcccatcagggctctttctgcttttcttttgcagaatatgtgagatccaggctgttgactgtactacaatatcctcatttacagtgagggaatgtgagggatccagtaggatgggctcaagaccaaggcgctacttgttcacaggccatacaaatggcagtattcaaatgtgggatctgaccactgctatggatatggttaacaaaagtgaagataagggtaggttctcatacagaaagatgtttgtcacaaggttaagcttttcacttaagtgattttaatgactatttgttctcctaagatgtaggtggtccaaccgaagaagagctactcaaattactcgatcaatgtgatttgagcacatctcgctgtgctactcctaacatcagtccagcaacttccgtagttcagcatagccacttacgagaatcaaattctaggtaggttaaagagttgggtattataaacaaaatttatttcttttggggaaattgactgaaatattgtaatcacatagttgttctagaaagccatacttctcaaggtacattttaaattcagacattatgttaactttttaacagttttaccaaatttcttgataggcatatctggttcttttcatagaaaaacatttttaccttttaacttattttgtgaattgctgcccaattggaagcctattatgtgatcaagaatttattcaaaggaaattaggaaaattacatgtcaccttggttagtatgtgaagctttaattattgtcctgtctcagggacaatatttatctgtggttctattatgttgtctagtcttacatttaagcattatgtaattttaatacaaagttccataatgtctttttagttatcatattgataaattccaaagtctgaagaaccaagggctaaatactgaattatgatggtttcacattggtttcaaggatttttcctcccatcttttttttagctgttcaaaaattcagcatgtctgtgaatatatgatggtattatttgcattggtaattttatataccatctatataataaagagtacttgataagtatatttttacaaagagaaatatggatataatacactttatgtatttatatagtgtgttttattggttgtataattaatatgttcctgagaaatcacagagtgaaatctgaactgtcatttttaaaaactgtatttcagccttcagcttcagcaccatgataccacccatgaagcagctacttacggttccatgaggccttacagagaaagtcctttattagcaagggcaagaaggactgagagctttcacagttatagggacttccagactattaatttgaacag

SEQ ID NO: 12710 - DNA, 652 bp, Homo sapiens
gagctgtatattttttctggtttcagattttaaagatttacacataaattttaaatgattttttaaaagtcttttctagtataacatgtttgctttctttctttctgtctttttagtttcatagcttctttttaaataattgctcattcccatcagggctctttctgcttttcttttgcagaatatgtgagatccaggctgttgactgtactacaatatcctcatttacagtgagggaatgtgagggatccagtaggatgggctcaagaccaaggcgctacttgttcacaggccatacaaatggcagtattcaaatgtgggatctgaccactgctatggatatggttaacaaaagtgaagataaggatgtaggtggtccaaccgaagaagagctactcaaattactcgatcaatgtgatttgagcacatctcgctgtgctactcctaacatcagtccagcaacttccgtagttcagcatagccacttacgagaatcaaattctagccttcagcttcagcaccatgataccacccatgaagcagctacttacggttccatgaggccttacagagaaagtcctttattagcaagggcaagaaggactgagagctttcacagttatagggacttccagactattaatttgaacag

SEQ ID NO: 12711 - DNA, 3487 bp, Homo sapiens
gctcaagaatgagactaggatagtctttatcactacatgtgggcatgtaggaattatctttttccctcctttttgtccggcctactaggaagctcatctaagcttcatattctattcctgtatgcttctcaaattcatgtggattgtatttttttttgtctatttttttgaccttgcgtttgcctatactgatttttcttttttaataaactccctcaactcttttgaagtaggctgggataactaattcagtcaagtacaattcagttagcccttacgtgactttggaacaatcatttgctgatgttatcccattgtttcctgatccgtcaatgtggataaaaattgttctctctcaggttcttttatcttttatgaaaatcaactaaaaagtcataaaaatctttttttgaagttgagtattatcctaatgatggatacaatatgggccatctccatagagctgtatattttttctggtttcagattttaaagatttacacataaattttaaatgattttttaaaagtcttttctagtataacatgtttgctttctttctttctgtctttttagtttcatagcttctttttaaataattgctcattcccatcagggctctttctgcttttcttttgcagaatatgtgagatccaggctgttgactgtactacaatatcctcatttacagtgagggaatgtgagggatccagtaggatgggctcaagaccaaggcgctacttgttcacaggccatacaaatggcagtattcaaatgtgggatctgaccactgctatggatatggttaacaaaagtgaagataagggtaggttctcatacagaaagatgtttgtcacaaggttaagcttttcacttaagtgattttaatgactatttgttctcctaagatgtaggtggtccaaccgaagaagagctactcaaattactcgatcaatgtgatttgagcacatctcgctgtgctactcctaacatcagtccagcaacttccgtagttcagcatagccacttacgagaatcaaattctaggtaggttaaagagttgggtattataaacaaaatttatttcttttggggaaattgactgaaatattgtaatcacatagttgttctagaaagccatacttctcaaggtacattttaaattcagacattatgttaactttttaacagttttaccaaatttcttgataggcatatctggttcttttcatagaaaaacatttttaccttttaacttattttgtgaattgctgcccaattggaagcctattatgtgatcaagaatttattcaaaggaaattaggaaaattacatgtcaccttggttagtatgtgaagctttaattattgtcctgtctcagggacaatatttatctgtggttctattatgttgtctagtcttacatttaagcattatgtaattttaatacaaagttccataatgtctttttagttatcatattgataaattccaaagtctgaagaaccaagggctaaatactgaattatgatggtttcacattggtttcaaggatttttcctcccatcttttttttagctgttcaaaaattcagcatgtctgtgaatatatgatggtattatttgcattggtaattttatataccatctatataataaagagtacttgataagtatatttttacaaagagaaatatggatataatacactttatgtatttatatagtgtgttttattggttgtataattaatatgttcctgagaaatcacagagtgaaatctgaactgtcatttttaaaaactgtatttcagccttcagcttcagcaccatgataccacccatgaagcagctacttacggttccatgaggccttacagagaaagtcctttattagcaagggcaagaaggactgagagctttcacagttatagggacttccagactattaatttgaacagaaatgtagaaagagctgtccctgaaaatggtaacttgggtccaatacaagctgaagtgaaaggggcaacaggggaatgtaatatatctgagagaaagtctcctggagtagaaataaaaagtttgagagaattggatagtggattggaagtgcataaaatagctgaaggtttttcagaatccaagaaaaggtcatcagaagatgaaaatgaaaataaaatagagtttaggaagaaaggaggatttgaagggggaggattccttggaagaaagaaagttccctatctggcgtcatcaccaagtacttccgatggaggaactgactcacctggtactgcgtccccatctcctacaaagactactccatctcctcggcataaaaaaagtgattcttcaggtcaggagtacagcttgtgaaaactcaccaaaatgaatagttgtttcgttacatttagatgaaagttaaactttactgaatttcagtacattagtttttacactaaaactttacaagataaaattggacttcatttagtatctttttaacagaattacttggaataatgagatacaataatcatatctcttttgacattttggaaatttttttaattttacaagtacatttaacagatcatttataaagcaggagtccattttaacacttaccgactttttttggtttggaaacatattaccacgtcttaataggatggtgcccatataggtgagcatccctttagatcatgggaaccagcagactgcattcctaatcttcattatgcctgagacttgtcttacaatgttacctttaagtgaatcacataattgtctttggaacttggtctcccaacacttattgtgattgcaaagtgtttaccagatatttgatgaggtgctatgtttgtgaaaaacatatcatgtaattcaaaaacactattgatattgaataccagataccactatgtagtaagtcttttaggatgattttaatttagtcgtgcgtcattttctgattctcatcattgggagatcttaaatcttagcaagcattagcaatattaaatgccaaaattccattgaaactttcaagttggagcaattgtctgtgtttgaaaagatgaaataaaaataataatcaagggcaaagctttgagtgcccagaagggaaagctgtaccagttgctaacctgtcttgtttcaggagccaccatgtttttttttcagtgttaacaacaatcatgataattaaattaaaacactagtttgttcacttgtaggactgcagttctgaattttgggttaaaggttttggctgctgtaagaatgtgaatttgaatgtattttgaattgtaagagcaaaagaacgtttttgtacaattttttttcatttaattggaatgatcttcaggtttctacaaatagggtaattgtaaatttaaagcattagcatttattggtgaataatgtatatatccccattccaagaaatataagtgagtgaagttgaaataaaatctttaaaattta

SEQ ID NO: 12712 - DNA, 2722 bp, Homo sapiens
gctcaagaatgagactaggatagtctttatcactacatgtgggcatgtaggaattatctttttccctcctttttgtccggcctactaggaagctcatctaagcttcatattctattcctgtatgcttctcaaattcatgtggattgtatttttttttgtctatttttttgaccttgcgtttgcctatactgatttttcttttttaataaactccctcaactcttttgaagtaggctgggataactaattcagtcaagtacaattcagttagcccttacgtgactttggaacaatcatttgctgatgttatcccattgtttcctgatccgtcaatgtggataaaaattgttctctctcaggttcttttatcttttatgaaaatcaactaaaaagtcataaaaatctttttttgaagttgagtattatcctaatgatggatacaatatgggccatctccatagagctgtatattttttctggtttcagattttaaagatttacacataaattttaaatgattttttaaaagtcttttctagtataacatgtttgctttctttctttctgtctttttagtttcatagcttctttttaaataattgctcattcccatcagggctctttctgcttttcttttgcagaatatgtgagatccaggctgttgactgtactacaatatcctcatttacagtgagggaatgtgagggatccagtaggatgggctcaagaccaaggcgctacttgttcacaggccatacaaatggcagtattcaaatgtgggatctgaccactgctatggatatggttaacaaaagtgaagataagggtaggttctcatacagaaagatgtttgtcacaaggttaagcttttcacttaagtgattttaatgactatttgttctcctaagatgtaggtggtccaaccgaagaagagctactcaaattactcgatcaatgtgatttgagcacatctcgctgtgctactcctaacatcagtccagcaacttccgtagttcagcatagccacttacgagaatcaaattctagccttcagcttcagcaccatgataccacccatgaagcagctacttacggttccatgaggccttacagagaaagtcctttattagcaagggcaagaaggactgagagctttcacagttatagggacttccagactattaatttgaacagaaatgtagaaagagctgtccctgaaaatggtaacttgggtccaatacaagctgaagtgaaaggggcaacaggggaatgtaatatatctgagagaaagtctcctggagtagaaataaaaagtttgagagaattggatagtggattggaagtgcataaaatagctgaaggtttttcagaatccaagaaaaggtcatcagaagatgaaaatgaaaataaaatagagtttaggaagaaaggaggatttgaagggggaggattccttggaagaaagaaagttccctatctggcgtcatcaccaagtacttccgatggaggaactgactcacctggtactgcgtccccatctcctacaaagactactccatctcctcggcataaaaaaagtgattcttcaggtcaggagtacagcttgtgaaaactcaccaaaatgaatagttgtttcgttacatttagatgaaagttaaactttactgaatttcagtacattagtttttacactaaaactttacaagataaaattggacttcatttagtatctttttaacagaattacttggaataatgagatacaataatcatatctcttttgacattttggaaatttttttaattttacaagtacatttaacagatcatttataaagcaggagtccattttaacacttaccgactttttttggtttggaaacatattaccacgtcttaataggatggtgcccatataggtgagcatccctttagatcatgggaaccagcagactgcattcctaatcttcattatgcctgagacttgtcttacaatgttacctttaagtgaatcacataattgtctttggaacttggtctcccaacacttattgtgattgcaaagtgtttaccagatatttgatgaggtgctatgtttgtgaaaaacatatcatgtaattcaaaaacactattgatattgaataccagataccactatgtagtaagtcttttaggatgattttaatttagtcgtgcgtcattttctgattctcatcattgggagatcttaaatcttagcaagcattagcaatattaaatgccaaaattccattgaaactttcaagttggagcaattgtctgtgtttgaaaagatgaaataaaaataataatcaagggcaaagctttgagtgcccagaagggaaagctgtaccagttgctaacctgtcttgtttcaggagccaccatgtttttttttcagtgttaacaacaatcatgataattaaattaaaacactagtttgttcacttgtaggactgcagttctgaattttgggttaaaggttttggctgctgtaagaatgtgaatttgaatgtattttgaattgtaagagcaaaagaacgtttttgtacaattttttttcatttaattggaatgatcttcaggtttctacaaatagggtaattgtaaatttaaagcattagcatttattggtgaataatgtatatatccccattccaagaaatataagtgagtgaagttgaaataaaatctttaaaattta

SEQ ID NO: 12713 - DNA, 2258 bp, Homo sapiens
agtgccacattagaacagcttgaagaccgttcatttttaagtgacaagagactcacctccaagaagcaattgtgttttcagaatgattttattcaagcaagcaacttatttcatttccttgtttgctacagtttcctgtggatgtctgactcaactctatgaaaacgccttcttcagaggtggggatgtagcttccatgtacaccccaaatgcccaatactgccagatgaggtgcacattccacccaaggtgtttgctattcagttttcttccagcaagttcaatcaatgacatggagaaaaggtttggttgcttcttgaaagatagtgttacaggaaccctgccaaaagtacatcgaacaggtgcagtttctggacattccttgaagcaatgtggtcatcaaataagtgcttgccatcgagacatttataaaggagttgatatgagaggagtcaattttaatgtgtctaaggttagcagtgttgaagaatgccaaaaaaggtgcaccagtaacattcgctgccagtttttttcatatgccacgcaaacatttcacaaggcagagtaccggaacaattgcctattaaagtacagtcccggaggaacacctaccgctataaaggtgctgagtaacgtggaatctggattctcactgaagccctgtgccctttcagaaattggttgccacatgaacatcttccagcatcttgcgttctcagatgtggatgttgccagggttctcactccagatgcttttgtgtgtcggaccatctgcacctatcaccccaactgcctcttctttacattctatacaaatgtatggaaaatcgagtcacaaagaaatgtttgtcttcttaaaacatctgaaagtggcacaccaagttcctctactcctcaagaaaacaccatatctggatatagccttttaacctgcaaaagaactttacctgaaccctgccattctaaaatttacccgggagttgactttggaggagaagaattgaatgtgacttttgttaaaggagtgaatgtttgccaagagacttgcacaaagatgattcgctgtcagtttttcacttattctttactcccagaagactgtaaggaagagaagtgtaagtgtttcttaagattatctatggatggttctccaactaggattgcgtatgggacacaagggagctctggttactctttgagattgtgtaacactggggacaactctgtctgcacaacaaaaacaagcacacgcattgttggaggaacaaactcttcttggggagagtggccctggcaggtgagcctgcaggtgaagctgacagctcagaggcacctgtgtggagggtcactcataggacaccagtgggtcctcactgctgcccactgctttgatgggcttcccctgcaggatgtttggcgcatctatagtggcattttaaatctgtcagacattacaaaagatacacctttctcacaaataaaagagattattattcaccaaaactataaagtctcagaagggaatcatgatatcgccttgataaaactccaggctcctttgaattacactgaattccaaaaaccaatatgcctaccttccaaaggtgacacaagcacaatttataccaactgttgggtaaccggatggggcttctcgaaggagaaaggtgaaatccaaaatattctacaaaaggtaaatattcctttggtaacaaatgaagaatgccagaaaagatatcaagattataaaataacccaacggatggtctgtgctggctataaagaagggggaaaagatgcttgtaagggagattcaggtggtcccttagtttgcaaacacaatggaatgtggcgtttggtgggcatcaccagctggggtgaaggctgtgcccgcagggagcaacctggtgtctacaccaaagtcgctgagtacatggactggattttagagaaaacacagagcagtgatggaaaagctcagatgcagtcaccagcatgagaagcagtccagagtctaggcaatttttacaacctgagttcaagtcaaattctgagcctggggggtcctcatctgcaaagcatggagagtggcatcttctttgcatcctaaggacgaaaaacacagtgcactcagagctgctgaggacaatgtctggctgaagcccgctttcagcacgccgtaaccaggggctgacaatgcgaggtcgcaactgagatctccatgactgtgtgttgtgaaataaaatggtgaaagatca

SEQ ID NO: 12714 - DNA, 10459 bp, Homo sapiens
tggtgggctgtctgttggggtctatgcacaggatttctgctggagttctaaggtgggaagggctggattctgggttcattcactgtggttgtctgtattctgtgcacaaggactggcttgaagcatggatccttgggggctgacttggcactgaaatgagccttaagcctgcgtctgcaggggccagcctaacatggggatcacctggcacctgagttcatggggataggcctgttcctgagtttattcaggctgtcctgggaacaaggtccactggggtgagcccagcatctgggtccacatggcccagcatggagccaagatctctggaggctgacctggtgctggatctgcaggggatggcctggattctaggcccatgggtgccaacttggagcctggggttgctggggctaacgtggaggctagatagagtcttgggggccaggctagagctggagcaggcctgaagtctaggttttgtgtggccatcttggagcctgaagccccaggggctgacctggtctggggtgagcatggggctgaggccacagaggctggtctggcctgtggcaggcctgaatcctggtgctggggtttactggagtgggcttggtgcttgggatctgtggtgaagttaggttctatcttaactgtccctcctccatgcaagagggcatctctctccatactgtgctgcccaggcttgaaggtgagatgacaccggtaatgtgaaattgtccttcctatacacttctatgtgtcttttcttatttctgtgctgcaaccaggtggcataacctctcacctgattccttagctctagtgaagttattttcgtgcatggatacttgttcgaattgatgtttctgcaagggatgagcgctagaaactcctgttctgacaaactcctattcctattcttgctgacatcactccctgaaatagttaatatacttaacagctgaacacggataggatgttcatggaatatgttgacaggacaaaaagttgaaactgttggcagaaacccaaagtcaatattgaagccaagcaaaatattgcctgcagtgccacattagaacagcttgaagaccgttcatttttaagtgacaagagactcacctccaagaagcaattgtgttttcaggtagcaaatttttattattctgattgtttccaaataaactataatttttaagtataattttttactttatgagaaaattaatcatttatattctaatttcctgagtatgtagagagtatagataatgttcctttatgtagaaatatttaaatgtaagatgattttaaatcagaaagaatatttgattgatttaaaatttttaaatgggctttaatattttcagaggttttctttacttagggatttttggactgacattattgccattatttattaattttgtttttgcccaaatcaagaggtttcataattgtttactctctctctaccaattccctttccaacattactagccacagagttggccaatgaacaataaacacaacagtagtctggaggtctcaatttgtatcttgggaagcattataaattttccaactccctagacacaaatgtaccaaaaaaaaacccttgttttctataccagtaattgtgtgctttgtcttgcaattcagacatttacaagaaaatctaaatcaccttaaattaagatttatgttaaatgtggtctaaaaccagcagagttatgtattgttttcttttttagaatgattttattcaagcaagcaacttatttcatttccttgtttgctacagtttcctgtggtaagtgaattatctataaaacatggaattcaggctaagacaggagtagccaagcaagtggcaccacccctggagaaagctattgaacatacagcttcgggggtggagattgtccctgatgattcaggacacgtgtctatttaatgttccacaacaaggaccacttgtcaggtatattgctgtagacatatgttgcagaccagaggaaggagctcagaagtaggaatgtcttgggacttgtgttaacaaaaacttctgttcgcagatgacactctgcaaagcaaaacttgaaacaaaaaaaaattagtcctctatttttattatcaacagtaaaaaattaaactttatctgaaaattcaaaagagtgctaggcattttatagtgtctgggtccaatccaagtatctgttaggaacaccatacatagttttactctggaccgctagggaaccatttcaaaaatgaaagtaactggtttaaatttaacttagcaaaccatgcatttggatagttctaggtgaatagctttcaacaccagatttagatctcatttctctattaatttcattaatttttggagaataaaaatgattctggacatttcattaatcattacagagggagttttctctgtgtccccacaaggcatgattctgggtctatggtgacttaagagggccacacaacaatgagtatttaattttcctcagatgtatggctacaataaacatctataggtaaggtttacattcataaagagacctttttttttccaggaaaaaagacttttattccccctaaatcacaactcccctgtgtctgtccctcaaccctgatttctcttctaaaccgtaatttacaaacccatgtgcaaacccactgaaaggtgagaaggagcataagccagagacactgggaaccacagccaactacagggggtttttcatttttttgttttgttttgttttttggcaaaataaatcatgattatggctaggaaaatcagggatgtaagtaagcaaaaatttagaaactacatattgcatgtagtccccaaattcagaaacagtcatcgttaaacatcttttatttagtctttcagatatttttctacatatacctatttgcacatttcacaaaaaagagttattaactgtggacactctttgacttgcattttccacttatagctatcttttggtgcaaataagtaatatattttggagcttgctattcttctctttttatggtatttttgtgtgcacattcttatgctcttattcagttatttctgtagaatacaatttttgaaataaaaatactagattcaaaggtgtgaatatttttgaaggttttgtggtgtggtatcatgaaattaggtttcagaaagtttactccatagttgactttttctaccagctaataagagtgctcatttaccccacttaggccaactctaacaggcttctgttgctttgcatcctgacatatttatctttctggaaacagtgtcctaatttatttctgcagagctactgcctctcagttttggtccatgtggttctggtgaccctgattcttctgctgaaccagaaagtgcacacatcctcctggctgtggtgacccaatcagagccaacgtcttgcaatgaagcttttctttagacatctagaaataagactcttatgttttttttttccaatttgacttgaaacttaagacaatacacaggcctgagttgttggtactattttgctactacgtggagcttgagagtaatggtaacaccaagactggagcaagtggaaggagacatattgtccactgatgctatcagttgagcacaatgtgcagttactttttaagccagattcaccatgggctttttggctcctgaaccaatagatttcatttgttttcaagccactttgtactaggttttccatcatttgcaatcaaaaccagtatacaaacactggttatttaatttttcatttttgctaatctcagggataaaatggcttctagttgttttaacttggctatatttgtgattcttcccattttcatatacttactaatcacttctatttcttttgtaaattatcttttcatatttgttatctaattctttaaaatttgagtactttaattctcattattgtttgtggaattgttaaacaagactgaataatctgcccaaagtccatggacatgggggcccatgtaaaagctttgaaagccaccatcattatgagataaattatataatagtactttacataggctccaaaatacagcacagacacagctatcattgtcatggtcatcattatcatcatgatcaccaacttatgaggataagcaagaacacctactagaagtttctttccattcagcaacaaaattggtgtctttctagtcactcccttccctgactgtcacatagcagttcacagaggctcagttgcagaatgagaagctctgggccaggacctgccattgtatgcatccttgcatgggaactgggggctggaagaggagtgactgcttgataattatgagtcagtcaaaaccaccaactgtctgaaaaaaataggcctttttgtaactagtattgtcactaaaccaactcctccatgttttgtgcatacatgaaatctaggcaatacacttgtattcccaaaagcttccacttgaagagatctgtgctctttccaaatataaaccttacccgagaggtggtcatcttggccacacctcagagagggagagaggcagtcttgttgggttgggtggtcataatggggctcagggccaaatccccagggggtaggatagtgcagagaagatggcactctccagtgcttaataaaatgcacgtggtctaagctgcccactccctcaaaggcaataaaaaataggtactatttaaattgaagagtaactactgccccagggaatggacaggttgtcattggaatagccatggttaatggtcccagttgacaactgaaatgaatgtgctacctgaacaggaaagcttattaaccagatttcaaagacagtctttcccggtaaatccaaatttacaaattaaagccagtaaagacaccgaattctctaataatatgtggggtgcagtatattttagagctgggaataattccaaacagcaaatagttcaaaatttattttcaatttagcatatgcatgcatttgcttaaactgtcttaaaaatgagtaaaaaatactgtcagtttgtttcaatcatactgagatgaggaacaatgtttagcattgcatgctagaaaaggacacaggattgggagtcagggctgggtgaccgtcacaggactttcactaactgtgtggatcttgggcaagtctgtgtgccctgagactcagttatttaactttcttttaaaaaacatagtccagatgcagataacaaagcctgcctctaatttcccttacagaattgtgagaagctggtggagatgtttgttacaaaagtgttttgaaaatagagcaaatattattctttttaaggcatgatgttttcatagcatgtcaggcaacaggaaaaaactaagttaggattttattttattgtggggaatttatgtgcaaattattgtgcaatttaatgaaaataagccaatgttttatacagaagtacccagaaaattaaataacactatacattgttcaaatagttgccttaatatattttattttctcagcataattagagttgtattatacaggtctttgagtagtcagtcagtgggagaagttaagacaacagatatctttttattaaaattattatatgaattatcgcaaattaatttttatggttctgtcacaggatgtctgactcaactctatgaaaacgccttcttcagaggtggggatgtagcttccatgtacaccccaaatgcccaatactgccagatgaggtgcacattccacccaaggtgtttgctattcagttttcttccagcaagttcaatcaatgacatggagaaaaggtaaaagttggtatttcattattggagaagctgtttttcaaaactgaatcagttttgtgcagaaaggtgtagtataactgagagttcttcctcacacggggttcaaggaccagcttcagcaaaatcccgtcaagtggttcttacaaatgcagattcctaggccacaacccagatctgctgaaccaaagtttcttgtgaccaggaatctgcattttaaacaatcactgtgtttctttaaagtagtagaagctagtcattttctattcaaagcctcaaaatgcttgaatatcattgggctaagggattgtctcaagaaagagtctaacaggtgcacatttcatctgaataaagaaacagatttaactgtgtgacccatgatcacattagcggatagcacagtccaaagaaaataacataagacaagcattttgctgagaatgtaattgagaaagatctagaacttgtgattttgggacagggcagttctaaatggggcctatagtgagccagtttgggcacctgtggcatgatgctatgtatggtgtgtgtgtgtatgtgtgcttgtgcttgtgtgaatatgtattattaactggaaatttgtaaaagtattggaaaaatagtacttacgattttgtgtgtgtgtgtgatggagtctcgctttgtagcccaggctggagtgcagtggcgtgatctcggctcactgcaacttccacctcccaggttcaagcgattctcctgcctcagcctcccaagtagctgggattacaggcacgcaccaccacgtccagctaatttttgtagttttagtagagacggggtttcaccacattggccaggctggccttgaactcctgacctcgtgatccacctgcctctacctcctaatgtgctgggattacaggcatgagccaccgcacccagcggtaattacaatttttattaggtcagagagatgcttattaatcacgagccacagtttcatcttaatgatttttccttttgattaatatccagagtaagcttttctttgttgttcccatttccatgttcataactctttactcatcttcactctatgtgagtttaccaactagaaattggatagtcattctctgatcccacatgttaaacttgtagagaaaactcagattgtatgtgaggatcatcatattaaaagtggaggaaggttctagaattcttataaataatgaaattaacatgaaggtggacatctaagacagagggaagtcttccattaagtgcagactacaaggagttaataagcaagatgaacacgatatacaaatccagctcttatcactaagttaactttttaagtaaatgaaagtatttgcaaaaataattaccaattgagaacatagttgcctgaaagtttaagaacacaggaaaaatcattaactctttaatatggttgatttcctgtacttaaaaaatgtgagtgtaaagaaaacgcagtgatggagttagatattatggggtgttataaaattagctctaagagtgttctttccagcaagtattggggaagctatattattttccttattcctggttttatttgttagtgtgtagaaaatgctagacatttcctcaatgtatgtttattattctacttcctaagtaaagctacttttaaaataggtttggttgcttcttgaaagatagtgttacaggaaccctgccaaaagtacatcgaacaggtgcagtttctggacattccttgaagcaatgtggtcatcaaataagtggtaagttgtgaatttcttagctacatttgagttaatattggatctcgcttagaacagcttttgctcaaagtttgtactgctacagctttttggaaggcatcactcataaagataggagatggggcagtattctggacacaaaagagggacccatattcatctggacacttctattgtctttataaatcaacacatacttaatgagcctctattatttatgaggttagcgctcaagtgtaagatttgcagaaaatgaatccaaataattgtgtctcgtttccagataagaatttttaagaaaacacaagggaacatctctctcaagttcacttgagggtaatttttacatcagtgattctcaaccagcagtgattttgtctcttccactggggacatttgacaatgtctggagacatttttggtggctacaactagggaggatgctattagcatttactaagtagaggccagaatgtttgaatgctgaccaacattctacaaggcacagggcagtcgtccacagcaaataattttctggcccaaaacgtcaacagtgctgacatcaagaaactctgtgatataccactaggcccaaattgaagaactgagttctgcaaatcttgctaagaataatacttcctaaaggaaacttgaggactaggatgctagagaactttgattctgacatctgaagctactgatgtcttgggaaacagtttccaatgctatcctaataaatttaagacaaatgaactatttctcaaacatgactgggactgataagaaagtgaaaagtgctgaaaagattcaactgatgggttgtcagaatcttaaaataactgctgttattctatgtatgactatatatcattactattttattttcattatgcacaattaattttgtaggttcaaatttcagatgtttttaaatttgtcatcctttcctccctcattgatatcacctcttcaatacgtacacactttgagcctgctgtttgcattttaaccagttatcaaaggatggcaatgccttcattataaatgtgggcctgacttagccagtataataggtgtagtctacgtgaggtggagtacatttcctattttaaaagatcaatttttatgttaatccaatttggtataaattattcgagtaagtgctatttctgattgttgtatcttgtagcaaaatttaaagaaaaagtaatttgtgcctttctcaatattcctgttattgttcatgtattctaaaactcactgttactcacttagcttgcttttaatgttttttaaagtgaaaaattgttcccaagtacataaaatctctacactcaagaacaattctagtcaaaagcatttagagcttccgtatgaacacttaaagagtttttatttgtaagagtcgcatcccaactcttagcctgttcttttctcacatgcagaaaaataggaaagagacttcgtttccacagtctgcaaattcctgtgtttaagaaccacagtgaataatccacctccctgcccaactcatcgtactgtcatatagttttcctgacagtttgtgtattttctgtctttcccacccttaaatttagttttatgacttcaaccatacttcttaggagtggaaaggtatctgtagtagattatggtttattccacataatcttggggaataaaactttaaaaaagtatacagtttatacttctggttacattacttccttaaccaaaagtctaaccaagaaatttgaatctttaaaaaaaaaagaggccgggcgcggtggctcacgcctgtaatcccagcactttgggaggccgagacgggcggatcacgaggtcaggagatcgagaccatcctggctgacacggtgaaaccccgtctctactaaaaatacaaaaattagccgggcgtggtggcgcgcgcctgtagtcccagctactcgggaggctgaggcaggagaatggcgtgaacccgggaggcggagcttgcagtgagtcgagatcgcgccactgcgctccagcctgggcgacagagcgagactccgtctcaaaaaaaaaaaaaaaaaaaagagcctaattttgcttcactgtctgtgaaaagaattatctgtatcttttgcatgtaagacaaatctcaatgaaaagggtgcttaaatagaagttaacactattttaaagcaagaatggaagtggtttcatcatgcgtaaacaacaactctccacattttgtaatgattgatctggatgcaatttgtcatcagacaggagaagtcgaaagcaaagaaataacactgggagatagagaagctctttcattcaatgcgaaaggtcaaaggcacatcagtttctttaataatgcaaacctcagcacacattatcagtgtcctcattattattgccttgtttatttcccactgctcattgataatttcaacgtgaaatttacctgtattgctgcatgcatcttgcagtttaagaagtgaagtaacccaatttcaaagctagtgctttagggaaaatattggattgtatttacttcaagcagagttcgataatttatgtacataataaaaattttaaatcccttagttaatatagcagttgccaaaactgggctattatcattctaaactaccaacccaaatggtagtgggtatctaatctacctctagaaagaaaatggactgtatttgctctatgtatttttcttgtacagcttgccatcgagacatttataaaggagttgatatgagaggagtcaattttaatgtgtctaaggttagcagtgttgaagaatgccaaaaaaggtgcaccagtaacattcgctgccag

SEQ ID NO: 12715 - DNA, 645 bp, Homo sapiens
tggtgggctgtctgttggggtctatgcacaggatttctgctggagttctaaggacaaaaagttgaaactgttggcagaaacccaaagtcaatattgaagccaagcaaaatattgcctgcagtgccacattagaacagcttgaagaccgttcatttttaagtgacaagagactcacctccaagaagcaattgtgttttcagaatgattttattcaagcaagcaacttatttcatttccttgtttgctacagtttcctgtggatgtctgactcaactctatgaaaacgccttcttcagaggtggggatgtagcttccatgtacaccccaaatgcccaatactgccagatgaggtgcacattccacccaaggtgtttgctattcagttttcttccagcaagttcaatcaatgacatggagaaaaggtttggttgcttcttgaaagatagtgttacaggaaccctgccaaaagtacatcgaacaggtgcagtttctggacattccttgaagcaatgtggtcatcaaataagtgcttgccatcgagacatttataaaggagttgatatgagaggagtcaattttaatgtgtctaaggttagcagtgttgaagaatgccaaaaaaggtgcaccagtaacattcgctgccag

SEQ ID NO: 12716 - DNA, 10798 bp, Homo sapiens
agtgccacattagaacagcttgaagaccgttcatttttaagtgacaagagactcacctccaagaagcaattgtgttttcaggtagcaaatttttattattctgattgtttccaaataaactataatttttaagtataattttttactttatgagaaaattaatcatttatattctaatttcctgagtatgtagagagtatagataatgttcctttatgtagaaatatttaaatgtaagatgattttaaatcagaaagaatatttgattgatttaaaatttttaaatgggctttaatattttcagaggttttctttacttagggatttttggactgacattattgccattatttattaattttgtttttgcccaaatcaagaggtttcataattgtttactctctctctaccaattccctttccaacattactagccacagagttggccaatgaacaataaacacaacagtagtctggaggtctcaatttgtatcttgggaagcattataaattttccaactccctagacacaaatgtaccaaaaaaaaacccttgttttctataccagtaattgtgtgctttgtcttgcaattcagacatttacaagaaaatctaaatcaccttaaattaagatttatgttaaatgtggtctaaaaccagcagagttatgtattgttttcttttttagaatgattttattcaagcaagcaacttatttcatttccttgtttgctacagtttcctgtggtaagtgaattatctataaaacatggaattcaggctaagacaggagtagccaagcaagtggcaccacccctggagaaagctattgaacatacagcttcgggggtggagattgtccctgatgattcaggacacgtgtctatttaatgttccacaacaaggaccacttgtcaggtatattgctgtagacatatgttgcagaccagaggaaggagctcagaagtaggaatgtcttgggacttgtgttaacaaaaacttctgttcgcagatgacactctgcaaagcaaaacttgaaacaaaaaaaaattagtcctctatttttattatcaacagtaaaaaattaaactttatctgaaaattcaaaagagtgctaggcattttatagtgtctgggtccaatccaagtatctgttaggaacaccatacatagttttactctggaccgctagggaaccatttcaaaaatgaaagtaactggtttaaatttaacttagcaaaccatgcatttggatagttctaggtgaatagctttcaacaccagatttagatctcatttctctattaatttcattaatttttggagaataaaaatgattctggacatttcattaatcattacagagggagttttctctgtgtccccacaaggcatgattctgggtctatggtgacttaagagggccacacaacaatgagtatttaattttcctcagatgtatggctacaataaacatctataggtaaggtttacattcataaagagacctttttttttccaggaaaaaagacttttattccccctaaatcacaactcccctgtgtctgtccctcaaccctgatttctcttctaaaccgtaatttacaaacccatgtgcaaacccactgaaaggtgagaaggagcataagccagagacactgggaaccacagccaactacagggggtttttcatttttttgttttgttttgttttttggcaaaataaatcatgattatggctaggaaaatcagggatgtaagtaagcaaaaatttagaaactacatattgcatgtagtccccaaattcagaaacagtcatcgttaaacatcttttatttagtctttcagatatttttctacatatacctatttgcacatttcacaaaaaagagttattaactgtggacactctttgacttgcattttccacttatagctatcttttggtgcaaataagtaatatattttggagcttgctattcttctctttttatggtatttttgtgtgcacattcttatgctcttattcagttatttctgtagaatacaatttttgaaataaaaatactagattcaaaggtgtgaatatttttgaaggttttgtggtgtggtatcatgaaattaggtttcagaaagtttactccatagttgactttttctaccagctaataagagtgctcatttaccccacttaggccaactctaacaggcttctgttgctttgcatcctgacatatttatctttctggaaacagtgtcctaatttatttctgcagagctactgcctctcagttttggtccatgtggttctggtgaccctgattcttctgctgaaccagaaagtgcacacatcctcctggctgtggtgacccaatcagagccaacgtcttgcaatgaagcttttctttagacatctagaaataagactcttatgttttttttttccaatttgacttgaaacttaagacaatacacaggcctgagttgttggtactattttgctactacgtggagcttgagagtaatggtaacaccaagactggagcaagtggaaggagacatattgtccactgatgctatcagttgagcacaatgtgcagttactttttaagccagattcaccatgggctttttggctcctgaaccaatagatttcatttgttttcaagccactttgtactaggttttccatcatttgcaatcaaaaccagtatacaaacactggttatttaatttttcatttttgctaatctcagggataaaatggcttctagttgttttaacttggctatatttgtgattcttcccattttcatatacttactaatcacttctatttcttttgtaaattatcttttcatatttgttatctaattctttaaaatttgagtactttaattctcattattgtttgtggaattgttaaacaagactgaataatctgcccaaagtccatggacatgggggcccatgtaaaagctttgaaagccaccatcattatgagataaattatataatagtactttacataggctccaaaatacagcacagacacagctatcattgtcatggtcatcattatcatcatgatcaccaacttatgaggataagcaagaacacctactagaagtttctttccattcagcaacaaaattggtgtctttctagtcactcccttccctgactgtcacatagcagttcacagaggctcagttgcagaatgagaagctctgggccaggacctgccattgtatgcatccttgcatgggaactgggggctggaagaggagtgactgcttgataattatgagtcagtcaaaaccaccaactgtctgaaaaaaataggcctttttgtaactagtattgtcactaaaccaactcctccatgttttgtgcatacatgaaatctaggcaatacacttgtattcccaaaagcttccacttgaagagatctgtgctctttccaaatataaaccttacccgagaggtggtcatcttggccacacctcagagagggagagaggcagtcttgttgggttgggtggtcataatggggctcagggccaaatccccagggggtaggatagtgcagagaagatggcactctccagtgcttaataaaatgcacgtggtctaagctgcccactccctcaaaggcaataaaaaataggtactatttaaattgaagagtaactactgccccagggaatggacaggttgtcattggaatagccatggttaatggtcccagttgacaactgaaatgaatgtgctacctgaacaggaaagcttattaaccagatttcaaagacagtctttcccggtaaatccaaatttacaaattaaagccagtaaagacaccgaattctctaataatatgtggggtgcagtatattttagagctgggaataattccaaacagcaaatagttcaaaatttattttcaatttagcatatgcatgcatttgcttaaactgtcttaaaaatgagtaaaaaatactgtcagtttgtttcaatcatactgagatgaggaacaatgtttagcattgcatgctagaaaaggacacaggattgggagtcagggctgggtgaccgtcacaggactttcactaactgtgtggatcttgggcaagtctgtgtgccctgagactcagttatttaactttcttttaaaaaacatagtccagatgcagataacaaagcctgcctctaatttcccttacagaattgtgagaagctggtggagatgtttgttacaaaagtgttttgaaaatagagcaaatattattctttttaaggcatgatgttttcatagcatgtcaggcaacaggaaaaaactaagttaggattttattttattgtggggaatttatgtgcaaattattgtgcaatttaatgaaaataagccaatgttttatacagaagtacccagaaaattaaataacactatacattgttcaaatagttgccttaatatattttattttctcagcataattagagttgtattatacaggtctttgagtagtcagtcagtgggagaagttaagacaacagatatctttttattaaaattattatatgaattatcgcaaattaatttttatggttctgtcacaggatgtctgactcaactctatgaaaacgccttcttcagaggtggggatgtagcttccatgtacaccccaaatgcccaatactgccagatgaggtgcacattccacccaaggtgtttgctattcagttttcttccagcaagttcaatcaatgacatggagaaaaggtaaaagttggtatttcattattggagaagctgtttttcaaaactgaatcagttttgtgcagaaaggtgtagtataactgagagttcttcctcacacggggttcaaggaccagcttcagcaaaatcccgtcaagtggttcttacaaatgcagattcctaggccacaacccagatctgctgaaccaaagtttcttgtgaccaggaatctgcattttaaacaatcactgtgtttctttaaagtagtagaagctagtcattttctattcaaagcctcaaaatgcttgaatatcattgggctaagggattgtctcaagaaagagtctaacaggtgcacatttcatctgaataaagaaacagatttaactgtgtgacccatgatcacattagcggatagcacagtccaaagaaaataacataagacaagcattttgctgagaatgtaattgagaaagatctagaacttgtgattttgggacagggcagttctaaatggggcctatagtgagccagtttgggcacctgtggcatgatgctatgtatggtgtgtgtgtgtatgtgtgcttgtgcttgtgtgaatatgtattattaactggaaatttgtaaaagtattggaaaaatagtacttacgattttgtgtgtgtgtgtgatggagtctcgctttgtagcccaggctggagtgcagtggcgtgatctcggctcactgcaacttccacctcccaggttcaagcgattctcctgcctcagcctcccaagtagctgggattacaggcacgcaccaccacgtccagctaatttttgtagttttagtagagacggggtttcaccacattggccaggctggccttgaactcctgacctcgtgatccacctgcctctacctcctaatgtgctgggattacaggcatgagccaccgcacccagcggtaattacaatttttattaggtcagagagatgcttattaatcacgagccacagtttcatcttaatgatttttccttttgattaatatccagagtaagcttttctttgttgttcccatttccatgttcataactctttactcatcttcactctatgtgagtttaccaactagaaattggatagtcattctctgatcccacatgttaaacttgtagagaaaactcagattgtatgtgaggatcatcatattaaaagtggaggaaggttctagaattcttataaataatgaaattaacatgaaggtggacatctaagacagagggaagtcttccattaagtgcagactacaaggagttaataagcaagatgaacacgatatacaaatccagctcttatcactaagttaactttttaagtaaatgaaagtatttgcaaaaataattaccaattgagaacatagttgcctgaaagtttaagaacacaggaaaaatcattaactctttaatatggttgatttcctgtacttaaaaaatgtgagtgtaaagaaaacgcagtgatggagttagatattatggggtgttataaaattagctctaagagtgttctttccagcaagtattggggaagctatattattttccttattcctggttttatttgttagtgtgtagaaaatgctagacatttcctcaatgtatgtttattattctacttcctaagtaaagctacttttaaaataggtttggttgcttcttgaaagatagtgttacaggaaccctgccaaaagtacatcgaacaggtgcagtttctggacattccttgaagcaatgtggtcatcaaataagtggtaagttgtgaatttcttagctacatttgagttaatattggatctcgcttagaacagcttttgctcaaagtttgtactgctacagctttttggaaggcatcactcataaagataggagatggggcagtattctggacacaaaagagggacccatattcatctggacacttctattgtctttataaatcaacacatacttaatgagcctctattatttatgaggttagcgctcaagtgtaagatttgcagaaaatgaatccaaataattgtgtctcgtttccagataagaatttttaagaaaacacaagggaacatctctctcaagttcacttgagggtaatttttacatcagtgattctcaaccagcagtgattttgtctcttccactggggacatttgacaatgtctggagacatttttggtggctacaactagggaggatgctattagcatttactaagtagaggccagaatgtttgaatgctgaccaacattctacaaggcacagggcagtcgtccacagcaaataattttctggcccaaaacgtcaacagtgctgacatcaagaaactctgtgatataccactaggcccaaattgaagaactgagttctgcaaatcttgctaagaataatacttcctaaaggaaacttgaggactaggatgctagagaactttgattctgacatctgaagctactgatgtcttgggaaacagtttccaatgctatcctaataaatttaagacaaatgaactatttctcaaacatgactgggactgataagaaagtgaaaagtgctgaaaagattcaactgatgggttgtcagaatcttaaaataactgctgttattctatgtatgactatatatcattactattttattttcattatgcacaattaattttgtaggttcaaatttcagatgtttttaaatttgtcatcctttcctccctcattgatatcacctcttcaatacgtacacactttgagcctgctgtttgcattttaaccagttatcaaaggatggcaatgccttcattataaatgtgggcctgacttagccagtataataggtgtagtctacgtgaggtggagtacatttcctattttaaaagatcaatttttatgttaatccaatttggtataaattattcgagtaagtgctatttctgattgttgtatcttgtagcaaaatttaaagaaaaagtaatttgtgcctttctcaatattcctgttattgttcatgtattctaaaactcactgttactcacttagcttgcttttaatgttttttaaagtgaaaaattgttcccaagtacataaaatctctacactcaagaacaattctagtcaaaagcatttagagcttccgtatgaacacttaaagagtttttatttgtaagagtcgcatcccaactcttagcctgttcttttctcacatgcagaaaaataggaaagagacttcgtttccacagtctgcaaattcctgtgtttaagaaccacagtgaataatccacctccctgcccaactcatcgtactgtcatatagttttcctgacagtttgtgtattttctgtctttcccacccttaaatttagttttatgacttcaaccatacttcttaggagtggaaaggtatctgtagtagattatggtttattccacataatcttggggaataaaactttaaaaaagtatacagtttatacttctggttacattacttccttaaccaaaagtctaaccaagaaatttgaatctttaaaaaaaaaagaggccgggcgcggtggctcacgcctgtaatcccagcactttgggaggccgagacgggcggatcacgaggtcaggagatcgagaccatcctggctgacacggtgaaaccccgtctctactaaaaatacaaaaattagccgggcgtggtggcgcgcgcctgtagtcccagctactcgggaggctgaggcaggagaatggcgtgaacccgggaggcggagcttgcagtgagtcgagatcgcgccactgcgctccagcctgggcgacagagcgagactccgtctcaaaaaaaaaaaaaaaaaaaagagcctaattttgcttcactgtctgtgaaaagaattatctgtatcttttgcatgtaagacaaatctcaatgaaaagggtgcttaaatagaagttaacactattttaaagcaagaatggaagtggtttcatcatgcgtaaacaacaactctccacattttgtaatgattgatctggatgcaatttgtcatcagacaggagaagtcgaaagcaaagaaataacactgggagatagagaagctctttcattcaatgcgaaaggtcaaaggcacatcagtttctttaataatgcaaacctcagcacacattatcagtgtcctcattattattgccttgtttatttcccactgctcattgataatttcaacgtgaaatttacctgtattgctgcatgcatcttgcagtttaagaagtgaagtaacccaatttcaaagctagtgctttagggaaaatattggattgtatttacttcaagcagagttcgataatttatgtacataataaaaattttaaatcccttagttaatatagcagttgccaaaactgggctattatcattctaaactaccaacccaaatggtagtgggtatctaatctacctctagaaagaaaatggactgtatttgctctatgtatttttcttgtacagcttgccatcgagacatttataaaggagttgatatgagaggagtcaattttaatgtgtctaaggttagcagtgttgaagaatgccaaaaaaggtgcaccagtaacattcgctgccagtttttttcatatgccacgcaaacatttcacaaggcagagtaccggtgagtacaattcaaggtgtgtgttctttgtattggtgcctccaggatttcactgtattcttcttaacctcttttgttcccaaactaaaaaccaaacagggcttttattctaaccactttcctcatttacttactctattttatttttttatcttttatttatttatttatttattgagatggagtcgcgctctgtcgcccaggctagagtgcagtggcgtaatctcgactcactacaacctccgcttcccgggttcaagcgattctcctgcctcagcctcccgagtagctgggattacaggcgtccgccaccatgcctggctaatttttgtatttttagtagagtcggggttttactatgttggtcaggctggtctcgaactcctgatcttgtgatccacccacctcagcctcccaaagcgctgggattacaggcatgagccactgcgcctcgcccttcattttttaattaaataattcatttaatttcatttgtttctctactcttttcccctggcatgtaattgtaccgcatcttcaaagcctgacatcctcttcccctacttctccaaagctgattcttgcaggtctttcctcaaataccgtcccctccaaaagcccatttctgagcattctcttttaagtcacactcagctctgtttatttcattcatagagctaatcacaatttgatattaacttgtgatttttttccttatttttaaatcttatttttatttgcatagatgtatggggtacaagtgtaattttgttactttgatgtattttacagtggtaaagtctgggcttttggtatatccatcactggagtcatgtacattgtacccactaagctatttttcaacgcccgcccccttcccacctctctgtcaccttcccagtctctactgtctatcgctccatgctctactcaattttggtgtcattttttcctgaagcaaaattttggtgtcattttttctgaagtcattttctgaagtctgtgtcatttttcgctttcctgaagcgaattttggtgtcatttttcctgaagttccgtttgccccacacataggccttgcttatagaatgagggtttagtgtcacggagtctcctgcctcattctcaccctaacttttcctttacccctttgcgaggggaaggatgtccattaggttaataatgcagacccctaacccactcattatcagggtcattgtttttccactgtgcattttaatactaactgttacctgcactgctccctgcccctcaaagtgcagaaagcaaagtaacctcttttcttcccattcaggaacaattgcctattaaagtacagtcccggaggaacacctaccgctata

SEQ ID NO: 12717 - DNA, 569 bp, Homo sapiens
agtgccacattagaacagcttgaagaccgttcatttttaagtgacaagagactcacctccaagaagcaattgtgttttcagtttcctgtggatgtctgactcaactctatgaaaacgccttcttcagaggtggggatgtagcttccatgtacaccccaaatgcccaatactgccagatgaggtgcacattccacccaaggtgtttgctattcagttttcttccagcaagttcaatcaatgacatggagaaaaggtttggttgcttcttgaaagatagtgttacaggaaccctgccaaaagtacatcgaacaggtgcagtttctggacattccttgaagcaatgtggtcatcaaataagtgcttgccatcgagacatttataaaggagttgatatgagaggagtcaattttaatgtgtctaaggttagcagtgttgaagaatgccaaaaaaggtgcaccagtaacattcgctgccagtttttttcatatgccacgcaaacatttcacaaggcagagtaccggaacaattgcctattaaagtacagtcccggaggaacacctaccgctata

SEQ ID NO: 12718 - DNA, 1132 bp, Homo sapiens
gtggcttgatttacatttaatctctgcaatttattagagtcctgtagttggatttactttgaagagagtttcccagaagaataaaatttgctgcgttgctttttgggtgtgagctgcttttgtatttgcctaatgcctttaatgcaaatttctttctttctctcttgcttttttttaaaaaaaatagaaatgtttgtcttcttaaaacatctgaaagtggcacaccaagttcctctactcctcaagaaaacaccatatctggatatagccttttaacctgcaaaagaactttacctggtaatgtgatttgataataatattacataaaatgtaacctatttcatgacttttaacagcaacagtgatgaaacaatcctcaaggtaacagaaacttgtgtaaatgtcgttcattgcttttcccatctgatatctttttgtgtttataattgacacagaaccctgccattctaaaatttacccgggagttgactttggaggagaagaattgaatgtgacttttgttaaaggagtgaatgtttgccaagagacttgcacaaagatgattcgctgtcagtttttcacttattctttactcccagaagactgtaaggaagagaagtaaaggaaattttatttttcaaagacagttgacatgaccatttcatattctctttccccctgtgaaggcttactctttctactgttcatttcatctaggtgtaagtgtttcttaagattatctatggatggttctccaactaggattgcgtatgggacacaagggagctctggttactctttgagattgtgtaacactggggacaactctggtgagtaacctcactttttcgtggacctgtcagggatgtctgtcatgttgatagtttgcttagtcttaaggaattatgtgtcttgttctccttggttagaagggactttgattcacttctaattccaaccattagcgtcaacgctctcttttcagtctgcacaacaaaaacaagcacacgcattgttggaggaacaaactcttcttggggagagtggccctggcaggtgagcctgcaggtgaagctgacagctcagaggcacctgtgtggagggtcactcataggacaccagtgggtcctca

SEQ ID NO: 12719 - DNA, 720 bp, Homo sapiens
gtggcttgatttacatttaatctctgcaatttattagagtcctgtagttggatttactttgaagagagtttcccagaagaataaaatttgctgcgttgctttttgggtgtgagctgcttttgtatttgcctaatgcctttaatgcaaatttctttctttctctcttgcttttttttaaaaaaaatagaaatgtttgtcttcttaaaacatctgaaagtggcacaccaagttcctctactcctcaagaaaacaccatatctggatatagccttttaacctgcaaaagaactttacctgaaccctgccattctaaaatttacccgggagttgactttggaggagaagaattgaatgtgacttttgttaaaggagtgaatgtttgccaagagacttgcacaaagatgattcgctgtcagtttttcacttattctttactcccagaagactgtaaggaagagaagtgtaagtgtttcttaagattatctatggatggttctccaactaggattgcgtatgggacacaagggagctctggttactctttgagattgtgtaacactggggacaactctgtctgcacaacaaaaacaagcacacgcattgttggaggaacaaactcttcttggggagagtggccctggcaggtgagcctgcaggtgaagctgacagctcagaggcacctgtgtggagggtcactcataggacaccagtgggtcctca

SEQ ID NO: 12720 - DNA, 2058 bp, Homo sapiens
tcacctccaagaagcaattgtgttttcagaatgattttattcaagcaagcaacttatttcatttccttgtttgctacagtttcctgtggatgtctgactcaactctatgaaaacgccttcttcagaggtggggatgtagcttccatgtacaccccaaatgcccaatactgccagatgaggtgcacattccacccaaggtgtttgctattcagttttcttccagcaagttcaatcaatgacatggagaaaaggtttggttgcttcttgaaagatagtgttacaggaaccctgccaaaagtacatcgaacaggtgcagtttctggacattccttgaagcaatgtggtcatcaaataagtgcttgccatcgagacatttataaaggagttgatatgagaggagtcaattttaatgtgtctaaggttagcagtgttgaagaatgccaaaaaaggtgcaccagtaacattcgctgccagtttttttcatatgccacgcaaacatttcacaaggcagagtaccggaacaattgcctattaaagtacagtcccggaggaacacctaccgctataaaggtgctgagtaacgtggaatctggattctcactgaagccctgtgccctttcagaaattggttgccacatgaacatcttccagcatcttgcgttctcagatgtggatgttgccagggttctcactccagatgcttttgtgtgtcggaccatctgcacctatcaccccaactgcctcttctttacattctatacaaatgtatggaaaatcgagtcacaaaggcgagtatgcatggaaaatcgcatcacaaagaaatgtttgtcttcttaaaacatctgaaagtggcacaccaagttcctctactcctcaagaaaacaccatatctggatatagccttttaacctgcaaaagaactttacctgaaccctgccattctaaaatttacccgggagttgactttggaggagaagaattgaatgtgacttttgttaaaggagtgaatgtttgccaagagacttgcacaaagatgattcgctgtcagtttttcacttattctttactcccagaagactgtaaggaagagaagtgtaagtgtttcttaagattatctatggatggttctccaactaggattgcgtatgggacacaagggagctctggttactctttgagattgtgtaacactggggacaactctgtctgcacaacaaaaacaagcacacgcattgttggaggaacaaactcttcttggggagagtggccctggcaggtgagcctgcaggtgaagctgacagctcagaggcacctgtgtggagggtcactcataggacaccagtgggtcctcactgctgcccactgctttgatgggcttcccctgcaggatgtttggcgcatctatagtggcattttaaatctgtcagacattacaaaagatacacctttctcacaaataaaagagattattattcaccaaaactataaagtctcagaagggaatcatgatatcgccttgataaaactccaggctcctttgaattacactgaattccaaaaaccaatatgcctaccttccaaaggtgacacaagcacaatttataccaactgttgggtaaccggatggggcttctcgaaggagaaaggtgaaatccaaaatattctacaaaaggtaaatattcctttggtaacaaatgaagaatgccagaaaagatatcaagattataaaataacccaacggatggtctgtgctggctataaagaagggggaaaagatgcttgtaagggagattcaggtggtcccttagtttgcaaacacaatggaatgtggcgtttggtgggcatcaccagctggggtgaaggctgtgcccgcagggagcaacctggtgtctacaccaaagtcgctgagtacatggactggattttagagaaaacacagagcagtgatggaaaagctcagatgcagtcaccagcatgagaagcagtccagagtctaggcaatttttacaacctgagttcaagtcaaattctgagcctggggggtcctcatctgcaaag

SEQ ID NO: 12721 - DNA, 2317 bp, Homo sapiens
ttagtgaagattgtgaagtggcaggttacagagttctaaaaggcactgaagccgtcatcattccctatgcattgcacagagatccgagatacttccccaaccccgaggagttccagcctgagcggttcttccccgagaatgcacaagggcgccatccatatgcctacgtgcccttctctgctggccccaggaactgtataggatgtctgactcaactctatgaaaacgccttcttcagaggtggggatgtagcttccatgtacaccccaaatgcccaatactgccagatgaggtgcacattccacccaaggtgtttgctattcagttttcttccagcaagttcaatcaatgacatggagaaaaggtttggttgcttcttgaaagatagtgttacaggaaccctgccaaaagtacatcgaacaggtgcagtttctggacattccttgaagcaatgtggtcatcaaataagtgcttgccatcgagacatttataaaggagttgatatgagaggagtcaattttaatgtgtctaaggttagcagtgttgaagaatgccaaaaaaggtgcaccagtaacattcgctgccagtttttttcatatgccacgcaaacatttcacaaggcagagtaccggaacaattgcctattaaagtacagtcccggaggaacacctaccgctataaaggtgctgagtaacgtggaatctggattctcactgaagccctgtgccctttcagaaattggttgccacatgaacatcttccagcatcttgcgttctcagatgtggatgttgccagggttctcactccagatgcttttgtgtgtcggaccatctgcacctatcaccccaactgcctcttctttacattctatacaaatgtatggaaaatcgagtcacaaagaaatgtttgtcttcttaaaacatctgaaagtggcacaccaagttcctctactcctcaagaaaacaccatatctggatatagccttttaacctgcaaaagaactttacctgaaccctgccattctaaaatttacccgggagttgactttggaggagaagaattgaatgtgacttttgttaaaggagtgaatgtttgccaagagacttgcacaaagatgattcgctgtcagtttttcacttattctttactcccagaagactgtaaggaagagaagtgtaagtgtttcttaagattatctatggatggttctccaactaggattgcgtatgggacacaagggagctctggttactctttgagattgtgtaacactggggacaactctgtctgcacaacaaaaacaagcacacgcattgttggaggaacaaactcttcttggggagagtggccctggcaggtgagcctgcaggtgaagctgacagctcagaggcacctgtgtggagggtcactcataggacaccagtgggtcctcactgctgcccactgctttgatgggcttcccctgcaggatgtttggcgcatctatagtggcattttaaatctgtcagacattacaaaagatacacctttctcacaaataaaagagattattattcaccaaaactataaagtctcagaagggaatcatgatatcgccttgataaaactccaggctcctttgaattacactgaattccaaaaaccaatatgcctaccttccaaaggtgacacaagcacaatttataccaactgttgggtaaccggatggggcttctcgaaggagaaaggtgaaatccaaaatattctacaaaaggtaaatattcctttggtaacaaatgaagaatgccagaaaagatatcaagattataaaataacccaacggatggtctgtgctggctataaagaagggggaaaagatgcttgtaagggagattcaggtggtcccttagtttgcaaacacaatggaatgtggcgtttggtgggcatcaccagctggggtgaaggctgtgcccgcagggagcaacctggtgtctacaccaaagtcgctgagtacatggactggattttagagaaaacacagagcagtgatggaaaagctcagatgcagtcaccagcatgagaagcagtccagagtctaggcaatttttacaacctgagttcaagtcaaattctgagcctggggggtcctcatctgcaaagcatggagagtggcatcttctttgcatcctaaggacgaaaaacacagtgcactcagagctgctgaggacaatgtctggctgaagcccgctttcagcacgccgtaaccaggggctgacaatgcgaggtcgcaactgagatctccatgactgtgtgttgtgaaataaaatggtgaaagat

SEQ ID NO: 12722 - DNA, 2175 bp, Homo sapiens
agaacagcttgaagaccgttcatttttaagtgacaagagactcacctccaagaagcaattgtgttttcagtttcctgtgagggagttttctctgtgtccccacaaggcatgattctgggtctatggtgacttaagagggccacacaacaatgagtatttaattttcctcagatgtatggctacaataaacatctataggatgtctgactcaactctatgaaaacgccttcttcagaggtggggatgtagcttccatgtacaccccaaatgcccaatactgccagatgaggtgcacattccacccaaggtgtttgctattcagttttcttccagcaagttcaatcaatgacatggagaaaaggtttggttgcttcttgaaagatagtgttacaggaaccctgccaaaagtacatcgaacaggtgcagtttctggacattccttgaagcaatgtggtcatcaaataagtgcttgccatcgagacatttataaaggagttgatatgagaggagtcaattttaatgtgtctaaggttagcagtgttgaagaatgccaaaaaaggtgcaccagtaacattcgctgccagtttttttcatatgccacgcaaacatttcacaaggcagagtaccggaacaattgcctattaaagtacagtcccggaggaacacctaccgctataaaggtgctgagtaacgtggaatctggattctcactgaagccctgtgccctttcagaaattggttgccacatgaacatcttccagcatcttgcgttctcagatgtggatgttgccagggttctcactccagatgcttttgtgtgtcggaccatctgcacctatcaccccaactgcctcttctttacattctatacaaatgtatggaaaatcgagtcacaaagaaatgtttgtcttcttaaaacatctgaaagtggcacaccaagttcctctactcctcaagaaaacaccatatctggatatagccttttaacctgcaaaagaactttacctgaaccctgccattctaaaatttacccgggagttgactttggaggagaagaattgaatgtgacttttgttaaaggagtgaatgtttgccaagagacttgcacaaagatgattcgctgtcagtttttcacttattctttactcccagaagactgtaaggaagagaagtgtaagtgtttcttaagattatctatggatggttctccaactaggattgcgtatgggacacaagggagctctggttactctttgagattgtgtaacactggggacaactctgtctgcacaacaaaaacaagcacacgcattgttggaggaacaaactcttcttggggagagtggccctggcaggtgagcctgcaggtgaagctgacagctcagaggcacctgtgtggagggtcactcataggacaccagtgggtcctcactgctgcccactgctttgatgggcttcccctgcaggatgtttggcgcatctatagtggcattttaaatctgtcagacattacaaaagatacacctttctcacaaataaaagagattattattcaccaaaactataaagtctcagaagggaatcatgatatcgccttgataaaactccaggctcctttgaattacactgaattccaaaaaccaatatgcctaccttccaaaggtgacacaagcacaatttataccaactgttgggtaaccggatggggcttctcgaaggagaaagggagattcaggtggtcccttagtttgcaaacacaatggaatgtggcgtttggtgggcatcaccagctggggtgaaggctgtgcccgcagggagcaacctggtgtctacaccaaagtcgctgagtacatggactggattttagagaaaacacagagcagtgatggaaaagctcagatgcagtcaccagcatgagaagcagtccagagtctaggcaatttttacaacctgagttcaagtcaaattctgagcctggggggtcctcatctgcaaagcatggagagtggcatcttctttgcatcctaaggacgaaaaacacagtgcactcagagctgctgaggacaatgtctggctgaagcccgctttcagcacgccgtaaccaggggctgacaatgcgaggtcgcaactgagatctccatgactgtgtgttgtgaaataaaatggtgaaagatc

SEQ ID NO: 12723 - DNA, 1971 bp, Homo sapiens
gctgcaacctacggggtgtacttgggaacgaggggtgaagcggcccaggtgaggctcgccatggccaaacagctgcaggcccgaaggctagacgggatcgactacaacccctgggtggagtttgtgaaactggccagtgagcatgacgtcgtgaacttgggccagggcttcccggatttcccaccaccagactttgccgtggaagcctttcagcacgctgtcagtggagacttcatgcttaaccagtacaccaagacatttggttacccaccactgacgaagatcctggcaagtttctttggggagctgctgggtcaggagatagacccgctcaggaatgtgctggtgactgttggtggctatggggccctgttcacagccttccaggccctggtggacgaaggagacgaggtcatcatcatcgaacccttttttgactgctacgagcccatgacaatgatggcagggggtcgtcctgtgtttgtgtccctgaagccgggtcccatccagaatggagaactgggttccagcagcaactggcagctggaccccatggagctggccggcaaattcacatcacgcaccaaagccctggtcctcaacacccccaacaaccccctgggcaaggtgttctccagggaagagctggagctggtggccagcctttgccagcagcatgacgtggtgtgtatcactgatgaagtctaccagtggatggtctacgacgggcaccagcacatcagcattgccagcctccctggcatgtgggaacggaccctgaccatcggcagcgccggcaagaccttcagcgccactggctggaaggtgggctgggtcctgggtccagatcacatcatgaagcacctgcggaccgtgcaccagaactccgtcttccactgccccacgcagagccaggctgcagtagccgagagctttgaacgggagcagctgctcttccgccaacccagcagctactttgtgcagttcccgcaggccatgcagcgctgccgtgaccacatgatacgtagcctacagtcagtgggcctgaagcccatcatccctcagggcagctacttcctcatcacagacatctcagacttcaagaggaagatgcctgacttgcctggagctgtggatgagccctatgacagacgcttcgtcaagtggatgatcaagaacaagggcttggtggccatccctgtctccatcttctatagtgtgccacatcagaagcactttgaccactatatccgcttctgttttgtgaaggatgaagccacgctccaggccatggacgagaagctgcggaagtggaaggtggaactctagccctgaagtcacgccttggccctgacatccccacatgcccgcagagatcctctttgagtgtctgtctttgtccaggtttcagacatttctaggttggggaagatgctattgggaaacctcttctccgtgacacagaatgttctgggtgggagccgcccttcttcatcttagagaaccaagtgcctcctgtctgaaaggtgagggtggcctgacctgggcctctccctgcccctccataggtgggtttgtagggtcttgtgttgcttctggtctctccaggcttggctgagacggacggtagacttccaccatgtaccgatcacatcccagctctgcatggcccctgctaaggctcaggtataacctcaccttccctggctcatcttggccttggggagttgcctttaggcttgagtcctcaagcctctccttttcgtccataataaaatgtttaagttattaagatccttattgacggcttctctctgcttcacactcatgctgatggctgatctaacttgtgaagaatgcccagaagaacctcagacacccccacaactttgtacaaatggttactgtagtcacatagtggcacaaccaggcctagcacccaaggccctcaaatgaattcctcactattaa

SEQ ID NO: 12724 - DNA, 1623 bp, Homo sapiens
ttgggaacgaggggtgaagcggcccaggtgaggctcgccatggccaaacagctgcaggcccgaaggctagacgggatcgactacaacccctgggtggagtttgtgaaactggccagtgagcatgacgtcgtgaacttgggccagggcttcccggatttcccaccaccagactttgccgtggaagcctttcagcacgctgtcagtggagacttcatgcttaaccagtacaccaagacatttgtcatcatcatcgaacccttttttgactgctacgagcccatgacaatgatggcagggggtcgtcctgtgtttgtgtccctgaagccgggtcccatccagaatggagaactgggttccagcagcaactggcagctggaccccatggagctggccggcaaattcacatcacgcaccaaagccctggtcctcaacacccccaacaaccccctgggcaaggtgttctccagggaagagctggagctggtggccagcctttgccagcagcatgacgtggtgtgtatcactgatgaagtctaccagtggatggtctacgacgggcaccagcacatcagcattgccagcctccctggcatgtgggaacggaccctgaccatcggcagcgccggcaagaccttcagcgccactggctggaaggtgggctgggtcctgggtccagatcacatcatgaagcacctgcggaccgtgcaccagaactccgtcttccactgccccacgcagagccaggctgcagtagccgagagctttgaacgggagcagctgctcttccgccaacccagcagctactttgtgcagttcccgcaggccatgcagcgctgccgtgaccacatgatacgtagcctacagtcagtgggcctgaagcccatcatccctcagggcagctacttcctcatcacagacatctcagacttcaagaggaagatgcctgacttgcctggagctgtggatgagccctatgacagacgcttcgtcaagtggatgatcaagaacaagggcttggtggccatccctgtctccatcttctatagtgtgccacatcagaagcactttgaccactatatccgcttctgttttgtgaaggatgaagccacgctccaggccatggacgagaagctgcggaagtggaaggtggaactctagccctgaagtcacgccttggccctgacatccccacatgcccgcagagatcctctttgagtgtctgtctttgtccaggtttcagacatttctaggttggggaagatgctattgggaaacctcttctccgtgacacagaatgttctgggtgggagccgcccttcttcatcttagagaaccaagtgcctcctgtctgaaaggtgagggtggcctgacctgggcctctccctgcccctccataggtgggtttgtagggtcttgtgttgcttctggtctctccaggcttggctgagacggacggtagacttccaccatgtaccgatcacatcccagctctgcatggcccctgctaaggctcaggtataacctcaccttccctggctcatcttggccttggggagttgcctttaggcttgagtcctcaagcctctccttttcgtccataataaaatgtttaagttattaaga

SEQ ID NO: 12725 - DNA, 9158 bp, Homo sapiens
ggtggctgagaagaatgttggatccccagctccacggcccaccagccatctgggactggcaaacccacaggaacggaaggttcctcagggaccacaaagcccatgtgaggtccctgctgctgaagggattctgaggacaggaggagccaaattacctatccagggtcacccagccaaggtgggttaggacctgagtttggtggctctcaggtctggccaatttctttctttctttttttttttttttttttttttttggtagagtcttgctcgttgggtcgggcaggagtgcagtggctggcacgatcttggcccactgcaatctccatctcccaggttcaagtgattctcaggcctcagcctcctgagtagctgggattacaggcatgtgtcatgacgcccagataagtttctttgtttgtttttcccagactgagtttcactctaatgctcaggctggagtgcagtggtgtgctcttgcctcactgcaatgtctgcctcccaggttcaagtgattcttgtgcctcagcctcccaagtagctgggataacaggtgcgtgctaccacgcccagctaatttttgtatttttagtagagatgggggtttcaccatgttggccaggctggtctcgaactcctgacctcaggtgatctgcccgcctcagcctcccaaagtgctgggattacaggcgtgagccactgtgcccagcccctggccagtttctgcacaccagtggctgaggagggagctggcctgggaggaacaccgggaggggaggggcgagccaggagccaggaccccgggaccctccgaggagcggattagtgcctccctcagagttaggacatggccttgggtccaacaggcctaagtctgagtgtgtgtgttgtgtggccttaaacacatcactccccctcctgcaccctccagcctctgttttccaccttctgttttctcattgataagataggcctgaccaggtcattcagggaatgaaatggaagtgcttagcaagacctctgtaagtggaggctgctgctgtcactgttgccattatcctccctctccgctccacccacctcctgctcctcttctttaaccctcagcccttcctgagtcagactttaacctggccaagtcagggctctgtctcaggacgcatggagccagggctggaagtctccactgggcaggcgccaggcagcccctgcaggttggggaggtggaggctgctggagtcaagaggaaccaggtgagggtgttggagcataacaggcttgggaggcaggcagaaacctgcccttctgcaaactctatctcttccccctcctgggagcagacaggatggcgctgtggcctgaaagcagctgtccctcctgtgtgcaagctcggactgctgcacccagacagattccatctctgaccttccacttgttcgtctccagctcgccatggccaaacagctgcaggcccgaaggctagacgggatcgactacaacccctggtgagccagctgggctggggaggtgtgtgggtgtcccctcgggcatgggttggccatccctgggtttacagcaactcagtagtactccagatggtggcggtacacagactgccagattccagccatagctcaggagagacagggcccgagggagtaggcttggttcaaatctcagctttcttctgcatgactgtgccactaggacaggtgacatacctgctctgagcctcatctccccagctgcaaaatgaagagttatacccacctggagagcgttggggaggaaaaagtaaaatgctgtccaaagccattctacccaggcaccaagctaaggcctttccagggatgactctttctcacttggtatagagtcagataaactaagataagtaaaataagcaagtaagatacagtcagctcttcaccagacatttgcagaggttgatattgttttcttttttgacttgttttattttcattttatttttgagacggagttttgcccttgtcgcccaggctggagtgcaatggtgcggtctcggctcactgcaacctctgcctcctgggttcaaatgattctcctgcttcagcctccaagtagctgggattacaggcgtgcaacacaacgcccagctaattttttttctttttcttttcccccgcaagacagaatcttactctgtcacccaggctggagtgcagtggcatgatctcggctcactgcaacctccccctcacaggttcaagcaattctcctgcctcagcctcccaagtagctgggattacaggcgtgcgccaccacgcccagctaattttttttttttttttgtatttttagtagagatgagatttcaccatgtttgccaggctggtctcgaactcctgacctcgtgatccacccgcctcagcctcccaaagtactgggattacaggcatgagccactgtgcctggccctaatttttatatctttagagaaaatggggtttcagcatgttgtccaggctggtctcaaactcctgacctcaagggatctgccctcctcggccttccaaagtgctggggaatacaggcataagccaccgggcccagccaaaaatgacacattttagacatatttattggtatgcaaattcaactcagccaggtcttcactctgctccaaactagccccaaaccacataccagcctcttcatccagcttcccagcctttctcccacctggagaggtggcccccaggcagggccagaacagaggattatgggtccagagatgatgtgtgcctgggctggtggggccctgttctgcccagagtagggtcaagagcatcaaactttgcttgagatggaagtagaaaggctggctggctgtgccttgtactagctgggaggctttaggcaagtcactccactccttatccccacagtggtccaggaacaagatgtgcctcacaggccattgtgaaggctatatgagcagagcgtttaactgtggtgttgacgaatccaaggaggagtcatgcaatctgtacagggggtctcaactagtatttggaaagaatagagtaggataggacaggacagaaaatactgcagtagattgcaccaagaaggatgaagcttccattccatgtttgtgctccacagggttgatgatgcaaaggtgatttcttggccggtagtggtggctcacgcctgtactgctagcactttgagaggccaaggggggcggtggatcacctgaggtcaggagttcgagaccagcctggccaacatagcaaaaccccatctgtactaaaaatacaaaaattagctgggcgtggtggcgggtgcctgtaatcccagctactcaggaggctgaggcatgagaatcgcttgacctcgggaggcggaggttgcagtgagttgagattgcaccactgcactccagcctaggggatagagcgaaactctgtcaaaaaaaaaaaaaaaagatgatttcttcctatgggtcatggtggaagaacttggaaagcccctgggctgattcctgcgattaacaatgtgcctgactgacctaatctcaatgtaggggaccagctgtgacacttaggcagatcttcaggccaggacagttgctgattgtctagtttttgtttttcttgtgtgtgtatgtgtgtgttttttgttttttgtttttgtttttttaagacagaatctcactcttgttatccaggctgcagtgcaatggtgcgatctcggctcacttcaacctccggttcccgggttcaagtgattcttctgcctcagccttccaagtagctgggattacaggcccctgccaccatgcctgactaacttttgtatttttagtgaagacagagtttcaccatgttggccaggctggtctcaaactcctgacctcaggtgatccgcccacctcggcctcccaaagtgctgggattacaggcgtgagccaccacacctggccggttgtccagtttttctaaacaggccgaagtccaggtcaccatggagggctgggctggtgctgattctccatttgttacccagggtggagtttgtgaaactggccagtgagcatgacgtcgtgaacttgggccagggcttcccggatttcccaccaccagactttgccgtggaagcctttcagcacgctgtcagtggagacttcatgcttaaccagtacaccaagacatttgtgagtctccccatctctcgtggaggcactgggggaggaaggggacagggctttctggacttcaagcccacacagctgtcaggcttcaggggacagagccaggggattctgtatgaccatagttcagtgtttactgagcgtatcctctgtcccagagccttcgcctcgtggtctagtggggatggcagacaagaagccagtaacgacaggcagttgatacatgatgtgatggaggaggatgggatatcgtgcgagtaagaaagagggaatgaaacctggggagggggctggagagatgcacgaagacttcctggaggaggtgacacttaaaccaagtcctgaaagatgagctactggttggattacacaataaatccaaacgttttccggaaaggaccacatagtaaatatgtgacactgcttggattagaacagtggttctttttttctttttcttttttgagacaaggtctcactctgttatccaggctggagtgcaatggtgcgatcatggtccactgcagccttgaccctgccagtctcaagtggtcctcccacctcagcctctggagtaactgggactacaggtgtgcatcaccatgcccagctaattttatttatatatttatttatttatttttgagtcagggtctcactcctgtcacctaggctagagtgtagtgacatgatcacggctcactgcagcctgtacctcatggggctcacatgatatgccatttcctggggctcatgtgatcctcccacctcagcctctagagttgctgggacaacaggggcatgccacctcacccagctaatttagagacagggtttcaccatgttgctcagactggtctgaaactcctgggctcaagtgatcctgccacctcggcctccaaaagtgctgggattacaggcgtgagccactgaaccctcattctttttttttttttttttttgagatggagtctccctctgtcgccaggctggagtgcaggggcgcaatctcggctcactgcaacctccccctcccaggttcaagagattctcctgcctcagcctcccgagtagctgggactataggggtgcgcccccacgcccagctaatttttgttttgttttttttttaagacagtctcgcactgtcgccccggctggagtctggagtgcagcggcacgatctcggctcactgcaacctccgcctccgcctccgcctccgcctcctgggttcaagccattctcctgcctcagcctcttgagtagttgggattacaggcgcccgccaccatgcccagctaatttttgtatttttagtagagacggggtttcaccatgttggccaggctggtctcaaactcccgacctcgtgattcgcctgcctcggcctcccaaagtgctgggattacaggcgtgagccaccgcacctggccattttttgtatttttagtggatactgggtttcaccatgttagtccggttggtctcgatctcttgacctcgtgatccacccacctcagcctcccagagtgctgggattacaggcgtgagccaccgcacccgaccgcactcgttctttttaatggctgcatactgttctgttgcctggatgtgccataatttatttaagcagttctgcactgatggactgcttctgctatctcaatatcataagcaatgccacagcaaatatccctgtgtggacatctttgtatacatatgtatttctctaagataaattcctggaggtaaaactagcaaaagaaagactataaatatttataaatacaataggtggatattgttaagaaacagtgtgtgcctataatcccagctacttgggagtctgaggcaggaagattgtttgagcccaggagtttgaggccagtgcaacatagtgagatcctgtctgaaaaataaacaaacaactaagtaaataattgccctccagtaaggtttactcatttacatccctgccaataggctggtctcagagctggttggaaagttccttctttgatccaaaaaaaaaaaaaatcatttgggtatgtatctttttcttttctttctttctttcttttttttttcttttaactagagacaaaagctgggtatggtggctcacgcctataatcccagcattctgggaggctaaggctggcagatcacctgaggtcaggagttcaagaccagcctgcccaacatggtgagatcccatctctaataaaaattagctgggcgtggtggtgggtgcctgtaatcccaactacttgggaggctgaggcacaagaatcgcttgaacccgggaggcggaggttgcagtgggccgaggtggtgccattgcactccagcctgggtgacaacaacaacaacaacaacaaaatagagacagggtctccttatgttacccaggctggtctcaaactcctgggctcaagcaatcctcccaccttagcctcccaaagtgctgggttacaggcatgagccactgtgcccagcctcattaaatattttacctctttcttgtatgttgcaatatttttctcttcctgttttgaccttgctcatggtgccttttatttttatttaattaattaatttattgtctaagacagagtctcagttttattacccagactggtgtgatcataactcacttcagccttgatctcctgggctcaagcaatcctcctgcctcagcctcccgagtacctgggactacaggcacgtgatactacacctggataatttttttgattttccatcagtagagacagagtccctctgtgttgcccaggctgttctcaaactcctggcctcaagcaaccctcccgcctcatactcccaaatgctaggattacaggcgtgagccacggtgcctggcctgtgcctcttgttgtacagaaaatttttatatttgtgtggccaaatctggtttagtgagttactgagttgagttctagataaagtttcaatcacttggcttagccttgagtatttttgttttgttttgtttgtttttgttttttttgagacggagtctcgctctgtcgcccaggctggagtgcagtggcgcgatctcggctcactgcaagctccgcctcccgggttcacgccattcttctgcctcagcctcccgagtagagctgggactacaggtgcccgccaccatgccagctaattttttgtatttttagtagagacggggtttcaccttgagtattttataagtgtcctcagcaaacaagtttctggatctaatcttcctctcaaaaaggggtgcttacaaagctgcaacatgaggttcctgactgtcaactgtgtgtgactttagacaagtaatttcttctctctgggtctctatttttctacctgtcaaatagtgggcatcaggccaggcacggtggctcacatctgtaatcccagcactttgggaggccaaagcaggcagattacccaaggtcagaagttcgaaaccagtctggccaacatggtgaaaccccgtctccactaaaaatacaaaaattaaccaggcatggtggtgcgtgcctgtagtcccagctacttgggaggctgaggcaggagaatcacttgaacccaggaggcggaggttgcagggagccgcgattgtgccactgcactccagcctgggtgacatgagtgagaccctgtctcaaaataaataaataaataaataaataaataaataaataaataaaagcctctcccgcaaagctgctgggaggatcaagtgggcacaaacatgcttcttaaacttacagatgtggaaagtggggagtttctactgccttgtgggctcttggactgaggttcatggaggcaagcacttcctctggttctctgctaaatccccgccctgggcttcgggcctggcacagaacaggccctgtggcaaatgctggtggaggagatggaagagcttagcactggatatctgagtcagtgcaggcctggtggttggcaccctggagtctgggaccatatagattgtgtgacctttacctcccagagtacacaggatcacaatagcacctgcctctgggttgttgagaggatgagatcaaagaaatcccacaaatagcttggtgtgtagaggaatccagagtgttgaaagctgatctattccacgtcccctggggcccaggctaccagtacctgactttgcccccaggcctgctgctggaaggtgctagaattgcctggatacagctgggccggaggatgggcccaggctgagctggacagttaacccctgctgtcctggcagggttacccaccactgacgaagatcctggcaagtttctttggggagctgctgggtcaggagatagacccgctcaggaatgtgctggtgactgttggtggctatggggccctgttcacagccttccaggccctggtggacgaaggagacgaggtgagtgggcaagacttgggctgagtgggactgagaggtcagggccatgctgactccagctgatttgacccttatatcaggtcatcatcatcgaacccttttttgactgctacgagcccatgacaatgatggcagggggtcgtcctgtgtttgtgtccctgaagccggtaaggatgctaggtagaggatggatgggcagagggatccaaggcgtgggctgagttggaccctgggagttggaaaaggaggaaagaagtgaaggaagccagttcctctaagctgggagggcagaggggaggtgtgtgtgttgggatcccaggggagagaaggtggggatagatgctggggaagacctgcatgtcaggtggttaagtggtaccaccccatgccacctgctcttgcagggtcccatccagaatggagaactgggttccagcagcaactggcagctggaccccatggagctggccggcaaattcacatcacgcaccaaagccctggtcctcaacacccccaac

SEQ ID NO: 12726 - DNA, 736 bp, Homo sapiens
ggtggctgagaagaatgttggatccccagctccacggcccaccagccatctgggactggcaaacccacaggaacggaaggttcctcagggaccacaaagcccatgtgaggtccctgctgctgaagggattctgaggacaggaggagccaaattacctatccagggtcacccagccaagctcgccatggccaaacagctgcaggcccgaaggctagacgggatcgactacaacccctgggtggagtttgtgaaactggccagtgagcatgacgtcgtgaacttgggccagggcttcccggatttcccaccaccagactttgccgtggaagcctttcagcacgctgtcagtggagacttcatgcttaaccagtacaccaagacatttggttacccaccactgacgaagatcctggcaagtttctttggggagctgctgggtcaggagatagacccgctcaggaatgtgctggtgactgttggtggctatggggccctgttcacagccttccaggccctggtggacgaaggagacgaggtcatcatcatcgaacccttttttgactgctacgagcccatgacaatgatggcagggggtcgtcctgtgtttgtgtccctgaagccgggtcccatccagaatggagaactgggttccagcagcaactggcagctggaccccatggagctggccggcaaattcacatcacgcaccaaagccctggtcctcaacacccccaac

SEQ ID NO: 12727 - DNA, 7134 bp, Homo sapiens
gccatggccaaacagctgcaggcccgaaggctagacgggatcgactacaacccctggtgagccagctgggctggggaggtgtgtgggtgtcccctcgggcatgggttggccatccctgggtttacagcaactcagtagtactccagatggtggcggtacacagactgccagattccagccatagctcaggagagacagggcccgagggagtaggcttggttcaaatctcagctttcttctgcatgactgtgccactaggacaggtgacatacctgctctgagcctcatctccccagctgcaaaatgaagagttatacccacctggagagcgttggggaggaaaaagtaaaatgctgtccaaagccattctacccaggcaccaagctaaggcctttccagggatgactctttctcacttggtatagagtcagataaactaagataagtaaaataagcaagtaagatacagtcagctcttcaccagacatttgcagaggttgatattgttttcttttttgacttgttttattttcattttatttttgagacggagttttgcccttgtcgcccaggctggagtgcaatggtgcggtctcggctcactgcaacctctgcctcctgggttcaaatgattctcctgcttcagcctccaagtagctgggattacaggcgtgcaacacaacgcccagctaattttttttctttttcttttcccccgcaagacagaatcttactctgtcacccaggctggagtgcagtggcatgatctcggctcactgcaacctccccctcacaggttcaagcaattctcctgcctcagcctcccaagtagctgggattacaggcgtgcgccaccacgcccagctaattttttttttttttttgtatttttagtagagatgagatttcaccatgtttgccaggctggtctcgaactcctgacctcgtgatccacccgcctcagcctcccaaagtactgggattacaggcatgagccactgtgcctggccctaatttttatatctttagagaaaatggggtttcagcatgttgtccaggctggtctcaaactcctgacctcaagggatctgccctcctcggccttccaaagtgctggggaatacaggcataagccaccgggcccagccaaaaatgacacattttagacatatttattggtatgcaaattcaactcagccaggtcttcactctgctccaaactagccccaaaccacataccagcctcttcatccagcttcccagcctttctcccacctggagaggtggcccccaggcagggccagaacagaggattatgggtccagagatgatgtgtgcctgggctggtggggccctgttctgcccagagtagggtcaagagcatcaaactttgcttgagatggaagtagaaaggctggctggctgtgccttgtactagctgggaggctttaggcaagtcactccactccttatccccacagtggtccaggaacaagatgtgcctcacaggccattgtgaaggctatatgagcagagcgtttaactgtggtgttgacgaatccaaggaggagtcatgcaatctgtacagggggtctcaactagtatttggaaagaatagagtaggataggacaggacagaaaatactgcagtagattgcaccaagaaggatgaagcttccattccatgtttgtgctccacagggttgatgatgcaaaggtgatttcttggccggtagtggtggctcacgcctgtactgctagcactttgagaggccaaggggggcggtggatcacctgaggtcaggagttcgagaccagcctggccaacatagcaaaaccccatctgtactaaaaatacaaaaattagctgggcgtggtggcgggtgcctgtaatcccagctactcaggaggctgaggcatgagaatcgcttgacctcgggaggcggaggttgcagtgagttgagattgcaccactgcactccagcctaggggatagagcgaaactctgtcaaaaaaaaaaaaaaaagatgatttcttcctatgggtcatggtggaagaacttggaaagcccctgggctgattcctgcgattaacaatgtgcctgactgacctaatctcaatgtaggggaccagctgtgacacttaggcagatcttcaggccaggacagttgctgattgtctagtttttgtttttcttgtgtgtgtatgtgtgtgttttttgttttttgtttttgtttttttaagacagaatctcactcttgttatccaggctgcagtgcaatggtgcgatctcggctcacttcaacctccggttcccgggttcaagtgattcttctgcctcagccttccaagtagctgggattacaggcccctgccaccatgcctgactaacttttgtatttttagtgaagacagagtttcaccatgttggccaggctggtctcaaactcctgacctcaggtgatccgcccacctcggcctcccaaagtgctgggattacaggcgtgagccaccacacctggccggttgtccagtttttctaaacaggccgaagtccaggtcaccatggagggctgggctggtgctgattctccatttgttacccagggtggagtttgtgaaactggccagtgagcatgacgtcgtgaacttgggccagggcttcccggatttcccaccaccagactttgccgtggaagcctttcagcacgctgtcagtggagacttcatgcttaaccagtacaccaagacatttgtgagtctccccatctctcgtggaggcactgggggaggaaggggacagggctttctggacttcaagcccacacagctgtcaggcttcaggggacagagccaggggattctgtatgaccatagttcagtgtttactgagcgtatcctctgtcccagagccttcgcctcgtggtctagtggggatggcagacaagaagccagtaacgacaggcagttgatacatgatgtgatggaggaggatgggatatcgtgcgagtaagaaagagggaatgaaacctggggagggggctggagagatgcacgaagacttcctggaggaggtgacacttaaaccaagtcctgaaagatgagctactggttggattacacaataaatccaaacgttttccggaaaggaccacatagtaaatatgtgacactgcttggattagaacagtggttctttttttctttttcttttttgagacaaggtctcactctgttatccaggctggagtgcaatggtgcgatcatggtccactgcagccttgaccctgccagtctcaagtggtcctcccacctcagcctctggagtaactgggactacaggtgtgcatcaccatgcccagctaattttatttatatatttatttatttatttttgagtcagggtctcactcctgtcacctaggctagagtgtagtgacatgatcacggctcactgcagcctgtacctcatggggctcacatgatatgccatttcctggggctcatgtgatcctcccacctcagcctctagagttgctgggacaacaggggcatgccacctcacccagctaatttagagacagggtttcaccatgttgctcagactggtctgaaactcctgggctcaagtgatcctgccacctcggcctccaaaagtgctgggattacaggcgtgagccactgaaccctcattctttttttttttttttttttgagatggagtctccctctgtcgccaggctggagtgcaggggcgcaatctcggctcactgcaacctccccctcccaggttcaagagattctcctgcctcagcctcccgagtagctgggactataggggtgcgcccccacgcccagctaatttttgttttgttttttttttaagacagtctcgcactgtcgccccggctggagtctggagtgcagcggcacgatctcggctcactgcaacctccgcctccgcctccgcctccgcctcctgggttcaagccattctcctgcctcagcctcttgagtagttgggattacaggcgcccgccaccatgcccagctaatttttgtatttttagtagagacggggtttcaccatgttggccaggctggtctcaaactcccgacctcgtgattcgcctgcctcggcctcccaaagtgctgggattacaggcgtgagccaccgcacctggccattttttgtatttttagtggatactgggtttcaccatgttagtccggttggtctcgatctcttgacctcgtgatccacccacctcagcctcccagagtgctgggattacaggcgtgagccaccgcacccgaccgcactcgttctttttaatggctgcatactgttctgttgcctggatgtgccataatttatttaagcagttctgcactgatggactgcttctgctatctcaatatcataagcaatgccacagcaaatatccctgtgtggacatctttgtatacatatgtatttctctaagataaattcctggaggtaaaactagcaaaagaaagactataaatatttataaatacaataggtggatattgttaagaaacagtgtgtgcctataatcccagctacttgggagtctgaggcaggaagattgtttgagcccaggagtttgaggccagtgcaacatagtgagatcctgtctgaaaaataaacaaacaactaagtaaataattgccctccagtaaggtttactcatttacatccctgccaataggctggtctcagagctggttggaaagttccttctttgatccaaaaaaaaaaaaaatcatttgggtatgtatctttttcttttctttctttctttcttttttttttcttttaactagagacaaaagctgggtatggtggctcacgcctataatcccagcattctgggaggctaaggctggcagatcacctgaggtcaggagttcaagaccagcctgcccaacatggtgagatcccatctctaataaaaattagctgggcgtggtggtgggtgcctgtaatcccaactacttgggaggctgaggcacaagaatcgcttgaacccgggaggcggaggttgcagtgggccgaggtggtgccattgcactccagcctgggtgacaacaacaacaacaacaacaaaatagagacagggtctccttatgttacccaggctggtctcaaactcctgggctcaagcaatcctcccaccttagcctcccaaagtgctgggttacaggcatgagccactgtgcccagcctcattaaatattttacctctttcttgtatgttgcaatatttttctcttcctgttttgaccttgctcatggtgccttttatttttatttaattaattaatttattgtctaagacagagtctcagttttattacccagactggtgtgatcataactcacttcagccttgatctcctgggctcaagcaatcctcctgcctcagcctcccgagtacctgggactacaggcacgtgatactacacctggataatttttttgattttccatcagtagagacagagtccctctgtgttgcccaggctgttctcaaactcctggcctcaagcaaccctcccgcctcatactcccaaatgctaggattacaggcgtgagccacggtgcctggcctgtgcctcttgttgtacagaaaatttttatatttgtgtggccaaatctggtttagtgagttactgagttgagttctagataaagtttcaatcacttggcttagccttgagtatttttgttttgttttgtttgtttttgttttttttgagacggagtctcgctctgtcgcccaggctggagtgcagtggcgcgatctcggctcactgcaagctccgcctcccgggttcacgccattcttctgcctcagcctcccgagtagagctgggactacaggtgcccgccaccatgccagctaattttttgtatttttagtagagacggggtttcaccttgagtattttataagtgtcctcagcaaacaagtttctggatctaatcttcctctcaaaaaggggtgcttacaaagctgcaacatgaggttcctgactgtcaactgtgtgtgactttagacaagtaatttcttctctctgggtctctatttttctacctgtcaaatagtgggcatcaggccaggcacggtggctcacatctgtaatcccagcactttgggaggccaaagcaggcagattacccaaggtcagaagttcgaaaccagtctggccaacatggtgaaaccccgtctccactaaaaatacaaaaattaaccaggcatggtggtgcgtgcctgtagtcccagctacttgggaggctgaggcaggagaatcacttgaacccaggaggcggaggttgcagggagccgcgattgtgccactgcactccagcctgggtgacatgagtgagaccctgtctcaaaataaataaataaataaataaataaataaataaataaataaaagcctctcccgcaaagctgctgggaggatcaagtgggcacaaacatgcttcttaaacttacagatgtggaaagtggggagtttctactgccttgtgggctcttggactgaggttcatggaggcaagcacttcctctggttctctgctaaatccccgccctgggcttcgggcctggcacagaacaggccctgtggcaaatgctggtggaggagatggaagagcttagcactggatatctgagtcagtgcaggcctggtggttggcaccctggagtctgggaccatatagattgtgtgacctttacctcccagagtacacaggatcacaatagcacctgcctctgggttgttgagaggatgagatcaaagaaatcccacaaatagcttggtgtgtagaggaatccagagtgttgaaagctgatctattccacgtcccctggggcccaggctaccagtacctgactttgcccccaggcctgctgctggaaggtgctagaattgcctggatacagctgggccggaggatgggcccaggctgagctggacagttaacccctgctgtcctggcagggttacccaccactgacgaagatcctggcaagtttctttggggagctgctgggtcaggagatagacccgctcaggaatgtgctggtgactgtt

SEQ ID NO: 12728 - DNA, 477 bp, Homo sapiens
gccatggccaaacagctgcaggcccgaaggctagacgggatcgactacaacccctgggtggagtttgtgaaactggccagtgagcatgacgtcgtgaacttgggccagggcttcccggatttcccaccaccagactttgccgtggaagcctttcagcacgctgtcagtggagacttcatgcttaaccagtacaccaagacatttgtctcactctgttatccaggctggagtgcaatggtgcgatcatggtccactgcagccttgaccctgccagtctcaagtggtcctcccacctcagcctctggagtaactgggactacaggctggtctcagagctggttggaaagttccttctttgatccaaaaaaaaaaaaaatcatttggggttacccaccactgacgaagatcctggcaagtttctttggggagctgctgggtcaggagatagacccgctcaggaatgtgctggtgactgtt

SEQ ID NO: 12729 - DNA, 1989 bp, Homo sapiens
acttgggaacgaggggtgaagcggcccaggtgaggagctgtgtgtgggggacccaagtcctgagctcggaggcattttctggccagggctgtttcctcccttctcccctgcctctggaaaagtctgcagtgccccaaggctctgggaggcatgttcaggactgcagcagccatctctgtgcacctggtggggccccttcagggaaggaaggctggagccccactcacttggttcttgcaccagactcaggtggctgagaagaatgttggatccccagctccacggcccaccagccatctgggactggcaaacccacaggaacggaaggttcctcagggaccacaaagcccatgtgaggtccctgctgctgaagggattctgaggacaggaggagccaaattacctatccagggtcacccagccaagctcgccatggccaaacagctgcaggcccgaaggctagacgggatcgactacaacccctgggtggagtttgtgaaactggccagtgagcatgacgtcgtgaacttgggccagggcttcccggatttcccaccaccagactttgccgtggaagcctttcagcacgctgtcagtggagacttcatgcttaaccagtacaccaagacatttggttacccaccactgacgaagatcctggcaagtttctttggggagctgctgggtcaggagatagacccgctcaggaatgtgctggtgactgttggtggctatggggccctgttcacagccttccaggccctggtggacgaaggagacgaggtcatcatcatcgaacccttttttgactgctacgagcccatgacaatgatggcagggggtcgtcctgtgtttgtgtccctgaagccgggtcccatccagaatggagaactgggttccagcagcaactggcagctggaccccatggagctggccggcaaattcacatcacgcaccaaagccctggtcctcaacacccccaacaaccccctgggcaaggtgttctccagggaagagctggagctggtggccagcctttgccagcagcatgacgtggtgtgtatcactgatgaagtctaccagtggatggtctacgacgggcaccagcacatcagcattgccagcctccctggcatgtgggaacggaccctgaccatcggcagcgccggcaagaccttcagcgccactggctggaaggtgggctgggtcctgggtccagatcacatcatgaagcacctgcggaccgtgcaccagaactccgtcttccactgccccacgcagagccaggctgcagtagccgagagctttgaacgggagcagctgctcttccgccaacccagcagctactttgtgcagttcccgcaggccatgcagcgctgccgtgaccacatgatacgtagcctacagtcagtgggcctgaagcccatcatccctcagggcagctacttcctcatcacagacatctcagacttcaagaggaagatgcctgacttgcctggagctgtggatgagccctatgacagacgcttcgtcaagtggatgatcaagaacaagggcttggtggccatccctgtctccatcttctatagtgtgccacatcagaagcactttgaccactatatccgcttctgttttgtgaaggatgaagccacgctccaggccatggacgagaagctgcggaagtggaaggtggaactctagccctgaagtcacgccttggccctgacatccccacatgcccgcagagatcctctttgagtgtctgtctttgtccaggtttcagacatttctaggttggggaagatgctattgggaaacctcttctccgtgacacagaatgttctgggtgggagccgcccttcttcatcttagagaaccaagtgcctcctgtctgaaaggtgagggtggcctgacctgggcctctccctgcccctccataggtgggtttgtagggtcttgtgttgcttctggtctctccaggcttggctg

SEQ ID NO: 12730 - DNA, 847 bp, Homo sapiens
cacaggggtgcctgggagggggctcgcgcgccgcggagccggcgagaaggtggtgccccggagactccgggcactggggagcccagagctcgccatggccaaacagctgcaggcccgaaggctagacgggatcgactacaacccctgggtggagtttgtgaaactggccagtgagcatgacgtcgtgaacttgggccagggcttcccggatttcccaccaccagactttgccgtggaagcctttcagcacgctgtcagtggagacttcatgcttaaccagtacaccaagacatttggttacccaccactgacgaagatcctggcaagtttctttggggagctgctgggtcaggagatagacccgctcaggaatgtgctggtgactgttggtggctatggggccctgttcacagccttccaggccctggtggacgaaggagacgaggtcatcatcatcgaacccttttttgactgctacgagcccatgacaatgatggcagggggtcgtcctgtgtttgtgtccctgaagccgggtcccatccagaatggagaactgggttccagcagcaactggcagctggaccccatggagctggccggcaaattcacatcacgcaccaaagccctggtcctcaacacccccaacaaccccctgggcaaggtgttctccagggaagagctggagctggtggccagcctttgccagcagcatgacgtggtgtgtatcactgatgaagtctaccagtggatggtctacgacgggcaccagcacatcagcattgccagcctccctggcatgtgggaacggaccctgaccatcggcagcgccggcaagaccttcagcgcc

SEQ ID NO: 12731 - DNA, 2089 bp, Homo sapiens
cccgctctcgcctccgcgctagcgccctgctgcttcggggcggaagtagcggagccgggctcggcccccttaaagggacagggactgctgcaacctacggggtgtacttgggaacgaggggtgaagcggcccaggtgaggctcgccatggccaaacagctgcaggcccgaaggctagacgggatcgactacaacccctgggtggagtttgtgaaactggccagtgagcatgacgtcgtgaacttgggccagggcttcccggatttcccaccaccagactttgccgtggaagcctttcagcacgctgtcagtggagacttcatgcttaaccagtacaccaagacatttggttacccaccactgacgaagatcctggcaagtttctttggggagctgctgggtcaggagatagacccgctcaggaatgtgctggtgactgttggtggctatggggccctgttcacagccttccaggccctggtggacgaaggagacgaggtcatcatcatcgaacccttttttgactgctacgagcccatgacaatgatggcagggggtcgtcctgtgtttgtgtccctgaagccgggtcccatccagaatggagaactgggttccagcagcaactggcagctggaccccatggagctggccggcaaattcacatcacgcaccaaagccctggtcctcaacacccccaacaaccccctgggcaaggtgttctccagggaagagctggagctggtggccagcctttgccagcagcatgacgtggtgtgtatcactgatgaagtctaccagtggatggtctacgacgggcaccagcacatcagcattgtctcagcagctgttctgttcggccttgggcagccagcctccctggcatgtgggaacggaccctgaccatcggcagcgccggcaagaccttcagcgccactggctggaaggtgggctgggtcctgggtccagatcacatcatgaagcacctgcggaccgtgcaccagaactccgtcttccactgccccacgcagagccaggctgcagtagccgagagctttgaacgggagcagctgctcttccgccaacccagcagctactttgtgcagttcccgcaggccatgcagcgctgccgtgaccacatgatacgtagcctacagtcagtgggcctgaagcccatcatccctcagggcagctacttcctcatcacagacatctcagacttcaagaggaagatgcctgacttgcctggagctgtggatgagccctatgacagacgcttcgtcaagtggatgatcaagaacaagggcttggtggccatccctgtctccatcttctatagtgtgccacatcagaagcactttgaccactatatccgcttctgttttgtgaaggatgaagccacgctccaggccatggacgagaagctgcggaagtggaaggtggaactctagccctgaagtcacgccttggccctgacatccccacatgcccgcagagatcctctttgagtgtctgtctttgtccaggtttcagacatttctaggttggggaagatgctattgggaaacctcttctccgtgacacagaatgttctgggtgggagccgcccttcttcatcttagagaaccaagtgcctcctgtctgaaaggtgagggtggcctgacctgggcctctccctgcccctccataggtgggtttgtagggtcttgtgttgcttctggtctctccaggcttggctgagacggacggtagacttccaccatgtaccgatcacatcccagctctgcatggcccctgctaaggctcaggtataacctcaccttccctggctcatcttggccttggggagttgcctttaggcttgagtcctcaagcctctccttttcgtccataataaaatgtttaagttattaagatccttattgacggcttctctctgcttcacactcatgctgatggctgatctaacttgtgaagaatgcccagaagaacctcagacacccccacaactttgtacaaatggttactgtagtcacatagtggcacaaccaggcctagcacccaaggccctcaaatgaattcctcactattaa

SEQ ID NO: 12732 - DNA, 334 bp, Homo sapiens
tacttcctcatcacagacatctcagacttcagtgagtgagacttgccggtctgggcagggcgcaggggctggaggctgcagggggctcagtgtggcctctgtctcccagagaggaagatgcctgacttgcctggagctgtggatgagccctatgacagacgcttcgtcaagtggatgatcaagaacaaggtgggctgggcctctgccaggcagccatgtatggtttcacaggttgtgtgctgctcaagggtgcccaggcaagaggctcctgggctagatcttagtccagcctctgccgtcaaccttggggcagggttgtatccacttcagagaa

SEQ ID NO: 12733 - DNA, 256 bp, Homo sapiens
tacttcctcatcacagacatctcagacttcaagaggaagatgcctgacttgcctggagctgtggatgagccctatgacagacgcttcgtcaagtggatgatcaagaacaaggtgggctgggcctctgccaggcagccatgtatggtttcacaggttgtgtgctgctcaagggtgcccaggcaagaggctcctgggctagatcttagtccagcctctgccgtcaaccttggggcagggttgtatccacttcagagaa

SEQ ID NO: 12734 - DNA, 618 bp, Homo sapiens
aacctacggggtgtacttgggaacgaggggtgaagcggcccaggtgaggctcgccatggccaaacagctgcaggcccgaaggctagacgggatcgactacaacccctgggtggagtttgtgaaactggccagtgagcatgacgtcgtgaacttgggccagggcttcccggatttcccaccaccagactttgccgtggaagcctttcagcacgctgtcagtggagacttcatgcttaaccagtacaccaagacatttgctggtctcagagctggttggaaagttccttctttgatccaaaaaaaaaaaaaatcatttggggttacccaccactgacgaagatcctggcaagtttctttggggagctgctgggtcaggagatagacccgctcaggaatgtgctggtgactgttggtggctatggggccctgttcacagccttccaggccctggtggacgaaggagacgaggtcatcatcatcgaacccttttttgactgctacgagcccatgacaatgatggcagggggtcgtcctgtgtttgtgtccctgaagccgggtcccatccagaatggagaactgggttccagcagcaactggcagctggaccccatggagctg

SEQ ID NO: 12735 - DNA, 27410 bp, Homo sapiens
agttcatcagaaaattaggtcacagggtaacctgctgcccccaaactggagaggcagaaaggtagatacagagaatcatgatttgccagagcagaaaccttccctggaatcagcacctgggtgggaaaacctgaactgcaactgacgaatgtctggcagcgtggatgtgtgctgctggttaatgttaggtggcagctggactggagtaaggaatacctagagaatggtgaaacatgacttctgggtgtgtctgtgagggtgtttccagaggagattggcgtgggagtcagtggactgagtggggaagatccgctctcaatgtgggtggcagtatgcaattggttcacggcttgaataaaaacaaaagaggagaaaattttcctctttctgtctctgtctctcctggagctggaagattctccttctcctgccctttggatatcaaaactctaggctcttcagccttggactgagaattatcccagtggcgtccctggttctgaggcttgcagacttggactgagccacgctactggcacctcttgcaaatagtctctcaggggacttctcagcctccattaattgcgtgagtcaatttccctataaatcccctctcatgcactttgggaggccgaggcgggtgggtcacgaggtcaggagatcgagatcatcctggctaacacggtgaaaccctgtctctactaaaaatacaaaaaattagctgggtgtgatggcgggcacctgtagtcccagctacttaggaggctgaggcaggagaatggtgtgaacctgggaggcagagcttgcagtgagccgagatcgcgccactgcgctccagcctgggcaacagagcgagattctgtctcaaaaaaaaaaaaaaatggctgggcaaggtggctcaccagcacgatctcggctcactgcaacctccacctcctgggttcaagcaattctcctgtctcagcctcctgagtagctgggagattacaggcatgcgccaccacacccagctaatttttgtatttttagtagagatggggtttcaccatgttgaccaggctggtctcaaactcctgacctcaggtgatccacccacctcagcctcccaaagtgctgggattacaggcaggagccactgcacccagctgagagtaacttttttttttgttgttgagacggagtctccctctgttgcccaggctggagtgcagtggcgcgatctcagctcactgcaggttcagcctcctgggttcacgacattctcctgcctcagcctcccgagtagctgggactacaggtgcccaccaccacacctggctaatttctgtatttttagtagagacagggtttcgccgtgttagccaggatggtctcgatctcctgacctcgtgatccgcctgccttggcctcccaaaatgctgggattacaggcgtgagtcaccgtgcctggccaagggtaactatttttaagtatgccagagcattcctccaaaatactctttttctttcttttcttttctttgctttttttttttttttgagatggagtcttgttctgtcacccaggctggagtgcaacgcacaatctcagctcactttagcctccaagcaattcccttgcctcagcctcccgagtagctgggattacaggtatgagccaccatgtccagctaatttttgtgttgttagtacagacaggatttcaccgtgttggccagtctggtctcaaactcctgacctcaagtgatctgcccacctcagcctcccgaagtgctggaattataagcgtgagccaccgggcctggcctaaaacattctttttctttttttgttttttgagatggaatttcacttttgttgcccaggctggagtgcaatggtgcagtggctcactgcaacctccgactctcggattcaagtgattctccagtctcagccttccaagtagctgggattacaggtgcatgccatcacgcctggctaatttttgtagttttagtagagatggggtttcatcatattggtcaggctggtctcagactcctgaccttaggtgatctgcccgccttggcctcccaaagtgctgtgattacaggtatgagccaccatgcccgggcttttttttttttttttttttatacatggtctcactctgttgcccaggctggagtgcagtggagcaattttggctcattgcaacctctgcctcctgagctcaagcgattctcgtacctcagcctcctaagtagctgggactacaggtgcatgtgacttcgcccagctaatttttgtatttttggtagagatggggttttgtcgtgttggccaggctggtctcaaactcctgacctcaggtgacccacccacctcagcctcccaaagtgctgggattacagacgtgagccaccgtgcccagccttggctgtttgtgtatcttttttggaaacattcagatttatgatttgcagatatttccttccattccatgggctgtcttttcattttcttaatgggtatccttgaagcacaaaagttcttaattttgatgaggtccagtttattttttcttttgttgtgtatgctttggatgttatgtctagaaccccaaggtcacagagatttattcctatgttttcttctagttttcttgttttagttcatacatttagttttgttttttgtttgtttgtttgttttgagacggagtctcgctgtgtcgcccaggctggagtgcagtggcgtgatctctgctcactgcaagctccgcctcccgggttcacgccattctcctgcctcagcctccagagcagctgggactgcaggtgcccaccaccacgcccagctaattttttgtatttttagtagagacggggtttcactgtgttagccaggatggtcttgatctcctgaccttatgatccgcctgccctggcctcccaaagtgctgggattacaggcgtgagacaccgtccccagcccatacatttagttatgtgattcactttgaattaatttttgtgtatggggcagggcacatggctcacgcatgtaatttcagcactttgggaagctgagtgaagcggtggcctgtccctccacacctgtgggtatctcatcaggtgggacgagagactgagaaaagaagtaagacacagagatgaagtatagagacaacagtgggcccaggagactggcaagcagcatatcaaggacctgcaccagcatcggtttctgagtttcctcactttttattgattattatttttattatctcagcaagaggaatgcagtaggagagcagggtgataataaggagaaggtcagcaaaaaaacatgtgagcaaaagaatctatgtcataattaagttcaaggggaggtactatgcctgcatgtgcacgtaggccggatttatgtttctccccgcccaaacatctcagtggagtaaagaataacaaggcagcattgctgccaacatgtctcgcctcccgccatagggcggtttttctcctatctcagaattgaacaaatgtataatcaggttttataccgagacattcagttcccaggggcaggcaggagacagtggccttcctctatttcaacttcaagaggctttcctcttttactaatctacctcagcacagaccctttacgggtgttgggctgggggacagtcaggtctttctcatcccacaaggccatatttcagattatcacatggggagaaaccttggacaatacgtggctttccaaggcagaggtccgtgcggctttccgcagtgcgttgtgcccctggtttattgagattagagaatggcgatgacttttaccaagcatactgcttgtaaacattttgttaacaaggcatatcctgcacagccctagatcccttaaaccttgattccagacaacacatgtttttgtgagctcaaagttggggcaaagtggctggggcaaagttacaaattaacaacatctcagcaaagcaattgttcaaggtacaggtcaaaatggaatttcttatgtcttccctttctacatagacacagtaacagtctgatctctctttctttgccgtacatatcccccttttctttttgacaaaaccgccatagtcattatggcctgttttcgctggttgctgtctctctggagctgctggatacacctgtagaccagcaacagagaacagacatacaaggattaatacaaaatttgcaatagtggaacttccagtggttttaacccaagtgatggggttaagatttgtgaggccatcagcagctttcaccattgcctcagtttctggcaccagattgaactgggcttttgatgcctcaaaaatttgttattttaattttaaaatatctaaagtaaggttatcttctcttccttgtagatggcgtctaaccatgtcccagtgatgttcagattcattataggctcgaggtgtaatacaaaaatctgacatattccagtcacactgtaactgaaaaagatattctaagctcatgagcctatctctcattcaaatgacagtttgtctacgatcattaatttggtttgccaatttttggtctatttgagtctgagaattccacaattttgaggagttcttttgccaattatttatatattttgtagtttgaacagaggagtgtaaagcaattccagcagccgcagcagtagctgtgactgcaataagacccataatcactgcaattaaagtaaaaaatgaatcttttggatctagttagaactccttttaatacttctgttaaaatatggatggatggggaagcctcccacggtcggtccatggacacagggatccacacaccctctcttgccctcactggcagaatatggtgctgccaatcaaaagttgaatcaatgcaagtaaacaatctacaattttcacaggttatagtttgggaatctggtttaataactatgtttcctacaactagcatataagagggttttacacaactttgcaaaggaattgtcggattggaatttaggttaatagtataatgtggcttatgatttcttgttccgataacttgatttccagaccaaattctaatgtggtgcgaggccacagtaagctttcataatgctggatgttcaggagcagtaacaggactaactaactttggttgaggtgatgaaatccccttttcaccccatttccatggatagggtgattctagccttctataaacctggtctagcctttcagttaaatcactatcataggccggattagtgggccagacagatggggtctgtgaacatgagtgagtctggcccatacaaccataatataattggttttgaggggcccagtctataatagttccaaatttattgttttgtaataccaccacagtatcagccacatatttttcccaaactaagacttctgggtcttttgattctttgggaatttccttgaggcaaggtccccttaggcctaaattttaatgatctttgataagaagagtcctgtaaattattcatttgtgacccaagtgacattccacttaccatatgataagtaaatttattggtggcactgacagtagatacttctaccaaccaattttgggttgtaggcattaagcatcctggtgctttccccaggcaaataggaggataatgatacccagtggaaatgtttatcatcattccttcttcttcaggttgggcagggccgcggtcatctgtgggtcctggtacccatgcactaatattaacacatacttcaatagaatattatccatccaagtgactgcctgaattaagggcgggaaaggcacataggcccagtaagtataattagctgcagctgctcctgcagacatagtgagacttaccaccattgatacaatcattaaagctgcaagcagcatattctctggagtttgtgttacccttgtgtactttaggcttttttcagctaactgtgtcagcttctttagctgggcccaggtcggcggcttcgcttttttggtggatggcaactttttctgtaagttgtaggtacccaaactggaagctgattttctcctggtgaaacacgagcaaaacctctcccccacgttatcaccttctctattttttatgttttatttttgttgtctttttaccaaatcagtttttcctcatgtgggctgttctttttaccagtaaaatgttgttctgcagaagtagcggtctgatttctataaatgttaaaaaaatttaaagtatagagtgctagattaagttgcatctggggagtgttatattccttactgtccttttcctttttttgtttaaccaattgagctttgagtgttctattacttctttcaattatggcctgtccttgggaattataagggatttctgttgtgtgtgtaattttccactgatttaagaatttttgaaatgctttactacagtatcctggcccattatctgttttaattttttatggaactcccatgacagcaaaacaagataataaatgtcttttaacatgggaagtattttctcctgtctggcaggttgcccatatgaaatgtgaataagtatcaactgtcacatggacaaatgacaattttccaaatgaaggtacatgtgtgacatccatttgccataatgcattgggacataaacctctgggattaactcctgcctcctgagtgggcacatgtaggacttgacactgagtacaatgttgtacaacattttttgcctgttttcatatgatatcaaatttattttttagtcctgatgcatttacatgagtcaaggcacgaagtttttatgcttttatgaatgcagatgatactagcaagtcagcttgttcatttgccttagttaaaggccctggtaaattagtatgtgttcgaatatgagtaatataaaatgggaaatttctttttcttacagtttgttgtaacgaattaaacagctgatttaactgatcatccatactatatttgattagggctgtctcaacatcctttgtagcctgtactacatatgcagaatctgaaacaatgttaataggctgattaaaaccttgtaacactgaaatgacagcaaccaactctgctctttgagctgagtgatattgagtttcaatgacttgttcttttggcccagtttaagccacttttccattgctggaacaatcagtaaacgccatcagagcattttctaaaggtttatatctggtaattttaggtaaaatccaagtaatcaattttaagaactggaagatttttgtttttgggtaatgattgtcaataattcccacaaaatcagcaagaccaatctggcatgcagcagaattgataaaagcttgtctaacctgttccttgtttaaaggaacaatgattttatctgggtcacttccacacaattttactatatgtagtcttgcctgaccaattaatgtagccatttgatctaagtacaatgtaaaagtcttagttgtactgtgaggaaggaatgaccactctgcaagatcagtattttgaacaataatgcctgttggagaatgtgcagtagcaaaaatcaaaagttggagtggggctaaatgatctattctatttacttgtgctgaccgaattttttcttcaactaattcaatttctttagttgcttctggagttaatggttttttactgtttaagtctggatcccctctcaagatagaaaacaaatttgacatggcataagtagggatgcctagagttggccgaatccaattaatatgtcttagcaatttttgaaagtcatttaatgttttttaatgtgtcttttcttatttttattttttgtggtttaattttcctttcctctacctgcattcccaaataatggaaaggagtagaggtctgaatcttatcagatgctattgtcagtcctgcgtttgcaacatctgtctgcagaaatgtgtaacagtcaattaatttgtctcttgtttctgcagcacacaaaatatcatcaacataatgaatgacataacaatctgaaaacttgtctctaactggttgaagaacttgagctacaaaagtctgacaaatagttggactgaggcaacactttccactaaaacctggctggttctttattatttacggctggtatagtaaaagcaaatttttcaaaatcctgttttgccagaggaatggtaaaaaagcagtccttcagatcaattataattaaaggccagtctttggggatcatggccagagagggcatcccgggttggagagcacccatgggttgtattatggcattaacagctcttaagtcagtcagcatgcgccatctgcctgattttttctgaattacaaacacaggagaattctaaagagagaaagtgggtgaaacatgtccttttttaaatagttttttaactattttatgtagcgcccccaacttttccttagagagtggccactgtttgacccatacaggacactgcagggcgagtctgaattgctccttcactgtagtgaactgtaggttgggcaataatgagtgccacgagccaagtcgcagtgtgcctagtttcaggctgcctcccccagcactcactcggctgaggaggaggtggccattgtggttgtagccccaatggccccaatgattctggactttttccttttaattttaatgtttcaggatatattacctcctgtaattgattgtagtcaacactttgcgttgactgagccattaccggctctgctacatatttacaatgtgaactttccgttcctttcttgaactctgtctctgcctcttcttcacaatctatcacacagctttcaggggcatcagaaactgaaatgctatcttcttctatttgaaatggttctaaagttgctttaataatggcccaatcattccatactgtaagtgggatgattttaccttccctacttgcttgttttaattccttgccaattttttcccaatcttttaaatctaaagttccttgttctggaaaccatgggcagaattgttctattgtttgaaatagcgtaattagattttctgtagaagctttaactccccctcttcttaagagaattttaatgaagctgagataagaggcatatttactttcagtttgccccattgttaccctggattcctccgagcgcacaagcatactgcaaggctgaccgtggacgtactcgggaatctctcatcagctgtcctcaatactcacgttctcagcataacttcaccctggagaaaggccccatattgggcgtcagatgaaggggtggcctgcccctccatacctgtgggatatctcgtcaggtgggatgagagactgagaaaagaaataagacacagagacaaagtgtagagaaacaacagtgggcccaggagaccggcatgcagcatatcaaggacctgcaccagtaccggtctctgagtttcctcactttttattgattattatttttattatctcagcaagaggaatgcagtaggagagcagggtgataataaggagaagttcagcaaaaaacatgagcaaaagaatctgtcataattaagttcaaggggaggtactatgcctgcatgtgcatgtaggccggatttatgtttctctccacccaaacatctcagtggagtaaagaatagcaggcagcattgctgccaatgtgtctcgcctcccgccatagggtggtttttctcctatctcagaattgaacaaatgtataatcaggttttatactgagacattcagttcccaggggcaggcaggagacagtggccttcctctatctcaacttcatgaggctttcctcttttactaatccacctcagcacagaccctttacaggtgttgggctgggggacggtcaggtctttctcatcccacgaggccatatttcagactatcacatggggagaaacctcggacaatacgcggctttccaaggcagaggtccctgtggctttctgcagtgcattgtgcccctggtttattgagactagagaatggcgatgacttttaccaagcatactgcttgtaaacattttgttaacaaggcatatcctgcacagccctagatcccttaaaccctggttccctacaacacatgtttttgtgagctcaaagttagggcaaagtggctggggcaaagttacaaattaacaacatctcagcaaagcaattgttcaaggtacaggtcaaaatggaatttcttatgtcttccatttctacatagacacagtaacagtctgatctctctttcttttccctacactgaagaaggaggatcgcttgaagtcaggggttcaagaacagcctgggctggccaggcatggtggctcatgcctgcaatcctaacactgtgggaggccgtcatgagcagaacaacttcaggccaggagttcaagaccagcctggccagtatagcaaaaccccatctctaattaaaatacaaaaattagccaggcatggtggcacacacgtataatcccagctactcaggaggctgaggcaggagaatcacttgaacccaggaagtcgaggctgcagtgagctgagaaggcaccactgcactccagcctgggtaacaacgtgagaccctatctcaaaaaaaaaaaaaaaaaaagaagaaaataaaaaatttatatgtgtgtattctgtgagatagaggtccaaattcattcttttcttttcttttctttttttttttttttgagacagagtctcactttgtctcccaggctggagtgcagtggcgtgatctcggctcactgcaacctccatctcccaagttgaagcaattctctgcctcagcctcctgagtagctgggattacaggtgccaaccaccatgcctggctaattttttgtatttttagtacaccatcttggtttcaccatcttggccaggctggtcttgagctcctaacctcatgatcagcctgcctcggcctcccaaagtgctgggattacaggcataagctgccacgcctggccccaaattcattcatttacatgtggatatttagttgtctcagcaccatttgttcatttgttgaaaagattattatttcccaccccccacccccgctttttttttgagccggtgacttgctctgtcacccagcctggagtgcagtggtgtgatctcggctcactgcaacctccgcctcctgggttccagcgattctcctgcctcagcctcctgggtagctgggactacaggcatgtgccaccatgccctgctaattttgtatttttcgtagaaatggggtttcaccatgttgaccaggctggtatcgaactcctgacctcaggtgatccgtccacctcagcctcccaaattgctggaattacaggcatgagccaccatgcctggcctccccacctttttttttgagacagtctcattttgtcgcttaggctggagtacagtggcacgatcttggctcactgcaacctttgcctcccaggttcaagcagttctcctgcctcagcctcacaagtagctgggactacagtcatgtgccaccacacccagctaattttttgtatttttattagagatggggtttcgctggtctcaaactcctgacctcaaatgatcctcccgccttggcctcccaaagtgttcgtgttacaggcatgagccacacccagcctcccaattttttttttttttttttttttgagacagagtctcactctgtcacccaggctggagtgcagtgagtggcgtgatctcggctcactgcatcctccacctcctaagttcaagtgattcttctgcctcagcctcccagtaactgggattacaggtgcacaccaccatgcctggctaatttttgtatttttagtagagacgaggttttagcatgttggccaggctggtcacaaacttctgacctgaagtgatccactcgcctcagcctcccacagtgctgggattacaggcgtgagccaccatgcctggcccccatttgagtttcttagcatcttatcaaatagcaattgtgaccatttatttctggactgtcagttctattcaattgacttatatatctatctttaagcagtatcacactttcttggttcctgtatgtttgcattaagcttccaaattgtgcagtgtgatttcttcaatttttttcttctttttcaggcatttacttttttttttttttttttttttgagacatatctccctctgtcgcccaggctggagtgcagtggtgggatcatggctcactgtagccttgacctctccaggatcaagtgattctcccactttagcttccccagtagctgggactacaggtgtgcaccatcacacctggtcaatttttgtatttttgtagagacggtgtttcagtatgttgcccaggctggtctcaaactcctgggctcaagagatcctcctgctttggcctcccaaagtgctgagtttacaggtgtgagacacattgccctgcttgaatttgttgattgcatctccatggtgttatttaacatgttcttctgtccctgtattttagtcattcaacagtgtgatctaatttagggccacttttacagcaggaataatttgcaggtggtgtatgtgtttccagagtcagaacatgtttggtttatgctcttggtgatattcagggctatcagtgatcctctcctggatcattttttaattagaggtgatttgtgttttgaaagggtcacttgggttgctggggggtgtattgtatatgagtaacagggttcttataaggacggagtcggataatcatgcaacagagcacttggtgctattcctggcacgcaatgaccatattgttgttgttgttgttgttgttgttgttgttattgttagagctgtgtgtgggggacccaagtcctgagctcggaggcattttctggccagggctgtttcctcccttctcccctgcctctggaaaagtctgcagtgccccaaggctctgggaggcatgttcaggactgcagcagccatctctgtgcacctggtggggccccttcagggaaggaaggctggagccccactcacttggttcttgcaccagactgtaagtgccctaaccccaatactctgccacctgcatggcctggggcttctggggtctggctcgttcctggcttcaaagctgtgcatgagccttctctttcagggagccctctttaactgcagcctgtatgtgggcttctcccttgcccctgcttctctagtctagaacttgtagctctgcatctgaatagtcagcttgggcgctgtagggtgctgcttcccatgatcccctgtgcccatcccagaacccagtacctggtagggactcaataaatgtcaactgagccaggcgcggtggggttcctgggccatggaagacctggcacttactcaaatggtcccaaggcccctccaggacaggggggcctggtgttgagattactgtggctgccaccctgaccaggtccttgccagcttctcttctgaccctgggcaggtacctgagcctcttcaagcctcagtgtcctcatctgttagatggagactattgtggcacctctagtgagagtgcagtgggaactgagcgaggtggaactgagcaaaatcctgagccagggttcactattgaccacagcaggtggctgagaagaatgttggatccccagctccacggcccaccagccatctgggactggcaaacccacaggaacggaaggttcctcagggaccacaaagcccatgtgaggtccctgctgctgaagggattctgaggacaggaggagccaaattacctatccagggtcacccagccaaggtgggttaggacctgagtttggtggctctcaggtctggccaatttctttctttctttttttttttttttttttttttttggtagagtcttgctcgttgggtcgggcaggagtgcagtggctggcacgatcttggcccactgcaatctccatctcccaggttcaagtgattctcaggcctcagcctcctgagtagctgggattacaggcatgtgtcatgacgcccagataagtttctttgtttgtttttcccagactgagtttcactctaatgctcaggctggagtgcagtggtgtgctcttgcctcactgcaatgtctgcctcccaggttcaagtgattcttgtgcctcagcctcccaagtagctgggataacaggtgcgtgctaccacgcccagctaatttttgtatttttagtagagatgggggtttcaccatgttggccaggctggtctcgaactcctgacctcaggtgatctgcccgcctcagcctcccaaagtgctgggattacaggcgtgagccactgtgcccagcccctggccagtttctgcacaccagtggctgaggagggagctggcctgggaggaacaccgggaggggaggggcgagccaggagccaggaccccgggaccctccgaggagcggattagtgcctccctcagagttaggacatggccttgggtccaacaggcctaagtctgagtgtgtgtgttgtgtggccttaaacacatcactccccctcctgcaccctccagcctctgttttccaccttctgttttctcattgataagataggcctgaccaggtcattcagggaatgaaatggaagtgcttagcaagacctctgtaagtggaggctgctgctgtcactgttgccattatcctccctctccgctccacccacctcctgctcctcttctttaaccctcagcccttcctgagtcagactttaacctggccaagtcagggctctgtctcaggacgcatggagccagggctggaagtctccactgggcaggcgccaggcagcccctgcaggttggggaggtggaggctgctggagtcaagaggaaccaggtgagggtgttggagcataacaggcttgggaggcaggcagaaacctgcccttctgcaaactctatctcttccccctcctgggagcagacaggatggcgctgtggcctgaaagcagctgtccctcctgtgtgcaagctcggactgctgcacccagacagattccatctctgaccttccacttgttcgtctccagctcgccatggccaaacagctgcaggcccgaaggctagacgggatcgactacaacccctggtgagccagctgggctggggaggtgtgtgggtgtcccctcgggcatgggttggccatccctgggtttacagcaactcagtagtactccagatggtggcggtacacagactgccagattccagccatagctcaggagagacagggcccgagggagtaggcttggttcaaatctcagctttcttctgcatgactgtgccactaggacaggtgacatacctgctctgagcctcatctccccagctgcaaaatgaagagttatacccacctggagagcgttggggaggaaaaagtaaaatgctgtccaaagccattctacccaggcaccaagctaaggcctttccagggatgactctttctcacttggtatagagtcagataaactaagataagtaaaataagcaagtaagatacagtcagctcttcaccagacatttgcagaggttgatattgttttcttttttgacttgttttattttcattttatttttgagacggagttttgcccttgtcgcccaggctggagtgcaatggtgcggtctcggctcactgcaacctctgcctcctgggttcaaatgattctcctgcttcagcctccaagtagctgggattacaggcgtgcaacacaacgcccagctaattttttttctttttcttttcccccgcaagacagaatcttactctgtcacccaggctggagtgcagtggcatgatctcggctcactgcaacctccccctcacaggttcaagcaattctcctgcctcagcctcccaagtagctgggattacaggcgtgcgccaccacgcccagctaattttttttttttttttgtatttttagtagagatgagatttcaccatgtttgccaggctggtctcgaactcctgacctcgtgatccacccgcctcagcctcccaaagtactgggattacaggcatgagccactgtgcctggccctaatttttatatctttagagaaaatggggtttcagcatgttgtccaggctggtctcaaactcctgacctcaagggatctgccctcctcggccttccaaagtgctggggaatacaggcataagccaccgggcccagccaaaaatgacacattttagacatatttattggtatgcaaattcaactcagccaggtcttcactctgctccaaactagccccaaaccacataccagcctcttcatccagcttcccagcctttctcccacctggagaggtggcccccaggcagggccagaacagaggattatgggtccagagatgatgtgtgcctgggctggtggggccctgttctgcccagagtagggtcaagagcatcaaactttgcttgagatggaagtagaaaggctggctggctgtgccttgtactagctgggaggctttaggcaagtcactccactccttatccccacagtggtccaggaacaagatgtgcctcacaggccattgtgaaggctatatgagcagagcgtttaactgtggtgttgacgaatccaaggaggagtcatgcaatctgtacagggggtctcaactagtatttggaaagaatagagtaggataggacaggacagaaaatactgcagtagattgcaccaagaaggatgaagcttccattccatgtttgtgctccacagggttgatgatgcaaaggtgatttcttggccggtagtggtggctcacgcctgtactgctagcactttgagaggccaaggggggcggtggatcacctgaggtcaggagttcgagaccagcctggccaacatagcaaaaccccatctgtactaaaaatacaaaaattagctgggcgtggtggcgggtgcctgtaatcccagctactcaggaggctgaggcatgagaatcgcttgacctcgggaggcggaggttgcagtgagttgagattgcaccactgcactccagcctaggggatagagcgaaactctgtcaaaaaaaaaaaaaaaagatgatttcttcctatgggtcatggtggaagaacttggaaagcccctgggctgattcctgcgattaacaatgtgcctgactgacctaatctcaatgtaggggaccagctgtgacacttaggcagatcttcaggccaggacagttgctgattgtctagtttttgtttttcttgtgtgtgtatgtgtgtgttttttgttttttgtttttgtttttttaagacagaatctcactcttgttatccaggctgcagtgcaatggtgcgatctcggctcacttcaacctccggttcccgggttcaagtgattcttctgcctcagccttccaagtagctgggattacaggcccctgccaccatgcctgactaacttttgtatttttagtgaagacagagtttcaccatgttggccaggctggtctcaaactcctgacctcaggtgatccgcccacctcggcctcccaaagtgctgggattacaggcgtgagccaccacacctggccggttgtccagtttttctaaacaggccgaagtccaggtcaccatggagggctgggctggtgctgattctccatttgttacccagggtggagtttgtgaaactggccagtgagcatgacgtcgtgaacttgggccagggcttcccggatttcccaccaccagactttgccgtggaagcctttcagcacgctgtcagtggagacttcatgcttaaccagtacaccaagacatttgtgagtctccccatctctcgtggaggcactgggggaggaaggggacagggctttctggacttcaagcccacacagctgtcaggcttcaggggacagagccaggggattctgtatgaccatagttcagtgtttactgagcgtatcctctgtcccagagccttcgcctcgtggtctagtggggatggcagacaagaagccagtaacgacaggcagttgatacatgatgtgatggaggaggatgggatatcgtgcgagtaagaaagagggaatgaaacctggggagggggctggagagatgcacgaagacttcctggaggaggtgacacttaaaccaagtcctgaaagatgagctactggttggattacacaataaatccaaacgttttccggaaaggaccacatagtaaatatgtgacactgcttggattagaacagtggttctttttttctttttcttttttgagacaaggtctcactctgttatccaggctggagtgcaatggtgcgatcatggtccactgcagccttgaccctgccagtctcaagtggtcctcccacctcagcctctggagtaactgggactacaggtgtgcatcaccatgcccagctaattttatttatatatttatttatttatttttgagtcagggtctcactcctgtcacctaggctagagtgtagtgacatgatcacggctcactgcagcctgtacctcatggggctcacatgatatgccatttcctggggctcatgtgatcctcccacctcagcctctagagttgctgggacaacaggggcatgccacctcacccagctaatttagagacagggtttcaccatgttgctcagactggtctgaaactcctgggctcaagtgatcctgccacctcggcctccaaaagtgctgggattacaggcgtgagccactgaaccctcattctttttttttttttttttttgagatggagtctccctctgtcgccaggctggagtgcaggggcgcaatctcggctcactgcaacctccccctcccaggttcaagagattctcctgcctcagcctcccgagtagctgggactataggggtgcgcccccacgcccagctaatttttgttttgttttttttttaagacagtctcgcactgtcgccccggctggagtctggagtgcagcggcacgatctcggctcactgcaacctccgcctccgcctccgcctccgcctcctgggttcaagccattctcctgcctcagcctcttgagtagttgggattacaggcgcccgccaccatgcccagctaatttttgtatttttagtagagacggggtttcaccatgttggccaggctggtctcaaactcccgacctcgtgattcgcctgcctcggcctcccaaagtgctgggattacaggcgtgagccaccgcacctggccattttttgtatttttagtggatactgggtttcaccatgttagtccggttggtctcgatctcttgacctcgtgatccacccacctcagcctcccagagtgctgggattacaggcgtgagccaccgcacccgaccgcactcgttctttttaatggctgcatactgttctgttgcctggatgtgccataatttatttaagcagttctgcactgatggactgcttctgctatctcaatatcataagcaatgccacagcaaatatccctgtgtggacatctttgtatacatatgtatttctctaagataaattcctggaggtaaaactagcaaaagaaagactataaatatttataaatacaataggtggatattgttaagaaacagtgtgtgcctataatcccagctacttgggagtctgaggcaggaagattgtttgagcccaggagtttgaggccagtgcaacatagtgagatcctgtctgaaaaataaacaaacaactaagtaaataattgccctccagtaaggtttactcatttacatccctgccaataggctggtctcagagctggttggaaagttccttctttgatccaaaaaaaaaaaaaatcatttgggtatgtatctttttcttttctttctttctttcttttttttttcttttaactagagacaaaagctgggtatggtggctcacgcctataatcccagcattctgggaggctaaggctggcagatcacctgaggtcaggagttcaagaccagcctgcccaacatggtgagatcccatctctaataaaaattagctgggcgtggtggtgggtgcctgtaatcccaactacttgggaggctgaggcacaagaatcgcttgaacccgggaggcggaggttgcagtgggccgaggtggtgccattgcactccagcctgggtgacaacaacaacaacaacaacaaaatagagacagggtctccttatgttacccaggctggtctcaaactcctgggctcaagcaatcctcccaccttagcctcccaaagtgctgggttacaggcatgagccactgtgcccagcctcattaaatattttacctctttcttgtatgttgcaatatttttctcttcctgttttgaccttgctcatggtgccttttatttttatttaattaattaatttattgtctaagacagagtctcagttttattacccagactggtgtgatcataactcacttcagccttgatctcctgggctcaagcaatcctcctgcctcagcctcccgagtacctgggactacaggcacgtgatactacacctggataatttttttgattttccatcagtagagacagagtccctctgtgttgcccaggctgttctcaaactcctggcctcaagcaaccctcccgcctcatactcccaaatgctaggattacaggcgtgagccacggtgcctggcctgtgcctcttgttgtacagaaaatttttatatttgtgtggccaaatctggtttagtgagttactgagttgagttctagataaagtttcaatcacttggcttagccttgagtatttttgttttgttttgtttgtttttgttttttttgagacggagtctcgctctgtcgcccaggctggagtgcagtggcgcgatctcggctcactgcaagctccgcctcccgggttcacgccattcttctgcctcagcctcccgagtagagctgggactacaggtgcccgccaccatgccagctaattttttgtatttttagtagagacggggtttcaccttgagtattttataagtgtcctcagcaaacaagtttctggatctaatcttcctctcaaaaaggggtgcttacaaagctgcaacatgaggttcctgactgtcaactgtgtgtgactttagacaagtaatttcttctctctgggtctctatttttctacctgtcaaatagtgggcatcaggccaggcacggtggctcacatctgtaatcccagcactttgggaggccaaagcaggcagattacccaaggtcagaagttcgaaaccagtctggccaacatggtgaaaccccgtctccactaaaaatacaaaaattaaccaggcatggtggtgcgtgcctgtagtcccagctacttgggaggctgaggcaggagaatcacttgaacccaggaggcggaggttgcagggagccgcgattgtgccactgcactccagcctgggtgacatgagtgagaccctgtctcaaaataaataaataaataaataaataaataaataaataaataaaagcctctcccgcaaagctgctgggaggatcaagtgggcacaaacatgcttcttaaacttacagatgtggaaagtggggagtttctactgccttgtgggctcttggactgaggttcatggaggcaagcacttcctctggttctctgctaaatccccgccctgggcttcgggcctggcacagaacaggccctgtggcaaatgctggtggaggagatggaagagcttagcactggatatctgagtcagtgcaggcctggtggttggcaccctggagtctgggaccatatagattgtgtgacctttacctcccagagtacacaggatcacaatagcacctgcctctgggttgttgagaggatgagatcaaagaaatcccacaaatagcttggtgtgtagaggaatccagagtgttgaaagctgatctattccacgtcccctggggcccaggctaccagtacctgactttgcccccaggcctgctgctggaaggtgctagaattgcctggatacagctgggccggaggatgggcccaggctgagctggacagttaacccctgctgtcctggcagggttacccaccactgacgaagatcctggcaagtttctttggggagctgctgggtcaggagatagacccgctcaggaatgtgctggtgactgttggtggctatggggccctgttcacagccttccaggccctggtggacgaaggagacgaggtgagtgggcaagacttgggctgagtgggactgagaggtcagggccatgctgactccagctgatttgacccttatatcaggtcatcatcatcgaacccttttttgactgctacgagcccatgacaatgatggcagggggtcgtcctgtgtttgtgtccctgaagccggtaaggatgctaggtagaggatggatgggcagagggatccaaggcgtgggctgagttggaccctgggagttggaaaaggaggaaagaagtgaaggaagccagttcctctaagctgggagggcagaggggaggtgtgtgtgttgggatcccaggggagagaaggtggggatagatgctggggaagacctgcatgtcaggtggttaagtggtaccaccccatgccacctgctcttgcagggtcccatccagaatggagaactgggttccagcagcaactggcagctggaccccatggagctggccggcaaattcacatcacgcaccaaagccctggtcctcaacacccccaacaaccccctgggcaaggtactggagggacctccttccctggccccctgcggacctggtcatgtctcctgcactgttactgagttgctgctgtggggcctccgtttcttcgtttgtgtgtgggagggccacacacaatgagcactgaggaccaagactccagaggtcccaggacaggggcaagaatccccagggaaggcctgagggctgggacagtgaactgggctgggagccaccatcacttcccagtgaccctggaatagtgactatgcctctcgaagtatctcatctgtaatgtgggaacctgagggaactgacctcatggtcagtgttgcagggatccaatgtgatggtgcagaacagcccttagcactgggcttggctgtattcgccatttatttatttttttgagacggagtctcgctctgtctcccaggctggagtgcagtggtgtgatcttggctcattgcaacctctgcctcctgggttcaagcaattctcctgcctcagcctcccgagtagctgggattacaggcacccgccaccatgcccagctaatttttgtgtttttagtagagacggggtttctccatgttggccaggctggtcttaaactcctgacctccagtgttccgcccgcctcggcctcccaaagtgctaggattacaggcgtgagccaccgcacctggccgcagctgtgttctttaacctctctgagtaggcctctgtgtttggggacggtcccagctgcaggtctgtgctctccttgggcatctgcaggtgttctccagggaagagctggagctggtggccagcctttgccagcagcatgacgtggtgtgtatcactgatgaagtctaccagtggatggtctacgacgggcaccagcacatcagcattggtgagccaagccagcctggggcccctcccctgcacattggtgggagggccttgaccccacctgagagtcagcgcaggcctggtagttagaacccagggttatggagccctgcagatcctgtgacctttgcctcccagagtacacagtgtcacagtagcacctgcctccctggttgtcgaaaggatgaggtcaaagaaatcctatgccgagcatggtgggtcacacctgtaatcccagcactttgggaggctgaggctggcagatcacttgaggtcaggagtttgagaccagcctggccaacatggtgaaaccctgtctgtactaaaagtacaaaaattagctgggcatggtggcacgtgcctgtagtcccagctactcaggaagctgaggtaggaggatcactggaacctgggaggcggaggttgcagtgaggcaagatggcgccattgcattcctgcctgggcaacagagcgagactccatctcaaaaaaaaaaaaaacaaagaaagaaatggggggtggagggagggagggagagagagagagagagaaagaaggaaggaaggaaaggaaaggaagaaagaaagaaaaaaaattgtgcaaataacttagtatgtagaggaatccagggtgtcaaaagcctatgcgtgtcccctggggcccagaccaccatcctcccccgtccccctcaccccagtctcagcagctgttctgttcggccttgggcagccagcctccctggcatgtgggaacggaccctgaccatcggcagcgccggcaagaccttcagcgccactggctggaaggtgagttgctgagggtgggaggtcaccaccccctgcaagatccttggcaagtgaggtgggcctgagaatgaagaaggctttagccaggtctggaaggacctctccccctacctgcgcccctgctgcaggtgggctgggtcctgggtccagatcacatcatgaagcacctgcggaccgtgcaccagaactccgtcttccactgccccacgcagagccaggtgaagaggggcaggacgtcacgggggagtggggggacaacaaaagagcccaggctggcccccgcgtcagggaacagctgatctatctgtgtgtccatctgccctgcccaggctgcagtagccgagagctttgaacgggagcagctgctcttccgccaacccagcagctactttgtgcagttcccgcaggccatgcagcgctgccgtgaccacatgatacgtagcctacagtcagtgggcctgaagcccatcatccctcagggcagctacttcctcatcacagacatctcagacttcagtgagtgagacttgccggtctgggcagggcgcaggggctggaggctgcagggggctcagtgtggcctctgtctcccagagaggaagatgcctgacttgcctggagctgtggatgagccctatgacagacgcttcgtcaagtggatgatcaagaacaaggtgggctgggcctctgccaggcagccatgtatggtttcacaggttgtgtgctgctcaagggtgcccaggcaagaggctcctgggctagatcttagtccagcctctgccgtcaaccttggggcagggttgtatccacttcagagaatgaggaggctgtttctttttttctttcttttttttttttggttgagatggagtctcactcttgcccaggctggagtgcagtggcgcgatcttggctcactgcaagctctgccccccaggttcacgccattctcctgcctcagcctcccgagtagctgggaccacaggctacttttttttgcccggctaattttttttgtatttttggtagagacggggtttcaccatgttagccaggttggtcttgatctcctgaccttgtaatccacctgcctcggcctcccaaagtgctgggattacaggcgtgagccactgctcctggcctttttttttttttttttttttttgagacagagtctcactctgtcgcctaggtgggagtgcagtggcgcaatctcagcacactgcaacctccacctccagggttcaagcgattctcctcccttagcctcctgagtagttgggtaactgggattacaggcatgtacaaccacgcctggctaatttttgtatttttagtagagacggggtttcaccatgttggtcaggctagtctccaactcctgacctcagatgatccactccccttggcctcccaaagtgctgggattacaggcgtgagccaccgtgcctggcctgaggaacctgtttctaacttgcacagagatgctgtgtgggctggcaggatttcctgcctctttggatctccatcttcccatctgtacagtgaggagttggcccattaactcttgagttcatccaggtttgatctgtgactctaaggctttgttcttctctggctctgccctgacctgctccatgatcctccctctgtcagcctccctctgccctctatacccagggagggacttggaatgatgttctgggattcttttcttctgactttgtgtttgtttttgttttggatggattttctctctttcgcccaggctgcggtgaagtggcgcaatctggctcactgcaacctccacccccgggttcaagcaattctcctgcctcagcctcccaagtagctgggattacaggcatgcgccaccacacccggccaatttttgtatttttggtagagacggggtttagccatgttggccaggctggtcttgaactcctgacctcaggtgatccacccgtctcagcctcccaaagtgctgggattataggcgtgagccaccgcacctggccttgttcctctgactttgatgcagctctaggtgctggattggagctaactctccttccccgcctggtcgtgggaacctctctgtcccctccggagccaaggcctgctgggccacgaggccgtgttgagacatgtccttcctcctccccagggcttggtggccatccctgtctccatcttctatagtgtgccacatcagaagcactttgaccactatatccgcttctgttttgtgaaggtaaagggcagggctgggggaggaaagacctcacagagcttcccaaggccggctgggcacatggggagagtgtaggactaatctgtgctggcgcaggatgaagccacgctccaggccatggacgagaagctgcggaagtggaaggtggaactctagccctgaagtcacgccttggccctgacatccccacatgcccgcagagatcctctttgagtgtctgtctttgtccaggtttcagacatttctaggttggggaagatgctattgggaaacctcttctccgtgacacagaatgttctgggtgggagccgcccttcttcatcttagagaaccaagtgcctcctgtctgaaaggtgagggtggcctgacctgggcctctccctgcccctccataggtgggtttgtagggtcttgtgttgcttctggtctctccaggcttggctgagacggacggtagacttccaccatgtaccgatcacatcccagctctgcatggcccctgctaaggctcaggtataacctcaccttccctggctcatcttggccttggggagttgcctttaggcttgagtcctcaagcctctccttttcgtccataataaaatgtttaagttatt

SEQ ID NO: 12736 - DNA, 2490 bp, Homo sapiens
agttcatcagaaaattaggtcacagggtaacctgctgcccccaaactggagaggcagaaaggtagatacagagaatcatgatttgccagagcagaaaccttccctggaatcagcacctgggtgggaaaacctgaactgcaactgacgaatgtctggcagcgtggatgtgtgctgctggttaatgttaggtggcagctggactggagtaaggaatacctagagaatggtgaaacatgacttctgggtgtgtctgtgagggtgtttccagaggagattggcgtgggagtcagtggactgagtggggaagatccgctctcaatgtgggtggcagtatgcaattggttcacggcttgaataaaaacaaaagaggagaaaattttcctctttctgtctctgtctctcctggagctggaagattctccttctcctgccctttggatatcaaaactctaggctcttcagccttggactgagaattatcccagtggcgtccctggttctgaggcttgcagacttggactgagccacgctactggcacctcttgcaaatagtctctcaggggacttctcagcctccattaattgccaggtggctgagaagaatgttggatccccagctccacggcccaccagccatctgggactggcaaacccacaggaacggaaggttcctcagggaccacaaagcccatgtgaggtccctgctgctgaagggattctgaggacaggaggagccaaattacctatccagggtcacccagccaagacaggatggcgctgtggcctgaaagcagctgtccctcctgtgtgcaagctcggactgctgcacccagacagattccatctctgaccttccacttgttcgtctccagctcgccatggccaaacagctgcaggcccgaaggctagacgggatcgactacaacccctgggtggagtttgtgaaactggccagtgagcatgacgtcgtgaacttgggccagggcttcccggatttcccaccaccagactttgccgtggaagcctttcagcacgctgtcagtggagacttcatgcttaaccagtacaccaagacatttgtcatcatcatcgaacccttttttgactgctacgagcccatgacaatgatggcagggggtcgtcctgtgtttgtgtccctgaagccgggtcccatccagaatggagaactgggttccagcagcaactggcagctggaccccatggagctggccggcaaattcacatcacgcaccaaagccctggtcctcaacacccccaacaaccccctgggcaaggtgttctccagggaagagctggagctggtggccagcctttgccagcagcatgacgtggtgtgtatcactgatgaagtctaccagtggatggtctacgacgggcaccagcacatcagcattgtctcagcagctgttctgttcggccttgggcagccagcctccctggcatgtgggaacggaccctgaccatcggcagcgccggcaagaccttcagcgccactggctggaaggtgggctgggtcctgggtccagatcacatcatgaagcacctgcggaccgtgcaccagaactccgtcttccactgccccacgcagagccaggctgcagtagccgagagctttgaacgggagcagctgctcttccgccaacccagcagctactttgtgcagttcccgcaggccatgcagcgctgccgtgaccacatgatacgtagcctacagtcagtgggcctgaagcccatcatccctcagggcagctacttcctcatcacagacatctcagacttcaagaggaagatgcctgacttgcctggagctgtggatgagccctatgacagacgcttcgtcaagtggatgatcaagaacaagggcttggtggccatccctgtctccatcttctatagtgtgccacatcagaagcactttgaccactatatccgcttctgttttgtgaaggatgaagccacgctccaggccatggacgagaagctgcggaagtggaaggtggaactctagccctgaagtcacgccttggccctgacatccccacatgcccgcagagatcctctttgagtgtctgtctttgtccaggtttcagacatttctaggttggggaagatgctattgggaaacctcttctccgtgacacagaatgttctgggtgggagccgcccttcttcatcttagagaaccaagtgcctcctgtctgaaaggtgagggtggcctgacctgggcctctccctgcccctccataggtgggtttgtagggtcttgtgttgcttctggtctctccaggcttggctgagacggacggtagacttccaccatgtaccgatcacatcccagctctgcatggcccctgctaaggctcaggtataacctcaccttccctggctcatcttggccttggggagttgcctttaggcttgagtcctcaagcctctccttttcgtccataataaaatgtttaagttatt

SEQ ID NO: 12737 - DNA, 15231 bp, Homo sapiens
gaaccctccagactgctgcccaggcgacgctacggcaaacagaacccctcacaaaggtcagctcttgtgctttgaagcaggggacctgggagaggttggggctaccctgaaggtgatccagggtcagggttgcaggagggagaagggcagagacagaagtagctctgtccggccgggtgtagtggctcacacctgtaatcccaccactttgggaggccgagacgggtggatcacgaggtcaggagattgagaccatcctggctaacatggtgaaaccccatctctactaaaaatacaaaaaattagccaggcatggtggcatgtgcctatagtcccatctacttgggaggctgaggcaggagaatcgcttgaacccaggaggtggaggttgcagtgagctgagatcgcgccactgcactccagtctggcaacagagtgagaccccatctcaaaaaaaagaaaaaagaagaagtagctctgtccatccctctggtgcctcctgcaaaactccacatacagcctgagataggggaggggaccctgataccccgagaagagatgatggatagactgacagaggacagcagcagcagcacccggggccacacccaccatcctgggatcattctctctcatgcctccattcattagttcattctctagttcattcatggctcatttgaaagctgcagagaagcggccactttccaaggcagctgtaccgataattttgtttttaattttgtttttgaaacagtcttgctctattgcctgggctagagtgcagtgacacaatctcggttcactgcaacctccatttcccgggttcaagtgattctcctgggtcagcctccagagtaactgggactacaggtgtgtgccaccgtgtctagctaaattcttttgtatttttagtagagatggggtttcactgtgttggccaggctggtctcgaactcctggccttaagtgatccacctgcctcggcctctcaacatgctaggattataggtgtaagccaccacacccagcctcattcctttttttttttttttttttttttttgagacagactcttactctgtcaccaaggctggagtgcgtggcgcgatctcggctcactgcaacctctgcctcccaggttcatgcgattctcctgcctcagcctccagagtagttgagattacaggccctcaccaccacgcccagctaatgtttgtatttttagtagagatggggtttcaccatgttggccaggctgaactcctgatctcagatgatccacccacctcagcctcccaaagtgctgggattacaggcacgagccatcacacccggcttccattccttttaaagacaggataagggggctgtctgtgaggcatgagaatgtatctgaagagctgagcccagtgcctgccgcttacccggggagtttggctttgcccccggggtagcacctgctgatctggtccactgccctcgtccagggtgaggttgccaggaagagaggtgacttccccaggagtcagggccaggccccagcgtgtacagatgcctcaccccaccacagcacccatgccttcgtcctcctccccaccccatgagcaatcagaataggcctgaggcagtactagtggctcctcaaactactatttatttattcttgttacagtgacattcacgtggcatacaaacacccattttagatgcaatggctttagcacgttcacgatgttatgccacctccacctcagtctagtttcagaacattctcaccacccctaactccatgcccactcagcagtccctcctcatttccacttccgaggcccgggcagcctccactctgttctctgtctctgtagatttccttagtccagctcttttgcagaaatggaatcgtgtaatatgtgccgatggtgtcaggcttcctcctgatggcatcaccttttcagggttcacctgccttgcggcctggatctatacttcctccctttgaaaggctcggtcatattccagtgtgtggatgaagcacattttgtttacccactcatctatcagacccaaattctttcagtgtatctagtcctgttgagtggcagtggggaagaaactgatcttccataagtcaaggtggtgtcataaacagatttgcgattttcacatccacttgctgagatagagcagtgttccctccctccctccctccctccctcccttccttcctttctttctctctcttttttagatggaatctttatgccacccaggctggagtgcagtggcttgatctccgctcactataacctctgccccataggttcaagccatactcccgcctcagcctcccccagtagctgggattgcaggcatgcaccaccacacctagctaattttaaataaatttttagtagagacagggtttcaccatgttggccaggctggtctcgaactcctgacctcaagtgatctgcccacctcggccttccaaagtgttgggattacaggtgtgagtctctgtgcctggccaatagaacatgttctaaagagatgttcaggtgttctcgttcctttaattctagtgttttagttttcctccgggcttttgtggacaggtatctcttgggagacattcggagttcaacttttgtataataacacagatcaggtgctcctggtggacagcgtgacccagcgtcagggatttggtgatgatttgggcacccatgtatgtgggtttggtgcccactgagctgcccctgggccctgctcctgtggagccagctgcccagcctctcctcatctctctccagctgcaccaggaggccagagccgccctgacccaggcttcctcatctgtccaggctgcgacagtgactgtcatgggagccaggactctgctggctgatctggaaggtacgtgagtccagctgaccactaggctgtgtaatgacgaacgcccctgacagccactcacctctcgcctcagccagggcaggcttgcagaggacaggagtctggtcttgtgggcttaattaagccaaacagactttccctccacctctcaggatcctgccccatctcatacatcactcacctcggacttgcccatgtggctatcccatacaccccaggtcatcagaccacatgcagagcccctccagaccaagtgagaggagactctaacatcattggctgttcaaccaggtcaagtccactctggcctgggctccagttagttatctgatacaaatatggctgtccgggtccaatgttgagttggggctatgggaagcagatggagtttctctttagaaggggctatgggttgatgccagtctagtgcccccattttgcagatgggtaggctgaggaaaggaattgctattcatccctgggtcagagctaagctgggaatagaagccagcaagtattacgattctgcaagtatccacctgtgtgatgggcttctgtgatacccaatttgctccagagagaagccccctcaccctttgtttgtggctccttatccaacgggctggataaggcaggaacacactctgaaccccagatgtctcttggggtctgaggccagaagtcaggcttctgctgttgttctgtggcctccctccccagccctgcccactgcccggaagagatggagcgctagctgtggacccagcccctctggggcagaggatgggctggtcagtgctcctgttccccagcttcctggcggcttgaagtcctagtcacccatcgtttggggacttcctgtcggaaaggcgtggccgtgtgtgcttaagtatctagagtcatatttagaaaaaggtacattcaatgacttataatgatggaatgttaggatcttagaacattagaattataagaggtcttaaggtcatctgctgcaaatctcacacctggcagtggactcgcccaccctcagcttgcctatctccaacaatggggggctcactaccttacaagcttttaccttctcattgtcgggttctgagaatgagaacattcttgtgtgtagtggatggaaatttccttgcactgttcccataatccacaggagggctaacctcaaacctctaaccccaggctcttttccccattctgatcccattttagagacaccctttcttaccaccagcttggctgtgctcagttggtgttcaggataaaaggaaaattcacaaggtgaactgtggagcagtcttccccagggtgtggccgggggtctcctagcctattgatacgctctgccaagagagggtttgtgttcaaataagtttaggaactgtctcttgctgcagcatcctcttgaggtcttacagagaacgcttgagaatattaaaggttctgagaaggcctgtaataaagaaacctgcttcactttcaacttaattgacacttccccctaacgtttgttaacaccgtggagaattagggctccacacaatacatgctgagaaacatcaattttgtgtacaaggagcaaagcaggtctaatttctggatggaacaattctataatattatgccctcaaagattagaaggctttattcattttaaaaattgacttttactttgtccactgtaataagtgctttttttttttttttttttttttttttgagatagagtctcgctctgttgcctaggctggagtacagtggcatgatctcggctcactgcaacctctgccttctgggttcaagtgattctcctgcctcagcctcctgagtagctgggattacaggtgcccgccaccacacccggcatttttttttttttttgtatttttagtagagacagggtttcaccaggttggacaggctggttttgaactcctgacctctggtgatctacctgcctccgcctcccaaagtgttaggattacaggcgtaagtcaccgtgcctggcctgtattcagttcttttgatgataaacttcctttagaatttttttttgagttggggtctcactctgtcacccaggctggagtgcagtggtgcaatcatagctcactgtagcctccaactcctggcctcaagtgatccttccacctcagtctcgtgagtagctaggtctataggtgtgtgccaccatgcccagctaagcttttgtctttttgtagagatgaggtctcactatgtttcctaggctggttttgaactcctggcctgatcctcctgcttcagcctccagagtagctgggattacaggaatgagccaccgcacctgactaaatttcccttagaattttatctgaaaggaaaggaaatagtctctttgtttaccaagaaataaactacttcttattggataataaaatctatgggaattctaacatttcctctgggtgtggtggctcacacccgtaatcccagcactttgggaagccaaggtgggtggatcacttaaagccaggaatttgagatcagcctggccaacatggtgaaactccatctctactaaaaaaaaaaaaataccagccgtgtatggtggtgtgtgcttataatctcagctactcaggaggctgaggcaggaaaattgcttaaacccgtgaggcagaggttgcagtgagctgagatctctccactgcactccagcctgggtgacagagcgagaccttgtctcactgcactccagcctgggtgacagagcgagaccttgtctcaaaaaaaaaaaaaaaaaagagaattgtaacatttccctttttgtcttgattgcttgaaagctcagtggtcaatcaaacatttggtttctgcaatgtcattatcgagattttctggtacttctccctctcctctgtccttcctcatccctccagttacatcagactcttggttttccatggtaaggatccatttgttgatttacccatcactatacactgccttaaagcattgtttagacgtaggcagtacatgaaaatgccgagctgagcagactgagccatggactgtgctagtccccaccactggccccagcattgaccaccatgtaattccttgactttaatagacatcctaatagaatgaatactcatctcaaaattccccaagcagtatgtctgtgtctcgcttgcttttgttttctcctggataagcctgagaaggcgatatgcacgttgcatgcacttcagacctccactcgttgtccaagggtctgtggtcagccaggcagctctgccagcggctgcctgggaggcaccggaggtgtgagcccagttcccctgacccagcctcagccgggtttgcaggaatgaagctgcagtttccccggcccaaggaccaggcggcattgcagaggaaggcagactccgtcagtgacagactccttgcagacacgagaaagaagaccaagcaggcggagaggatgctgggaaacgcggcccctctttcctccagtgccaagaagaagggcagagaagcagaggtgttggccaaggacagtgccaaggtcagggtggtggctgtgacaacagtggcctccttccctcccggggggaccgcccttccgcgggccccttcccgacatccgtgctgactactccgcactcactcactgctcagtgggcccaggcaattagctcagagacttcacgggggtgagtctgtgggttcctcacgaaataggtgtcattgctgtccccattgtacaggtgagaatgctgaggtgcagccagcttcatgaacttaaccaggacttacacctgggtctgctggctttcctgcctaaacttctaggtttttcttttcttttttgttattttgaagtttgcgtttatttattttacctgcctttttgttttcaatttttttcttaattttttcagacagattcttactctgtggcccaggctggagtgcagtggcgcaatctcagctcactgcaatctccgcctcctgggttcaagtgactctcctgcctcagattccagagtggctgggattataggcgtgctccaccacacctggctaatttttgtatttttagtagagcggggtttcaccatgttggccaggctggtctcgaacttctgatctcagatgatccacctaccttggcctcccaaagtgctgggattacaggtgtgagccactgcacccagcttaagggtttttggttttgttttttttttttgcttgtttgtttgttttttgtagagacagggtctctgtcgcccaggctggagtacagtagcacaatcacagctcactgcagcctcaaacccttgggcttaagtgatcttcctgcctcagcctcctgagtaactgggactacaggtgtgtgccactgtgcctggctaacttttttttttttgcagagatgaggagtctcggccaggtgtggtggctaactcctgtaatcccagcactttgggaggccaaggcaggcagatcacttgaggtcaggagttcgagaccagtctggtcaacatggtgaaaccctgtctctactaaaaatacaaaaaaattagccgggcatggtggctcgcacctgtagtcctaactactccagaggctgagacacaagaattgcttgaacctgggaggtggaggttgcagtcagccaaactgcaccactgcactccagcctgggcaacagagggagactctgcctcgaaaaaaaaaaagaaaaaaaagattggggtctcactatgttgcccaggctggtcttgaacctctggtctcaagcaagcctcctgcctcagcctcccaaagtgctgggaccataggcatgagccactgcacccagccctggctgattttaactaggcttttaaaaaattggtgccaaattctaatcagtgcctatctccccagctctgctgctggttctgttgctcacacaccaaggaaactgtctttatggtgcctaggaaaagtgctgggtttgcagtaggggtccccgggcttgatctcttgtcatgcccctcgggctttggccagcccctcctcccctctgtgcctctgtttcctcacctgtaaaatagttagaattgctcctcctgaaacgggtggtatccagcagtctacactgtgcccagcacttagcctgcattcagtacatatttgttgcgtgcatgaatgaatgaatgatctgcctggtacagacaactgcttggcatcattgccataagagctatttacctccaaaaggacttgctgcactcacttcttctccctgccactgccacccatcccatagcttgccaaggccttgctgagggagcggaaacaggcgcaccgccgtgccagcaggctcaccagccagacgcaagccacgctccaacaggcgtcccagcaggtgctggcgtctgaagcacgcagacaggagctggaggaagctgagcgggtacgtttgccagggcccctaccctatcgcctcctgcccctggcagcccgggtggggacgccattcaagctgtttcttcctcctccccctgaaaggtgggtgctgggctgagcgagatggagcagcagatccgggaatcgcgtatctcactggagaaggacatcgagaccttgtcagagctgcttgccaggctgggtaaggaggccctaaggctgggccctgaacccctgggtccctggggcacctctaggatcttcctgtgagctccagtcctggggaagatttcctccttgtcctcattgccatgcttcccgcatccccatctttgtggtcaatcacaagcatttataaccatgcccaggcccccttgccatgtgggacagggttggcatctagaagtgagttcactttgagtaactgtttgtgcctccagggccctctattctttggggcagggcagggggcacacagaaaactcaccattggcaagaacacccacaggcaccgggtgagcaggtgagcaggtcagtcctcaggagctgagggttcaggagaagaagaaagactgtcacggcagaaagtgtcatcaggtgctggtctgggatcagactaagattcaagtctggctctgtcccttctttggccattagacctcgggcaagccactccacctctctgagcctcagatcccccatctggaaaatgggagtaacagtggggtggtttagaaagcgcttaccacggtgcgtggtgtatgttgagagtgagtaaatagcggctcgtaggaaggaggtcagattcaagatgggccttagcaaggaggcattttggatgaagggaatagcacctcccaaggcacgaaggttgcagaggcccagtgttgtggggaggctcaggagacagcagacagggcagttgggctgaaaagaacagcatgtatttttttcaaattgtaaaagacacataatattttccatcttaaccattttgaagtgtacagttcagcagcattaagtatattcattgttgtgcgatcatcaccactacccatctctagaacactttcatcatctccaactgaagctctgtcctcctgaaacactaaccccccatttccctcccccagcccctggcagccatcattctactttctgtctctatgaatttgactactctgggccaggcagggtggctcatgcctgtaatcccagcactttgagaggctaaggtgggtggatcatttgaggtcaggagtttgagaccagcctgaccaacatggtgaaaccctgtcccttctaaagatataaaaaaaattagccaggcatggtggcacatgcctgtaatctcagctacacaggaggctgaggcaggagaatcgcttgaacctgggaggcggaggttgcagtgagccaggatcacaccactgcactccagcctgggtgagagtgagactccgtctcaaaagaagaacttgcttagaatcataggtgggaattgaacaatgagaacactcagacacagggtggggaacatcacacactggggcctgtcatcgggtggggggaggggggagggatagcattaggagaaatacctaatgtaaatgaccagttaatgggtgcagcataccaacatggcacatgtatacatatgtaacaaacctgcacgttgtgcacatgtaccctataacttaaaaaaaaaaaagaatttgactactctggggacctcatataactggaatcatatagtatttgtacttttaaaatttttttggagacaggatcttgctctgttacccaggctggagtgcagtggtgcagtcgtggctcactgcagcctcaaactcctgggctcaagcgattcttccacttcagccttcgaagtagctgggaccacaggcacgcaccaccacacccagctaattttttttttttttttttttggagacaaaaaaatatgttccctatgttgcccaggctggtctcaaactactgggctcaagtgatcctcctgccttggcctcccaaagtgctgggatcacaagcgtgagccaccatgcccggccttatttgtcctcttttgactgacttatttcacttagcagaaagtcatcaagattcacccatgtggcagcaagcattttcaattttcattcgtagtaagaggagagagaattgccatgctctacacgttgtctggacaccaggcccacactaagctattcacacacgtgatcttacagaattctcatactcactctttgacgcaaggacagttattcttttgccgttttgcagatgaggaaactgaggtgaggagagtttatttttattttttatttatttttgtttttttgtagagacagcgtctcgttatgttaaccaagctggtgttgaactcctggcctcaagggatgctcccacctcaggttcccaaaatgctgggattacgggagacagccaccacacccagcttagcacagagtttagataatgtgcccagggtcccacagccagtcggtaggaaagccgtggctcacctgcgggtccaagtgactcagcgtgcgtgcaggtagccactagtcgacacctaaggccctgtcgtggagcagacactctcttcaaccattcctgcattgtcactgtcattcattcacttgtcacactctgtgttggccttgtgcttggcctggggatgcagaatgaagagcacacgcctggccccttctccaggagccctaggcagcctgggcaggtagagtgggggctgtaatccatttctgaatctcttcgaagaccaggctgtttggattttgctgtgggccatggggcctcttgaggtcctcctaggtcagcagggccttggctcccctctgccttctcttgcacactggctcagtgcttgcagctgcttgcccaggaaatccagggcctcggggatcccaggggcccagtggaatcctgtggggttagaagcagccacttggggctgggcatggtggctcatgcctgcaatcccagcactttgggaggccaaggcgggtggatcactggaggtcaggagtttgagaccagcctgaccaacatggtgaaaccctgtctctacaaaaaatacaaaaattaggcaaggcgtggtggctcacacctgtaatcccagcactttgggaggctgaggcgggcagatcacctgaggtcaggagtttgagaccagcctggccaacgtggtgaaaccctgtctctactaaaaatacaaaaaaattagcggagcatggtggcaggcacctgtaatcccagatactcgggaggctgaggcaggagaatcgcttgaacctgaggccacagtaagctgagatcgtaccactgcactccagcctggacaacagagcgagactccgtctcaataaataaataaatgcatccatccatccatacatacatacaaaaattagctgggcatggtggtgtgggcctgtggtttaccccagtgattgcccacatccaggcccacaggcggcatctgtaaacgtgtgctgtcagtgaattgagccagcatgttcaagctggcaaaaatcacaggggcctttctcccacactgttttgtaaatgagtaaactaagactcagagaggactcacctgaggccttcttttttaacaataatagtaaaaccatcaacaaaaatgacatttgtcaagtgccacccaggaggatgttctagagtctgcccatgggcccgttgggatgctatgggtcctcacccacctcccagcccttctgctccccatctttccctggtggatggtgggccattggaatcctgggaggcctgagctggggagaggctcaggggctgggaggtgccctggggcctgcagggctgctggctcacagtgaggctgtttgtgccccaccacagggtcgctggacacccatcaagccccagcccaggccctgaacgagactcagtgggcactagaacgcctgaggctgcagctgggctccccggggtccttgcagaggaaactcagtctgctggagcaggaatcccagcagcaggagctgcagatccagggcttcgagagtgacctcgccgagatccgcgccgacaaacagaacctggaggccattctgcacagcctgcccgagaactgtgccagctggcagtgagggctgcccagatccccggcacacactcccccacctgctgtttacatgacccagggggtgcacactaccccacaggtgtgcccatacagacattccccggagccggctgctgtgaactcgcccccgtgtggatagtcactccctgccgattctgtctgtggcttcttccctgccagcaggactgagtgtgcgtacccagttcacctggacatgagtgcacactctcacccctgcacatgcataaacgggcacaccccagtgtcaataacatacacacgtgagggtgcatgtctgtgtgtatgacccacacgtgttcaagtctaatccatccagtcagcagcttacggtccacacacattacagtccacagctgttgtgagagccacctgtgtgctggacaccctctggatgttgggcaagttgttacatgagatgccctggggtgctacatccactcactccagatagcagggaggtctcagcagatctgcagagatcaagggggtcagcaacagccaaagcccctagtcccagagctggctgccctctgtttcacagcagctccctgacctgtgttgctgcgtgcactccctacagctcgacacagccaggggaccaacaggccaagaaatgcaagatcccgggagggttcttagcagcagaatctgaggcccagagaccctgaggccgtggccaggcctgctagtctggctagagcaaggcccattcctggcgggggtgtcattgccttcaccggacgcttccctctcagggtcctgggactgcaccagatgccctgagggaatggcccaccctggcctgtacccacttcagcctgtgatctatccaaagagccaggcccaaaagcgcctaggtcagggtgctcaggctaccaggagcacgcctctgtgcccccggcaacccagttgacctttaattgacgctttccagaccagccctgcggcaccacttgccatgcgggaggccaccagggtgtgcaagcctggctgccattccagtctgtcctgtctgggaatcgccctgtggccaggcccgcatgctggcctctgcccaggactcctcagcatttcctcttggcatccctcccctctcccagaccctcttccagcagatggcaaggcctcggcattgggaagtcaggcacctctgcgggcccagccccctcccgtggctcccctgacaggggcaggggtagggcagcagcacagaccaattccgttgaacgtggaaataaaggaccctttcactgggcagggtggtgtgcctcaccctccccggctggtgggcagccagggccctggctgtgggtgtgcatatgacacacctagtaggtggccagcatgtggaccggacgttggtaggaaggtggcaaaagccgagctcgtggctgggccagtacctcccattagagggctttgctggggttgtgtgatcacaggtacctaccctgtcctctcaggcacttaccacgtaaagcctaggagctggtgagttggaggggtggggtgcggagaggccctcagctgacctctggttcaggctcgagacgaactcacagccaagtgtccgaggatggtgaggagcagggaggggcgccatccaggagggggatggtgtgggtggggccttgaagggtggggaggcagagaaggaagcattccaggcaagagggtggacaacagtccggggcccgcagggttggggctcggccagcttgcatcactccaggaccccaggttgaatggggtgggatgttggagctgctcagtcagggctcttggccgcaggcctcaaacccctcctgaggtggtttcagcagaaaaggggtgttgggagggtcgcttggaaccctggagtaaaaacggctgccacgtgttggagatagcctagggaggggagcctgaggcttccgggataggttggcttccctcttcccccctcccgcctctcttcttggtctgtgtctctgctctcctctcctgtatctgcttcgttcttttctctttatttattgattttttttgagatggagtctcgctctgttgcccaggctggagtgcagtggcatgatctctgcccactgcatcctccacctcccaggtttaagcaattctcctgcctcagcctcccgagtagctaggactacaggtgcttgccaccatgcccagctaattttggtatttttagtagagacagggtttcaccacgttggtcaggctggtctcaaactcctgacctcagatgatatacctgcattggcctcttaaagttctgggatttcaggcatgagccactgcaaccggcccattcttttctctttgcagagtggctttctttgtttttcttgtgcctgataggagaggacacccacccctaccgccatcccccataatggccccaggtgtacatgtcatcaggtccagtgcttgcaagagacaagctggtgactctgtcctgattccagcttctcagcttaggtgaagtcccaccaacccccgttcaggataatgaggatctctggatctaaggccaataatggatgaccggtgccaccccccaacctaatgggagatggtgttcagagaagaggtgtgctcctccacagaaaactgtaaaatcaaggctacggtgggggattgacatgattaaactgagctaggagtga

SEQ ID NO: 12738 - DNA, 3459 bp, Homo sapiens
gaaccctccagactgctgcccaggcgacgctacggcaaacagaacccctcacaaagctgcaccaggaggccagagccgccctgacccaggcttcctcatctgtccaggctgcgacagtgactgtcatgggagccaggactctgctggctgatctggaagacacgagaaagaagaccaagcaggcggagaggatgctgggaaacgcggcccctctttcctccagtgccaagaagaagggcagagaagcagaggtgttggccaaggacagtgccaagcttgccaaggccttgctgagggagcggaaacaggcgcaccgccgtgccagcaggctcaccagccagacgcaagccacgctccaacaggcgtcccagcaggtgctggcgtctgaagcacgcagacaggagctggaggaagctgagcgggtgggtgctgggctgagcgagatggagcagcagatccgggaatcgcgtatctcactggagaaggacatcgagaccttgtcagagctgcttgccaggctggggtcgctggacacccatcaagccccagcccaggccctgaacgagactcagtgggcactagaacgcctgaggctgcagctgggctccccggggtccttgcagaggaaactcagtctgctggagcaggaatcccagcagcaggagctgcagatccagggcttcgagagtgacctcgccgagatccgcgccgacaaacagaacctggaggccattctgcacagcctgcccgagaactgtgccagctggcagtgagggctgcccagatccccggcacacactcccccacctgctgtttacatgacccagggggtgcacactaccccacaggtgtgcccatacagacattccccggagccggctgctgtgaactcgcccccgtgtggatagtcactccctgccgattctgtctgtggcttcttccctgccagcaggactgagtgtgcgtacccagttcacctggacatgagtgcacactctcacccctgcacatgcataaacgggcacaccccagtgtcaataacatacacacgtgagggtgcatgtctgtgtgtatgacccacacgtgttcaagtctaatccatccagtcagcagcttacggtccacacacattacagtccacagctgttgtgagagccacctgtgtgctggacaccctctggatgttgggcaagttgttacatgagatgccctggggtgctacatccactcactccagatagcagggaggtctcagcagatctgcagagatcaagggggtcagcaacagccaaagcccctagtcccagagctggctgccctctgtttcacagcagctccctgacctgtgttgctgcgtgcactccctacagctcgacacagccaggggaccaacaggccaagaaatgcaagatcccgggagggttcttagcagcagaatctgaggcccagagaccctgaggccgtggccaggcctgctagtctggctagagcaaggcccattcctggcgggggtgtcattgccttcaccggacgcttccctctcagggtcctgggactgcaccagatgccctgagggaatggcccaccctggcctgtacccacttcagcctgtgatctatccaaagagccaggcccaaaagcgcctaggtcagggtgctcaggctaccaggagcacgcctctgtgcccccggcaacccagttgacctttaattgacgctttccagaccagccctgcggcaccacttgccatgcgggaggccaccagggtgtgcaagcctggctgccattccagtctgtcctgtctgggaatcgccctgtggccaggcccgcatgctggcctctgcccaggactcctcagcatttcctcttggcatccctcccctctcccagaccctcttccagcagatggcaaggcctcggcattgggaagtcaggcacctctgcgggcccagccccctcccgtggctcccctgacaggggcaggggtagggcagcagcacagaccaattccgttgaacgtggaaataaaggaccctttcactgggcagggtggtgtgcctcaccctccccggctggtgggcagccagggccctggctgtgggtgtgcatatgacacacctagtaggtggccagcatgtggaccggacgttggtaggaaggtggcaaaagccgagctcgtggctgggccagtacctcccattagagggctttgctggggttgtgtgatcacaggtacctaccctgtcctctcaggcacttaccacgtaaagcctaggagctggtgagttggaggggtggggtgcggagaggccctcagctgacctctggttcaggctcgagacgaactcacagccaagtgtccgaggatggtgaggagcagggaggggcgccatccaggagggggatggtgtgggtggggccttgaagggtggggaggcagagaaggaagcattccaggcaagagggtggacaacagtccggggcccgcagggttggggctcggccagcttgcatcactccaggaccccaggttgaatggggtgggatgttggagctgctcagtcagggctcttggccgcaggcctcaaacccctcctgaggtggtttcagcagaaaaggggtgttgggagggtcgcttggaaccctggagtaaaaacggctgccacgtgttggagatagcctagggaggggagcctgaggcttccgggataggttggcttccctcttcccccctcccgcctctcttcttggtctgtgtctctgctctcctctcctgtatctgcttcgttcttttctctttatttattgattttttttgagatggagtctcgctctgttgcccaggctggagtgcagtggcatgatctctgcccactgcatcctccacctcccaggtttaagcaattctcctgcctcagcctcccgagtagctaggactacaggtgcttgccaccatgcccagctaattttggtatttttagtagagacagggtttcaccacgttggtcaggctggtctcaaactcctgacctcagatgatatacctgcattggcctcttaaagttctgggatttcaggcatgagccactgcaaccggcccattcttttctctttgcagagtggctttctttgtttttcttgtgcctgataggagaggacacccacccctaccgccatcccccataatggccccaggtgtacatgtcatcaggtccagtgcttgcaagagacaagctggtgactctgtcctgattccagcttctcagcttaggtgaagtcccaccaacccccgttcaggataatgaggatctctggatctaaggccaataatggatgaccggtgccaccccccaacctaatgggagatggtgttcagagaagaggtgtgctcctccacagaaaactgtaaaatcaaggctacggtgggggattgacatgattaaactgagctaggagtga

SEQ ID NO: 12739 - DNA, 7455 bp, Homo sapiens
gagcggggccggcagagcgcgcggcgtcggtgcccttgaccatggcggcggctgcgcttctgctggggctggcgctgctggcaccgcgggcggccggcgcgggcatgggcgcgtgctatgacggcgcagggcgcccgcagcgctgcctgccggtgttcgagaacgcggcgtttgggcggctcgcccaggcctcgcacacgtgcggcagcccgcccgaggacttctgtccccacgtgggcgccgcgggcgcgggggctcattgccagcgctgcgacgccgccgacccccagcgccaccacaacgcctcctacctcaccgacttccacagccaggacgagagcacctggtggcagagcccgtccatggccttcggcgtgcagtaccccacctcggtcaacatcaccctccgcctagggaaggcttatgagatcacgtatgtgaggctgaagttccacaccagtcgccctgagagctttgccatctacaagcgcagccgcgccgacggcccatgggagccctaccagttctacagcgcctcctgccagaagacctacggccggcccgagggccagtacctgcgccccggcgaggacgagcgcgtggccttctgcacctctgagttcagcgacatctccccgctgagtggcggcaacgtggccttctccaccctggagggccggcccagcgcctacaacttcgaggagagccctgggctgcaggagtgggtcaccagcaccgaactcctcatctctctagaccggctcaacacgtttggggacgacatcttcaaggaccccaaggtgctccagtcctactattatgccgtgtccgacttctctgtgggcggcaggtgcaagtgcaacgggcatgccagcgagtgcggccccgacgtggcaggccagttggcctgccggtgccagcacaacaccaccggcacagactgtgagcgctgcctgcccttcttccaggaccgcccgtgggcccggggcaccgccgaggctgcccacgagtgtctgccctgcaactgcagtggccgctccgaggaatgcacgtttgatcgggagctcttccgcagcacaggccacggcgggcgctgtcaccactgccgtgaccacacagctgggccacactgtgagcgctgtcaggagaatttctatcactgggacccgcggatgccatgccagccctgtgactgccagtcggcaggctccctacacctccagtgcgatgacacaggcacctgcgcctgcaagcccacggtgactggctggaagtgtgaccgctgtctgcccgggttccactcgctcagtgagggaggctgcagaccctgcacttgcaatcccgctggcagcctggacacctgtgacccccgcagtgggcgctgcccctgcaaagagaatgtggaaggcaacctatgtgacagatgtcgcccggggacctttaacctgcagccccacaatccagctggctgcagcagctgtttctgctatggccactccaaggtgtgcgcgtccactgcccagttccaggtgcatcacatcctcagcgatttccaccagggagccgaaggctggtgggccagaagtgtggggggctctgagcaccccccacaatggagcccaaatggggtcctcctgagcccagaagacgaggaggagctcacagcaccagagaagttcctgggagaccagcggttcagctatgggcagcccctcatactgaccttccgggtgccccccggggactccccactccctgtacagctgaggctggaagggacaggcttggccctgtccctgaggcactctagcctgtctggcccccaggatgccgggcatcccagggaggtagagctcaggttccacctgcaggagacctccgaggacgtggcccctccactgccccccttccacttccagcggctcctcgccaacctgaccagcctccgcctccgcgtcagtcccggccccagccctgccggtccagtgttcctgactgaggtccggctcacatccgcccggccagggctttccccgccagcctcctgggtggagatttgttcatgtcccactggctacacgggccagttctgtgaatcctgtgctccgggatacaagagggagatgccacaggggggtccctatgccagctgtgtcccctgcacctgtaaccagcatggcacctgtgaccccaacacagggatctgtgtctgcagccaccataccgagggcccatcctgtgaacgctgtttgccaggtttctatggcaaccctttcgcgggccaagccgacgactgccagccctgtccctgccctggccagtcggcctgtacgaccatcccagagagccgggaggtggtgtgtacccactgccccccgggccagagagggcggcgctgtgaggtctgtgatgatggcttttttggggacccgctggggctctttgggcacccccagccctgccaccagtgccagtgtagcgggaacgtggaccccaatgccgtgggcaactgtgaccccctgtctggccactgcctgcgctgcctgcacaacaccacgggtgaccactgtgagcactgtcaggaaggcttctacgggagcgccctggcccctcgacccgcagacaaatgcatgccttgcagctgtcacccacagggctcggtcagtgagcagatgccctgcgacccagtgacaggccaatgctcctgcctgcctcatgtgactgcacgggactgcagccgctgctaccctggcttcttcgacctccagcctgggaggggctgccggagctgcaagtgtcacccactgggctcccaggaggaccagtgccatcccaagactggacagtgcacctgccgcccaggtgtcacaggccaggcctgtgacaggtgccagctgggtttcttcggcttctccatcaagggctgccgggcctgcaggtgctccccactgggcgctgcctcggcccagtgccacgagaacggcacatgcgtgtgcaggcctggcttcgagggctacaaatgtgaccgctgccacgacaacttcttcctcacggcagacggcacacactgccagcaatgtccgtcctgctacgccctggtgaaggaggaggcagccaagctgaaggccagactgactttgacggaggggtggctccaagggtccgactgtggcagtccctggggaccactagacattctgctgggagaggccccaaggggggacgtctaccagggccatcacctgcttccaggggctcgggaagccttcctggagcagatgatgagcctcgagggtgctgtcaaggccgcccgggagcagctgcagaggctgaacaagggtgcccgctgtgcccaggccggatcccagaagacctgcacccagctggcagacctggaggcagtgctggagtcctcggaagaggagattctgcatgcagctgccattctcgcgtctctggagattcctcaggaaggtcccagtcagccgaccaaatggagccacctggccacagaggcccgtgccctcgccaggagccacagagacaccgccaccaagatcgcagccactgcttggagggccctgctcgcctccaacaccagctacgcgcttctctggaatctgctggagggaagggtggccctagagacccagcgggacctggaggacaggtaccaggaggtccaggcggcccagaaagcactgaggacggctgtggcagaggtgctgcctgaagcggaaagcgtgttggccaccgtgcagcaagttggcgcagatacagccccgtacctggccttgctggcttccccgggagctctgcctcagaagtcccgggctgaagacctgggcctgaaggcgaaggccctggagaagacagttgcatcatggcagcacatggccactgaggctgcccgaaccctccagactgctgcccaggcgacgctacggcaaacagaacccctcacaaagctgcaccaggaggccagagccgccctgacccaggcttcctcatctgtccaggctgcgacagtgactgtcatgggagccaggactctgctggctgatctggaaggaatgaagctgcagtttccccggcccaaggaccaggcggcattgcagaggaaggcagactccgtcagtgacagactccttgcagacacgagaaagaagaccaagcaggcggagaggatgctgggaaacgcggcccctctttcctccagtgccaagaagaagggcagagaagcagaggtgttggccaaggacagtgccaagcttgccaaggccttgctgagggagcggaaacaggcgcaccgccgtgccagcaggctcaccagccagacgcaagccacgctccaacaggcgtcccagcaggtgctggcgtctgaagcacgcagacaggagctggaggaagctgagcgggtgggtgctgggctgagcgagatggagcagcagatccgggaatcgcgtatctcactggagaaggacatcgagaccttgtcagagctgcttgccaggctggggtcgctggacacccatcaagccccagcccaggccctgaacgagactcagtgggcactagaacgcctgaggctgcagctgggctccccggggtccttgcagaggaaactcagtctgctggagcaggaatcccagcagcaggagctgcagatccagggcttcgagagtgacctcgccgagatccgcgccgacaaacagaacctggaggccattctgcacagcctgcccgagaactgtgccagctggcagtgagggctgcccagatccccggcacacactcccccacctgctgtttacatgacccagggggtgcacactaccccacaggtgtgcccatacagacattccccggagccggctgctgtgaactcgcccccgtgtggatagtcactccctgccgattctgtctgtggcttcttccctgccagcaggactgagtgtgcgtacccagttcacctggacatgagtgcacactctcacccctgcacatgcataaacgggcacaccccagtgtcaataacatacacacgtgagggtgcatgtctgtgtgtatgacccacacgtgttcaagtctaatccatccagtcagcagcttacggtccacacacattacagtccacagctgttgtgagagccacctgtgtgctggacaccctctggatgttgggcaagttgttacatgagatgccctggggtgctacatccactcactccagatagcagggaggtctcagcagatctgcagagatcaagggggtcagcaacagccaaagcccctagtcccagagctggctgccctctgtttcacagcagctccctgacctgtgttgctgcgtgcactccctacagctcgacacagccaggggaccaacaggccaagaaatgcaagatcccgggagggttcttagcagcagaatctgaggcccagagaccctgaggccgtggccaggcctgctagtctggctagagcaaggcccattcctggcgggggtgtcattgccttcaccggacgcttccctctcagggtcctgggactgcaccagatgccctgagggaatggcccaccctggcctgtacccacttcagcctgtgatctatccaaagagccaggcccaaaagcgcctaggtcagggtgctcaggctaccaggagcacgcctctgtgcccccggcaacccagttgacctttaattgacgctttccagaccagccctgcggcaccacttgccatgcgggaggccaccagggtgtgcaagcctggctgccattccagtctgtcctgtctgggaatcgccctgtggccaggcccgcatgctggcctctgcccaggactcctcagcatttcctcttggcatccctcccctctcccagaccctcttccagcagatggcaaggcctcggcattgggaagtcaggcacctctgcgggcccagccccctcccgtggctcccctgacaggggcaggggtagggcagcagcacagaccaattccgttgaacgtggaaataaaggaccctttcactgggcagggtggtgtgcctcaccctccccggctggtgggcagccagggccctggctgtgggtgtgcatatgacacacctagtaggtggccagcatgtggaccggacgttggtaggaaggtggcaaaagccgagctcgtggctgggccagtacctcccattagagggctttgctggggttgtgtgatcacaggtacctaccctgtcctctcaggcacttaccacgtaaagcctaggagctggtgagttggaggggtggggtgcggagaggccctcagctgacctctggttcaggctcgagacgaactcacagccaagtgtccgaggatggtgaggagcagggaggggcgccatccaggagggggatggtgtgggtggggccttgaagggtggggaggcagagaaggaagcattccaggcaagagggtggacaacagtccggggcccgcagggttggggctcggccagcttgcatcactccaggaccccaggttgaatggggtgggatgttggagctgctcagtcagggctcttggccgcaggcctcaaacccctcctgaggtggtttcagcagaaaaggggtgttgggagggtcgcttggaaccctggagtaaaaacggctgccacgtgttggagatagcctagggaggggagcctgaggcttccgggataggttggcttccctcttcccccctcccgcctctcttcttggtctgtgtctctgctctcctctcctgtatctgcttcgttcttttctctttatttattgattttttttgagatggagtctcgctctgttgcccaggctggagtgcagtggcatgatctctgcccactgcatcctccacctcccaggtttaagcaattctcctgcctcagcctcccgagtagctaggactacaggtgcttgccaccatgcccagctaattttggtatttttagtagagacagggtttcaccacgttggtcaggctggtctcaaactcctgacctcagatgatatacctgcattggcctcttaaagttctgggatttcaggcatgagccactgcaaccggcccattcttttctctttgcagagtggctttctttgtttttcttgtgcctgataggagaggacacccacccctaccgccatcccccataatggccccaggtgtacatgtcatcaggtccagtgcttgcaagagacaagctggtgactctgtcctgattccagcttctcagcttaggtgaagtcccaccaacccccgttcaggataatgaggatctctggatctaaggccaataatggatgaccggtgccaccccccaacctaatgggagatggtgttcagagaagaggtgtgctcctccacagaaaactgtaaaatcaaggctacggtgggggattgacatgattaaactgagctaggagtga

SEQ ID NO: 12740 - DNA, 6219 bp, Homo sapiens
ctcactgctcagtgggcccaggcaattagctcagagacttcacgggggtgagtctgtgggttcctcacgaaataggtgtcattgctgtccccattgtacaggtgagaatgctgaggtgcagccagcttcatgaacttaaccaggacttacacctgggtctgctggctttcctgcctaaacttctaggtttttcttttcttttttgttattttgaagtttgcgtttatttattttacctgcctttttgttttcaatttttttcttaattttttcagacagattcttactctgtggcccaggctggagtgcagtggcgcaatctcagctcactgcaatctccgcctcctgggttcaagtgactctcctgcctcagattccagagtggctgggattataggcgtgctccaccacacctggctaatttttgtatttttagtagagcggggtttcaccatgttggccaggctggtctcgaacttctgatctcagatgatccacctaccttggcctcccaaagtgctgggattacaggtgtgagccactgcacccagcttaagggtttttggttttgttttttttttttgcttgtttgtttgttttttgtagagacagggtctctgtcgcccaggctggagtacagtagcacaatcacagctcactgcagcctcaaacccttgggcttaagtgatcttcctgcctcagcctcctgagtaactgggactacaggtgtgtgccactgtgcctggctaacttttttttttttgcagagatgaggagtctcggccaggtgtggtggctaactcctgtaatcccagcactttgggaggccaaggcaggcagatcacttgaggtcaggagttcgagaccagtctggtcaacatggtgaaaccctgtctctactaaaaatacaaaaaaattagccgggcatggtggctcgcacctgtagtcctaactactccagaggctgagacacaagaattgcttgaacctgggaggtggaggttgcagtcagccaaactgcaccactgcactccagcctgggcaacagagggagactctgcctcgaaaaaaaaaaagaaaaaaaagattggggtctcactatgttgcccaggctggtcttgaacctctggtctcaagcaagcctcctgcctcagcctcccaaagtgctgggaccataggcatgagccactgcacccagccctggctgattttaactaggcttttaaaaaattggtgccaaattctaatcagtgcctatctccccagctctgctgctggttctgttgctcacacaccaaggaaactgtctttatggtgcctaggaaaagtgctgggtttgcagtaggggtccccgggcttgatctcttgtcatgcccctcgggctttggccagcccctcctcccctctgtgcctctgtttcctcacctgtaaaatagttagaattgctcctcctgaaacgggtggtatccagcagtctacactgtgcccagcacttagcctgcattcagtacatatttgttgcgtgcatgaatgaatgaatgatctgcctggtacagacaactgcttggcatcattgccataagagctatttacctccaaaaggacttgctgcactcacttcttctccctgccactgccacccatcccatagcttgccaaggccttgctgagggagcggaaacaggcgcaccgccgtgccagcaggctcaccagccagacgcaagccacgctccaacaggcgtcccagcaggtgctggcgtctgaagcacgcagacaggagctggaggaagctgagcgggtacgtttgccagggcccctaccctatcgcctcctgcccctggcagcccgggtggggacgccattcaagctgtttcttcctcctccccctgaaaggtgggtgctgggctgagcgagatggagcagcagatccgggaatcgcgtatctcactggagaaggacatcgagaccttgtcagagctgcttgccaggctgggtaaggaggccctaaggctgggccctgaacccctgggtccctggggcacctctaggatcttcctgtgagctccagtcctggggaagatttcctccttgtcctcattgccatgcttcccgcatccccatctttgtggtcaatcacaagcatttataaccatgcccaggcccccttgccatgtgggacagggttggcatctagaagtgagttcactttgagtaactgtttgtgcctccagggccctctattctttggggcagggcagggggcacacagaaaactcaccattggcaagaacacccacaggcaccgggtgagcaggtgagcaggtcagtcctcaggagctgagggttcaggagaagaagaaagactgtcacggcagaaagtgtcatcaggtgctggtctgggatcagactaagattcaagtctggctctgtcccttctttggccattagacctcgggcaagccactccacctctctgagcctcagatcccccatctggaaaatgggagtaacagtggggtggtttagaaagcgcttaccacggtgcgtggtgtatgttgagagtgagtaaatagcggctcgtaggaaggaggtcagattcaagatgggccttagcaaggaggcattttggatgaagggaatagcacctcccaaggcacgaaggttgcagaggcccagtgttgtggggaggctcaggagacagcagacagggcagttgggctgaaaagaacagcatgtatttttttcaaattgtaaaagacacataatattttccatcttaaccattttgaagtgtacagttcagcagcattaagtatattcattgttgtgcgatcatcaccactacccatctctagaacactttcatcatctccaactgaagctctgtcctcctgaaacactaaccccccatttccctcccccagcccctggcagccatcattctactttctgtctctatgaatttgactactctgggccaggcagggtggctcatgcctgtaatcccagcactttgagaggctaaggtgggtggatcatttgaggtcaggagtttgagaccagcctgaccaacatggtgaaaccctgtcccttctaaagatataaaaaaaattagccaggcatggtggcacatgcctgtaatctcagctacacaggaggctgaggcaggagaatcgcttgaacctgggaggcggaggttgcagtgagccaggatcacaccactgcactccagcctgggtgagagtgagactccgtctcaaaagaagaacttgcttagaatcataggtgggaattgaacaatgagaacactcagacacagggtggggaacatcacacactggggcctgtcatcgggtggggggaggggggagggatagcattaggagaaatacctaatgtaaatgaccagttaatgggtgcagcataccaacatggcacatgtatacatatgtaacaaacctgcacgttgtgcacatgtaccctataacttaaaaaaaaaaaagaatttgactactctggggacctcatataactggaatcatatagtatttgtacttttaaaatttttttggagacaggatcttgctctgttacccaggctggagtgcagtggtgcagtcgtggctcactgcagcctcaaactcctgggctcaagcgattcttccacttcagccttcgaagtagctgggaccacaggcacgcaccaccacacccagctaattttttttttttttttttttggagacaaaaaaatatgttccctatgttgcccaggctggtctcaaactactgggctcaagtgatcctcctgccttggcctcccaaagtgctgggatcacaagcgtgagccaccatgcccggccttatttgtcctcttttgactgacttatttcacttagcagaaagtcatcaagattcacccatgtggcagcaagcattttcaattttcattcgtagtaagaggagagagaattgccatgctctacacgttgtctggacaccaggcccacactaagctattcacacacgtgatcttacagaattctcatactcactctttgacgcaaggacagttattcttttgccgttttgcagatgaggaaactgaggtgaggagagtttatttttattttttatttatttttgtttttttgtagagacagcgtctcgttatgttaaccaagctggtgttgaactcctggcctcaagggatgctcccacctcaggttcccaaaatgctgggattacgggagacagccaccacacccagcttagcacagagtttagataatgtgcccagggtcccacagccagtcggtaggaaagccgtggctcacctgcgggtccaagtgactcagcgtgcgtgcaggtagccactagtcgacacctaaggccctgtcgtggagcagacactctcttcaaccattcctgcattgtcactgtcattcattcacttgtcacactctgtgttggccttgtgcttggcctggggatgcagaatgaagagcacacgcctggccccttctccaggagccctaggcagcctgggcaggtagagtgggggctgtaatccatttctgaatctcttcgaagaccaggctgtttggattttgctgtgggccatggggcctcttgaggtcctcctaggtcagcagggccttggctcccctctgccttctcttgcacactggctcagtgcttgcagctgcttgcccaggaaatccagggcctcggggatcccaggggcccagtggaatcctgtggggttagaagcagccacttggggctgggcatggtggctcatgcctgcaatcccagcactttgggaggccaaggcgggtggatcactggaggtcaggagtttgagaccagcctgaccaacatggtgaaaccctgtctctacaaaaaatacaaaaattaggcaaggcgtggtggctcacacctgtaatcccagcactttgggaggctgaggcgggcagatcacctgaggtcaggagtttgagaccagcctggccaacgtggtgaaaccctgtctctactaaaaatacaaaaaaattagcggagcatggtggcaggcacctgtaatcccagatactcgggaggctgaggcaggagaatcgcttgaacctgaggccacagtaagctgagatcgtaccactgcactccagcctggacaacagagcgagactccgtctcaataaataaataaatgcatccatccatccatacatacatacaaaaattagctgggcatggtggtgtgggcctgtggtttaccccagtgattgcccacatccaggcccacaggcggcatctgtaaacgtgtgctgtcagtgaattgagccagcatgttcaagctggcaaaaatcacaggggcctttctcccacactgttttgtaaatgagtaaactaagactcagagaggactcacctgaggccttcttttttaacaataatagtaaaaccatcaacaaaaatgacatttgtcaagtgccacccaggaggatgttctagagtctgcccatgggcccgttgggatgctatgggtcctcacccacctcccagcccttctgctccccatctttccctggtggatggtgggccattggaatcctgggaggcctgagctggggagaggctcaggggctgggaggtgccctggggcctgcagggctgctggctcacagtgaggctgtttgtgccccaccacagggtcgctggacacccatcaagccccagcccaggccctgaacgagactcagtgggcactagaacgcctgaggctgcagctgggctccccggggtccttgcagaggaaactcagtctgctggagcaggaatcccagcagcaggagctgcagatccagggcttcgagagtgacctcgccgagatccgcgccgacaaacagaacctggaggccattctgcacagcctgcccgagaactgtgccagctggcagtgagggctgcccagatccccggcacacactcccccacctgctgtttacatgacccagggggtgcacactaccccacaggtgtgcccatacagacattccccggagccggctgctgtgaactcgcccccgtgtggatagtcactccctgccgattctgtctgtggcttcttccctgccagcaggactgagtgtgcgtacccagttcacctggacatgagtgcacactctcacccctgcacatgcataaacgggcacaccc

SEQ ID NO: 12741 - DNA, 801 bp, Homo sapiens
ctcactgctcagtgggcccaggcaattagctcagagacttcacggggcttgccaaggccttgctgagggagcggaaacaggcgcaccgccgtgccagcaggctcaccagccagacgcaagccacgctccaacaggcgtcccagcaggtgctggcgtctgaagcacgcagacaggagctggaggaagctgagcgggtgggtgctgggctgagcgagatggagcagcagatccgggaatcgcgtatctcactggagaaggacatcgagaccttgtcagagctgcttgccaggctggggtcgctggacacccatcaagccccagcccaggccctgaacgagactcagtgggcactagaacgcctgaggctgcagctgggctccccggggtccttgcagaggaaactcagtctgctggagcaggaatcccagcagcaggagctgcagatccagggcttcgagagtgacctcgccgagatccgcgccgacaaacagaacctggaggccattctgcacagcctgcccgagaactgtgccagctggcagtgagggctgcccagatccccggcacacactcccccacctgctgtttacatgacccagggggtgcacactaccccacaggtgtgcccatacagacattccccggagccggctgctgtgaactcgcccccgtgtggatagtcactccctgccgattctgtctgtggcttcttccctgccagcaggactgagtgtgcgtacccagttcacctggacatgagtgcacactctcacccctgcacatgcataaacgggcacaccc

SEQ ID NO: 12742 - DNA, 1903 bp, Homo sapiens
gagcggggccggcagagcgcgcggcgtcggtgcccttgaccatggcggcggctgcgcttctgctggggctggcgctgctggcaccgcgggcggccggcgcgggcatgggcgcgtgctatgacggcgcagggcgcccgcagcgctgcctgccggtgttcgagaacgcggcgtttgggcggctcgcccaggcctcgcacacgtgcggcagcccgcccgaggacttctgtccccacgtgggcgccgcgggcgcgggggctcattgccagcgctgcgacgccgccgacccccagcgccaccacaacgcctcctacctcaccgacttccacagccaggacgagagcacctggtggcagagcccgtccatggccttcggcgtgcagtaccccacctcggtcaacatcaccctccgcctagggaaggcttatgagatcacgtatgtgaggctgaagttccacaccagtcgccctgagagctttgccatctacaagcgcagccgcgccgacggcccatgggagccctaccagttctacagcgcctcctgccagaagacctacggccggcccgagggccagtacctgcgccccggcgaggacgagcgcgtggccttctgcacctctgagttcagcgacatctccccgctgagtggcggcaacgtggccttctccaccctggagggccggcccagcgcctacaacttcgaggagagccctgggctgcaggagtgggtcaccagcaccgaactcctcatctctctagaccggctcaacacgtttggggacgacatcttcaaggaccccaaggtgctccagtcctactattatgccgtgtccgacttctctgtgggcggcaggtgcaagtgcaacgggcatgccagcgagtgcggccccgacgtggcaggccagttggcctgccggtgccagcacaacaccaccggcacagactgtgagcgctgcctgcccttcttccaggaccgcccgtgggcccggggcaccgccgaggctgcccacgagtgtctgccctgcaactgcagtggccgctccgaggaatgcacgtttgatcgggagctcttccgcagcacaggccacggcgggcgctgtcaccactgccgtgaccacacagctgggccacactgtgagcgctgtcaggagaatttctatcactgggacccgcggatgccatgccagccctgtgactgccagtcggcaggctccctacacctccagtgcgatgacacaggcacctgcgcctgcaagcccacggtgactggctggaagtgtgaccgctgtctgcccgggttccactcgctcagtgagggaggctgcagaccctgcacttgcaatcccgctggcagcctggacacctgtgacccccgcagtgggcgctgcccctgcaaagagaatgtggaaggcaacctatgtgacagatgtcgcccggggacctttaacctgcagccccacaatccagctgcaggagctgcagatccagggcttcgagagtgacctcgccgagatccgcgccgacaaacagaacctggaggccattctgcacagcctgcccgagaactgtgccagctggcagtgagggctgcccagatccccggcacacactcccccacctgctgtttacatgacccagggggtgcacactaccccacaggtgtgcccatacagacattccccggagccggctgctgtgaactcgcccccgtgtggatagtcactccctgccgattctgtctgtggcttcttccctgccagcaggactgagtgtgcgtacccagttcacctggacatgagtgcacactctcacccctgcacatgcataaacgggcacaccccagtgtcaataacatacacacgtgagggtgcatgtctgtgtgtatgacccacacgtgttcaagtct

SEQ ID NO: 12743 - DNA, 3917 bp, Homo sapiens
acttccggtctcgtgccgccttcccaggaccctcagggagagcgggcagccttccaggtggacagaaatggactcagaactcaaggaagaaattcctgtgcatgaggaattcattttgtgtggtggagccgaaacccaggttctaaaatgtgggccctggacagacctctttcatgatcaaagtgtcaaaaggcctaagctgcttattttcattattcctggtaacccaggtttttctgccttttatgtgccatttgcaaaggctttatactctttgacaaacagacgctttccagtttggactatcagtcatgctgggcatgcgttggctcccaaagacaagaagattcttacaacatcagaggattcaaacgctcaagaaattaaggacatttatggactaaatggacaaatagagcacaaactagctttcctgagaactcatgtgccaaaggacatgaaacttgtgctcattggccattcaataggcagctatttcacacttcagatgctgaagcgagtccctgagctcccggtaattcgtgcctttctgctctttccaacaattgaacgaatgtctgagtcacccaatggcagaattgccactccacttttgtgctggtttcgatatgttctctatgttactggctacttattattgaaaccgtgtcctgagacaatcaagtccttgctaatcagaaggggccttcaagtaatgaacctagagaatgaattttcaccattgaatatattagaaccattctgccttgctaatgctgcctaccttgggggccaagaaatgatggaggtggtgaagagagatgacgaaaccataaaggagcatttatgtaagcttacattttattatggtactatagatccttggtgtccaaaagagtactatgaagacattaagaaggattttccagaaggagacattcgactctgtgagaaaaacatacctcatgctttcatcacccattttaaccaggaaatggcagacatgattgctgactccctaaaggatgacttgtccaaaatgtaaattggcctgaggaacaagcccccactgccagtacatggaggcagtcagtgtactagacttagtaggtaaatgtttaattttgaagactgatattagaaatgaagaaagtgagaacctttgtcttacaaaccaactctccgctcgccatgttataggctgaagtaaacacagttgatgaatcattccataggtttaaccatacattttccaagactcagggaacacagtgatctacacagagtcttgtgtttgcacaagatgcccagtggcaccatatggtttattttggtaggcaggatctttgcagatgaaaaaaaaatctacatgtacttgattttaattgagttacattgtagaataggctcctctggaggaaattatgaaatacctactagaaaatgtaaaataaatcagtgaatgttaagagtatagttagatatgtgaagtgtatgagattatgacaaggatacactcatgttccaggagcaggaagtgaacctgggtctcctgtaagacagaagatgaagatgagcccaggctaacttagcacagatcttggctgagatcatcaatgtgacgtctaatgtacctgcactagacagagaataaagttcaccagacattactctggtcagctaaccagataaagaattgttgaaggaccccaactgtgcctcctgccacaggacaaccagcaagttctatgctgagccttagcctcccaggttataagctccctgcaggctcctcctctccagagccaggatggagaggcactgggctgtcccaaagcaggcttggatgtgccaacgtacagttgctccttctgtaattcttgcactaaaactccattaaagaccatcaatgagccaaatagtgtgctagccattgaggatggagttcttagctacttaatgattcttttcttctggaaatcttctagtgaataatttttaaaagcttcttttaaactgctcagtaaaacattgccatacattaactctccatttctgcattaacttcatttgctggaaagaaattattttgttaatgaaccaaacccagccattaagttatgtgaattcaccttctctagacacattgaggtatggcagagaagacacatattccctggcctagagtgggctgacaatattgctgcctcccctaaattgactcaatcttgagaaccacatactgcagtgacagttgatcatggatcagaaatattcctttttctcctagaggaaatccctcatggcattatcattccctaaggacaatgagatgtccctccgctcaaatcctaaagccccctgatgaaagatttggctctgatttgctgccaacttattggtaagtgctgaatgagttactgtgctttggcatagcttctacatcacagcaagtgacttctcagaggggaaaagccaagctccagacaaggagtgctgttagcccaaggggaagagctaatagatacataggccgtaagcacagggctgtacacagatcctttattggcatctgcatgagaggcctagaaatcggatgttagaagctaggaatcatggctctgagcgccttgcatacaggagatactcactgatactaaatcaaggcatgtaaacaatactgggtaaatcatacctaccagaataaagagtaacattcagagcttttcttttatctgttattttaaatgttactccatatttcaaaagtctgcacgtatgaaattgtgtcttatttctggtttttagagcctaagaaagatactcattcttaattcctatttatcatctgaaaaccaaatgaatttttgaaataaatgttttaccagcatttctgacctggtctggcctgatctctgtgttgggcaagagagggtacaatttgagcagttctcctgagttagactcggctcaaagtctctcttttaaagtgaaaagccacctttctcattgcttttttcataggtggaagaatcagatttcaagagactgaagttcattctgtttcattagggattagactaaaatggacaaacagtggaagaaatccattttccagaagcagctctgcctgtatgtcccagtcaaccacatggatggtctttgtgaaagttttaacttcctgcagagttaccgagtgctcagcgattgagctttgaccacacccgtgtttgttcctagtctgttcccagccataagcatctccacaagccctctgtggcttgtgtggcctgatgtccatggccaccaagggcctctcaccatacgcttctccactcaacctttggagagacacggaccaccaaaggcttgatttttcttcatcctacattatattcaaaacaaacaggctgggtgccgtagctcacacctgtgatcccagcaccttgggaggatgagctgggaagatcgtttgaggctaggagtttgagaccagcccgtgcaaaaaacgagacctcgtgtctaaaataatttttaaaaaagagcaaaaaaaaaaagcaatttcagattaaaggagactgaagagacatgacaattggacacaacatctgattctgaattggatgtttttgttataaaagacattgttgagacaatttgcacaacttgaatgaggtctgaagattagctgggagtaagatgccactgttaattttctgatttcagtggttgtactgggaagaagtaagagagtgtccttgtttgtactggagacactgaggtatctgggggtgaggggcatcatgtctgtttactgtcagatggttgaggggaaaataatgttctttgtacttgcagattttttggaagtttgagatgttttagaatttgtaaaaataattatttttaaaacccca

SEQ ID NO: 12744 - DNA, 2045 bp, Homo sapiens
acctgaggggggcacttccggtctcgtgccgccttcccaggaccctcagggagagcgggcagccttccaggtggacagaaatggactcagaactcaaggaagaaattcctgtgcatgaggaattcattttgtgtggtggagccgaaacccaggttctaaaatgtgggccctggacagacctctttcatgatcaaagtgtcaaaaggcctaagctgcttattttcattattcctggtaacccaggtttttctgccttttatgtgccatttgcaaaggctttatactctttgacaaacagacgctttccagtttggactatcagtcatgctgggcatgcgttggctcccaaagacaagaagattcttacaacatcagaggattcaaacgctcaagaaattaaggacatttatggactaaatggacaaatagagcacaaactagctttcctgagaactcatgtgccaaaggacatgaaacttgtgctcattggccattcaataggcagctatttcacacttcagatgctgaagcgagtccctgagctcccggtaattcgtgcctttctgctctttccaacaattgaacgaatgtctgagtcacccaatggcagaattgccactccacttttgtgctggtttcgatatgttctctatgttactggctacttattattgaaaccgtgtcctgagacaatcaagtccttgctaatcagaaggggccttcaagtaatgaacctagagaatgaattttcaccattgaatatattagaaccattctgccttgctaatgctgcctaccttgggggccaagaaatgatggaggtggtgaagagagatgacgaaaccataaaggagcatttatgtaagcttacattttattatggtactatagatccttggtgtccaaaagagtactatgaagacattaagaaggattttccagaaggagacattcgactctgtgagaaaaacatacctcatgctttcatcacccattttaaccaggaaatggcagacatgattgctgactccctaaaggatgacttgtccaaaataggaaatccctcatggcattatcattccctaaggacaatgagatgtccctccgctcaaatcctaaagccccctgatgaaagatttggctctgatttgctgccaacttattggtggaagaatcagatttcaagagactgaagttcattctgtttcattagggattagactaaaatggacaaacagtggaagaaatccattttccagaagcagctctgcctgtatgtcccagtcaaccacatggatggtctttgtgaaagttttaacttcctgcagagttaccgagtgctcagcgattgagctttgaccacacccgtgtttgttcctagtctgttcccagccataagcatctccacaagccctctgtggcttgtgtggcctgatgtccatggccaccaagggcctctcaccatacgcttctccactcaacctttggagagacacggaccaccaaaggcttgatttttcttcatcctacattatattcaaaacaaacaggctgggtgccgtagctcacacctgtgatcccagcaccttgggaggatgagctgggaagatcgtttgaggctaggagtttgagaccagcccgtgcaaaaaacgagacctcgtgtctaaaataatttttaaaaaagagcaaaaaaaaaaagcaatttcagattaaaggagactgaagagacatgacaattggacacaacatctgattctgaattggatgtttttgttataaaagacattgttgagacaatttgcacaacttgaatgaggtctgaagattagctgggagtaagatgccactgttaattttctgatttcagtggttgtactgggaagaagtaagagagtgtccttgtttgtactggagacactgaggtatctgggggtgaggggcatcatgtctgtttactgtcagatggttgaggggaaaataatgttctttgtacttgcagattttttggaagtttgagatgttttagaatttgtaaaaataattat

SEQ ID NO: 12745 - DNA, 493 bp, Homo sapiens
gtgccgccttcccaggaccctcagggagagcgggcagccttccaggtggacagaaatggactcagaactcaaggaagaaattcctgtgcatgaggaattcattttgtgtggtggagccgaaacccaggttctaaaatgtgggccctggacagacctctttcatgatcaaagtgtcaaaaggcctaagctgcttattttcattattcctggtgagcgtaaaagtctgggtaacccaggtttttctgccttttatgtgccatttgcaaaggctttatactctttgacaaacagacgctttccagtttggactatcagtcatgctgggcatgcgttggctcccaaagacaagaagattcttacaacatcagaggattcaaacgctcaagaaattaaggacatttatggactaaatggacaaatagagcacaaactagctttcctgagaactcatgtgccaaaggacatgaaacttgtgctcattggccattcaata

SEQ ID NO: 12746 - DNA, 1895 bp, Homo sapiens
ggcacttccggtctcgtgccgccttcccaggaccctcagggagagcgggcagccttccaggtggacaggtaacccaggtttttctgccttttatgtgccatttgcaaaggctttatactctttgacaaacagacgctttccagtttggactatcagtcatgctgggcatgcgttggctcccaaagacaagaagattcttacaacatcagaggattcaaacgctcaagaaattaaggacatttatggactaaatggacaaatagagcacaaactagctttcctgagaactcatgtgccaaaggacatgaaacttgtgctcattggccattcaataggcagctatttcacacttcagatgctgaagcgagtccctgagctcccggtaattcgtgcctttctgctctttccaacaattgaacgaatgtctgagtcacccaatggcagaattgccactccacttttgtgctggtttcgatatgttctctatgttactggctacttattattgaaaccgtgtcctgagacaatcaagtccttgctaatcagaaggggccttcaagtaatgaacctagagaatgaattttcaccattgaatatattagaaccattctgccttgctaatgctgcctaccttgggggccaagaaatgatggaggtggtgaagagagatgacgaaaccataaaggagcatttatgtaagcttacattttattatggtactatagatccttggtgtccaaaagagtactatgaagacattaagaaggattttccagaaggagacattcgactctgtgagaaaaacatacctcatgctttcatcacccattttaaccaggaaatggcagacatgattgctgactccctaaaggatgacttgtccaaaataggaaatccctcatggcattatcattccctaaggacaatgagatgtccctccgctcaaatcctaaagccccctgatgaaagatttggctctgatttgctgccaacttattggtggaagaatcagatttcaagagactgaagttcattctgtttcattagggattagactaaaatggacaaacagtggaagaaatccattttccagaagcagctctgcctgtatgtcccagtcaaccacatggatggtctttgtgaaagttttaacttcctgcagagttaccgagtgctcagcgattgagctttgaccacacccgtgtttgttcctagtctgttcccagccataagcatctccacaagccctctgtggcttgtgtggcctgatgtccatggccaccaagggcctctcaccatacgcttctccactcaacctttggagagacacggaccaccaaaggcttgatttttcttcatcctacattatattcaaaacaaacaggctgggtgccgtagctcacacctgtgatcccagcaccttgggaggatgagctgggaagatcgtttgaggctaggagtttgagaccagcccgtgcaaaaaacgagacctcgtgtctaaaataatttttaaaaaagagcaaaaaaaaaaagcaatttcagattaaaggagactgaagagacatgacaattggacacaacatctgattctgaattggatgtttttgttataaaagacattgttgagacaatttgcacaacttgaatgaggtctgaagattagctgggagtaagatgccactgttaattttctgatttcagtggttgtactgggaagaagtaagagagtgtccttgtttgtactggagacactgaggtatctgggggtgaggggcatcatgtctgtttactgtcagatggttgaggggaaaataatgttctttgtacttgcagattttttggaagtttgagatgttttagaatttgtaaaaataattatttttaaaaccccacca

SEQ ID NO: 12747 - DNA, 566 bp, Homo sapiens
gtgacgtcacctgaggggggcacttccggtctcgtgccgccttcccaggaccctcagggagagcgggcagccttccaggtggacagaaatggactcagaactcaaggaagaaattcctgtgcatgaggaattcattttgtgtggtggagccgaaacccaggttctaaaatgtgggccctggacagacctctttcatgatcaaagtgtcaaaaggcctaagctgcttattttcattattcctgattcaaacgctcaagaaattaaggacatttatggactaaatggacaaatagagcacaaactagctttcctgagaactcatgtgccaaaggacatgaaacttgtgctcattggccattcaataggcagctatttcacacttcagatgctgaagcgagtccctgagctcccggtaattcgtgcctttctgctctttccaacaattgaacgaatgtctgagtcacccaatggcagaattgccactccacttttgtgctggtttcgatatgttctctatgttactggctacttattattgaaaccgtgtcctgagacaatcaagtcct

SEQ ID NO: 12748 - DNA, 826 bp, Homo sapiens
gaggggggcacttccggtctcgtgccgccttcccaggaccctcagggagagcgggcagccttccaggtggacagaaatggactcagaactcaaggaagaaattcctgtgcatgaggaattcattttgtgtggtggagccgaaacccaggttctaaaatgtgggccctggacagacctctttcatgatcaaagtgtcaaaaggcctaagctgcttattttcattattcctggtaacccaggtttttctgccttttatgtgccatttgcaaaggctttatactctttgacaaacagacgctttccagtttggactatcagtcatgctgggcatgcgttggctcccaaagacaagaagattcttacaacatcagagggtggcattcttgctgtcctctcgtggtggacacaggaggcaagccctcttgggactctcgcgggctctaccctcatgaccccatctgatcctaattacttcccaaagacccctctccacctcttaatagcatttgggcatagggtttcacctatggatttgggggccatataagcattcagaccattacagctggttttcacaattgaataaaatttggatttagggcatggaggtgggtgcagaggtacaacagacagaaagagtagcacagaagggagcaagatttaatagcgatgttactgctaagcagggccagtttgagagggactttgagagctggagagagagccaggactccatgctggaaggtttctaaatggaagaagtaataccatggagatgcaaactacctcctttaaatctgtgagaattctagcatgttcactgttc

SEQ ID NO: 12749 - DNA, 548 bp, Homo sapiens
acttccggtctcgtgccgccttcccaggaccctcagggagagcgggcagccttccaggtggacagattcaaacgctcaagaaattaaggacatttatggactaaatggacaaatagagcacaaactagctttcctgagaactcatgtgccaaaggacatgaaacttgtgctcattggccattcaataggcagctatttcacacttcagatgctgaagcgagtccctgagctcccggtaattcgtgcctttctgctctttccaacaattgaacgaatgtctgagtcacccaatggcagaattgccactccacttttgtgctggtttcgatatgttctctatgttactggctacttattattgaaaccgtgtcctgagacaatcaagtccttgctaatcagaaggggccttcaagtaatgaacctagagaatgaattttcaccattgaatatattagaaccattctgccttgctaatgctgcctaccttgggggccaagaaatgatggaggtggtgaagagagatgacgaaaccataaaggagcatttat

SEQ ID NO: 12750 - DNA, 3837 bp, Homo sapiens
gcggtactgtgacgtcacctgaggggggcacttccggtctcgtgccgccttcccaggaccctcagggagagcgggcagccttccaggtggacagaaatggactcagaactcaaggaagaaattcctgtgcatgaggaattcattttgtgtggtggagccgaaacccaggttctaaaatgtgggccctggacagacctctttcatgatcaaagtgtcaaaaggcctaagctgcttattttcattattcctggtgagcgtaaaagtctggattcaaacgctcaagaaattaaggacatttatggactaaatggacaaatagagcacaaactagctttcctgagaactcatgtgccaaaggacatgaaacttgtgctcattggccattcaataggcagctatttcacacttcagatgctgaagcgagtccctgagctcccggtaattcgtgcctttctgctctttccaacaattgaacgaatgtctgagtcacccaatggcagaattgccactccacttttgtgctggtttcgatatgttctctatgttactggctacttattattgaaaccgtgtcctgagacaatcaagtccttgctaatcagaaggggccttcaagtaatgaacctagagaatgaattttcaccattgaatatattagaaccattctgccttgctaatgctgcctaccttgggggccaagaaatgatggaggtggtgaagagagatgacgaaaccataaaggagcatttatgtaagcttacattttattatggtactatagatccttggtgtccaaaagagtactatgaagacattaagaaggattttccagaaggagacattcgactctgtgagaaaaacatacctcatgctttcatcacccattttaaccaggaaatggcagacatgattgctgactccctaaaggatgacttgtccaaaatgtaaattggcctgaggaacaagcccccactgccagtacatggaggcagtcagtgtactagacttagtaggtaaatgtttaattttgaagactgatattagaaatgaagaaagtgagaacctttgtcttacaaaccaactctccgctcgccatgttataggctgaagtaaacacagttgatgaatcattccataggtttaaccatacattttccaagactcagggaacacagtgatctacacagagtcttgtgtttgcacaagatgcccagtggcaccatatggtttattttggtaggcaggatctttgcagatgaaaaaaaaatctacatgtacttgattttaattgagttacattgtagaataggctcctctggaggaaattatgaaatacctactagaaaatgtaaaataaatcagtgaatgttaagagtatagttagatatgtgaagtgtatgagattatgacaaggatacactcatgttccaggagcaggaagtgaacctgggtctcctgtaagacagaagatgaagatgagcccaggctaacttagcacagatcttggctgagatcatcaatgtgacgtctaatgtacctgcactagacagagaataaagttcaccagacattactctggtcagctaaccagataaagaattgttgaaggaccccaactgtgcctcctgccacaggacaaccagcaagttctatgctgagccttagcctcccaggttataagctccctgcaggctcctcctctccagagccaggatggagaggcactgggctgtcccaaagcaggcttggatgtgccaacgtacagttgctccttctgtaattcttgcactaaaactccattaaagaccatcaatgagccaaatagtgtgctagccattgaggatggagttcttagctacttaatgattcttttcttctggaaatcttctagtgaataatttttaaaagcttcttttaaactgctcagtaaaacattgccatacattaactctccatttctgcattaacttcatttgctggaaagaaattattttgttaatgaaccaaacccagccattaagttatgtgaattcaccttctctagacacattgaggtatggcagagaagacacatattccctggcctagagtgggctgacaatattgctgcctcccctaaattgactcaatcttgagaaccacatactgcagtgacagttgatcatggatcagaaatattcctttttctcctagaggaaatccctcatggcattatcattccctaaggacaatgagatgtccctccgctcaaatcctaaagccccctgatgaaagatttggctctgatttgctgccaacttattggtaagtgctgaatgagttactgtgctttggcatagcttctacatcacagcaagtgacttctcagaggggaaaagccaagctccagacaaggagtgctgttagcccaaggggaagagctaatagatacataggccgtaagcacagggctgtacacagatcctttattggcatctgcatgagaggcctagaaatcggatgttagaagctaggaatcatggctctgagcgccttgcatacaggagatactcactgatactaaatcaaggcatgtaaacaatactgggtaaatcatacctaccagaataaagagtaacattcagagcttttcttttatctgttattttaaatgttactccatatttcaaaagtctgcacgtatgaaattgtgtcttatttctggtttttagagcctaagaaagatactcattcttaattcctatttatcatctgaaaaccaaatgaatttttgaaataaatgttttaccagcatttctgacctggtctggcctgatctctgtgttgggcaagagagggtacaatttgagcagttctcctgagttagactcggctcaaagtctctcttttaaagtgaaaagccacctttctcattgcttttttcataggtggaagaatcagatttcaagagactgaagttcattctgtttcattagggattagactaaaatggacaaacagtggaagaaatccattttccagaagcagctctgcctgtatgtcccagtcaaccacatggatggtctttgtgaaagttttaacttcctgcagagttaccgagtgctcagcgattgagctttgaccacacccgtgtttgttcctagtctgttcccagccataagcatctccacaagccctctgtggcttgtgtggcctgatgtccatggccaccaagggcctctcaccatacgcttctccactcaacctttggagagacacggaccaccaaaggcttgatttttcttcatcctacattatattcaaaacaaacaggctgggtgccgtagctcacacctgtgatcccagcaccttgggaggatgagctgggaagatcgtttgaggctaggagtttgagaccagcccgtgcaaaaaacgagacctcgtgtctaaaataatttttaaaaaagagcaaaaaaaaaaagcaatttcagattaaaggagactgaagagacatgacaattggacacaacatctgattctgaattggatgtttttgttataaaagacattgttgagacaatttgcacaacttgaatgaggtctgaagattagctgggagtaagatgccactgttaattttctgatttcagtggttgtactgggaagaagtaagagagtgtccttgtttgtactggagacactgaggtatctgggggtgaggggcatcatgtctgtttactgtcagatggttgaggggaaaataatgttctttgtacttgcagattttttggaagtttgagatgttttagaatttgtaaaaataattatttttaaaaccccaccatgctatctcctgca

SEQ ID NO: 12751 - DNA, 3728 bp, Homo sapiens
gcggtactgtgacgtcacctgaggggggcacttccggtctcgtgccgccttcccaggaccctcagggagagcgggcagccttccaggtggacagaaatggactcagaactcaaggaagaaattcctgtgcatgaggaattcattttgtgtggtggagccgaaacccaggttctaaaatgtgggccctggacagacctctttcatgatcaaagtgtcaaaaggcctaagctgcttattttcattattcctggtaacccaggtttttctgccttttatgtgccatttgcaaaggctttatactctttgacaaacagacgctttccagtttggactatcagtcatgctgggcatgcgttggctcccaaagacaagaagattcttacaacatcagaggattcaaacgctcaagaaattaaggacatttatggactaaatggacaaatagagcacaaactagctttcctgagaactcatgtgccaaaggacatgaaacttgtgctcattggccattcaataggcagctatttcacacttcagatgctgaagcgagtccctgagctcccgctaatgctgcctaccttgggggccaagaaatgatggaggtggtgaagagagatgacgaaaccataaaggagcatttatgtaagcttacattttattatggtactatagatccttggtgtccaaaagagtactatgaagacattaagaaggattttccagaaggagacattcgactctgtgagaaaaacatacctcatgctttcatcacccattttaaccaggaaatggcagacatgattgctgactccctaaaggatgacttgtccaaaatgtaaattggcctgaggaacaagcccccactgccagtacatggaggcagtcagtgtactagacttagtaggtaaatgtttaattttgaagactgatattagaaatgaagaaagtgagaacctttgtcttacaaaccaactctccgctcgccatgttataggctgaagtaaacacagttgatgaatcattccataggtttaaccatacattttccaagactcagggaacacagtgatctacacagagtcttgtgtttgcacaagatgcccagtggcaccatatggtttattttggtaggcaggatctttgcagatgaaaaaaaaatctacatgtacttgattttaattgagttacattgtagaataggctcctctggaggaaattatgaaatacctactagaaaatgtaaaataaatcagtgaatgttaagagtatagttagatatgtgaagtgtatgagattatgacaaggatacactcatgttccaggagcaggaagtgaacctgggtctcctgtaagacagaagatgaagatgagcccaggctaacttagcacagatcttggctgagatcatcaatgtgacgtctaatgtacctgcactagacagagaataaagttcaccagacattactctggtcagctaaccagataaagaattgttgaaggaccccaactgtgcctcctgccacaggacaaccagcaagttctatgctgagccttagcctcccaggttataagctccctgcaggctcctcctctccagagccaggatggagaggcactgggctgtcccaaagcaggcttggatgtgccaacgtacagttgctccttctgtaattcttgcactaaaactccattaaagaccatcaatgagccaaatagtgtgctagccattgaggatggagttcttagctacttaatgattcttttcttctggaaatcttctagtgaataatttttaaaagcttcttttaaactgctcagtaaaacattgccatacattaactctccatttctgcattaacttcatttgctggaaagaaattattttgttaatgaaccaaacccagccattaagttatgtgaattcaccttctctagacacattgaggtatggcagagaagacacatattccctggcctagagtgggctgacaatattgctgcctcccctaaattgactcaatcttgagaaccacatactgcagtgacagttgatcatggatcagaaatattcctttttctcctagaggaaatccctcatggcattatcattccctaaggacaatgagatgtccctccgctcaaatcctaaagccccctgatgaaagatttggctctgatttgctgccaacttattggtaagtgctgaatgagttactgtgctttggcatagcttctacatcacagcaagtgacttctcagaggggaaaagccaagctccagacaaggagtgctgttagcccaaggggaagagctaatagatacataggccgtaagcacagggctgtacacagatcctttattggcatctgcatgagaggcctagaaatcggatgttagaagctaggaatcatggctctgagcgccttgcatacaggagatactcactgatactaaatcaaggcatgtaaacaatactgggtaaatcatacctaccagaataaagagtaacattcagagcttttcttttatctgttattttaaatgttactccatatttcaaaagtctgcacgtatgaaattgtgtcttatttctggtttttagagcctaagaaagatactcattcttaattcctatttatcatctgaaaaccaaatgaatttttgaaataaatgttttaccagcatttctgacctggtctggcctgatctctgtgttgggcaagagagggtacaatttgagcagttctcctgagttagactcggctcaaagtctctcttttaaagtgaaaagccacctttctcattgcttttttcataggtggaagaatcagatttcaagagactgaagttcattctgtttcattagggattagactaaaatggacaaacagtggaagaaatccattttccagaagcagctctgcctgtatgtcccagtcaaccacatggatggtctttgtgaaagttttaacttcctgcagagttaccgagtgctcagcgattgagctttgaccacacccgtgtttgttcctagtctgttcccagccataagcatctccacaagccctctgtggcttgtgtggcctgatgtccatggccaccaagggcctctcaccatacgcttctccactcaacctttggagagacacggaccaccaaaggcttgatttttcttcatcctacattatattcaaaacaaacaggctgggtgccgtagctcacacctgtgatcccagcaccttgggaggatgagctgggaagatcgtttgaggctaggagtttgagaccagcccgtgcaaaaaacgagacctcgtgtctaaaataatttttaaaaaagagcaaaaaaaaaaagcaatttcagattaaaggagactgaagagacatgacaattggacacaacatctgattctgaattggatgtttttgttataaaagacattgttgagacaatttgcacaacttgaatgaggtctgaagattagctgggagtaagatgccactgttaattttctgatttcagtggttgtactgggaagaagtaagagagtgtccttgtttgtactggagacactgaggtatctgggggtgaggggcatcatgtctgtttactgtcagatggttgaggggaaaataatgttctttgtacttgcagattttttggaagtttgagatgttttagaatttgtaaaaataattatttttaaaaccccaccatgctatctcctgca

SEQ ID NO: 12752 - DNA, 2116 bp, Homo sapiens
tattagaaccattctgccttgctaatgctgcctaccttgggggccaagaaatgatggaggtggtgaagagagatgacgaaaccataaaggagcatttatgtaagcttacattttattatggtactatagatccttggtgtccaaaagagtactatgaagacattaagaaggattttccagaaggagacattcgactctgtgagaaaaacatacctcatgctttcatcacccattttaaccaggaaatggcagacatgattgctgactccctaaaggatgacttgtccaaaatgtaaattggcctgaggaacaagcccccactgccagtacatggaggcagtcagtgtactagacttagtaggtaaatgtttaattttgaagactgatattagaaatgaagaaagtgagaacctttgtcttacaaaccaactctccgctcgccatgttataggctgaagtaaacacagttgatgaatcattccataggtttaaccatacattttccaagactcagggaacacagtgatctacacagagtcttgtgtttgcacaagatgcccagtggcaccatatggtttattttggtaggcaggatctttgcagatgaaaaaaaaatctacatgtacttgattttaattgagttacattgtagaataggctcctctggaggaaattatgaaatacctactagaaaatgtaaaataaatcagtgaatgttaagagtatagttagatatgtgaagtgtatgagattatgacaaggatacactcatgttccaggagcaggaagtgaacctgggtctcctgtaagacagaagatgaagatgagcccaggctaacttagcacagatcttggctgagatcatcaatgtgacgtctaatgtacctgcactagacagagaataaagttcaccagacattactctggtcagctaaccagataaagaattgttgaaggaccccaactgtgcctcctgccacaggacaaccagcaagttctatgctgagccttagcctcccaggttataagctccctgcaggctcctcctctccagagccaggatggagaggcactgggctgtcccaaagcaggcttggatgtgccaacgtacagttgctccttctgtaattcttgcactaaaactccattaaagaccatcaatgagccaaatagtgtgctagccattgaggatggagttcttagctacttaatgattcttttcttctggaaatcttctagtgaataatttttaaaagcttcttttaaactgctcagtaaaacattgccatacattaactctccatttctgcattaacttcatttgctggaaagaaattattttgttaatgaaccaaacccagccattaagttatgtgaattcaccttctctagacacattgaggtatggcagagaagacacatattccctggcctagagtgggctgacaatattgctgcctcccctaaattgactcaatcttgagaaccacatactgcagtgacagttgatcatggatcagaaatattcctttttctcctagaggaaatccctcatggcattatcattccctaaggacaatgagatgtccctccgctcaaatcctaaagccccctgatgaaagatttggctctgatttgctgccaacttattgggattagactaaaatggacaaacagtggaagaaatccattttccagaagcagctctgcctgtatgtcccagtcaaccacatggatggtctttgtgaaagttttaacttcctgcagagttaccgagtgctcagcgattgagctttgaccacacccgtgtttgttcctagtctgttcccagccataagcatctccacaagccctctgtggcttgtgtggcctgatgtccatggccaccaagggcctctcaccatacgcttctccactcaacctttggagagacacggaccaccaaaggcttgatttttcttcatcctacattatattcaaaacaaacaggctgggtgccgtagctcacacctgtgatcccagcaccttgggaggatgagctgggaagatcgtttgaggctaggagtttgagaccagcccgtgcaaaaaacgagacctcgtgtctaaaataattttt

SEQ ID NO: 12753 - DNA, 3807 bp, Homo sapiens
gcggtactgtgacgtcacctgaggggggcacttccggtctcgtgccgccttcccaggaccctcagggagagcgggcagccttccaggtggacaggtaacccaggtttttctgccttttatgtgccatttgcaaaggctttatactctttgacaaacagacgctttccagtttggactatcagtcatgctgggcatgcgttggctcccaaagacaagaagattcttacaacatcagaggattcaaacgctcaagaaattaaggacatttatggactaaatggacaaatagagcacaaactagctttcctgagaactcatgtgccaaaggacatgaaacttgtgctcattggccattcaataggcagctatttcacacttcagatgctgaagcgagtccctgagctcccggtaattcgtgcctttctgctctttccaacaattgaacgaatgtctgagtcacccaatggcagaattgccactccacttttgtgctggtttcgatatgttctctatgttactggctacttattattgaaaccgtgtcctgagacaatcaagtccttgctaatcagaaggggccttcaagtaatgaacctagagaatgaattttcaccattgaatatattagaaccattctgccttgctaatgctgcctaccttgggggccaagaaatgatggaggtggtgaagagagatgacgaaaccataaaggagcatttatgtaagcttacattttattatggtactatagatccttggtgtccaaaagagtactatgaagacattaagaaggattttccagaaggagacattcgactctgtgagaaaaacatacctcatgctttcatcacccattttaaccaggaaatggcagacatgattgctgactccctaaaggatgacttgtccaaaatgtaaattggcctgaggaacaagcccccactgccagtacatggaggcagtcagtgtactagacttagtaggtaaatgtttaattttgaagactgatattagaaatgaagaaagtgagaacctttgtcttacaaaccaactctccgctcgccatgttataggctgaagtaaacacagttgatgaatcattccataggtttaaccatacattttccaagactcagggaacacagtgatctacacagagtcttgtgtttgcacaagatgcccagtggcaccatatggtttattttggtaggcaggatctttgcagatgaaaaaaaaatctacatgtacttgattttaattgagttacattgtagaataggctcctctggaggaaattatgaaatacctactagaaaatgtaaaataaatcagtgaatgttaagagtatagttagatatgtgaagtgtatgagattatgacaaggatacactcatgttccaggagcaggaagtgaacctgggtctcctgtaagacagaagatgaagatgagcccaggctaacttagcacagatcttggctgagatcatcaatgtgacgtctaatgtacctgcactagacagagaataaagttcaccagacattactctggtcagctaaccagataaagaattgttgaaggaccccaactgtgcctcctgccacaggacaaccagcaagttctatgctgagccttagcctcccaggttataagctccctgcaggctcctcctctccagagccaggatggagaggcactgggctgtcccaaagcaggcttggatgtgccaacgtacagttgctccttctgtaattcttgcactaaaactccattaaagaccatcaatgagccaaatagtgtgctagccattgaggatggagttcttagctacttaatgattcttttcttctggaaatcttctagtgaataatttttaaaagcttcttttaaactgctcagtaaaacattgccatacattaactctccatttctgcattaacttcatttgctggaaagaaattattttgttaatgaaccaaacccagccattaagttatgtgaattcaccttctctagacacattgaggtatggcagagaagacacatattccctggcctagagtgggctgacaatattgctgcctcccctaaattgactcaatcttgagaaccacatactgcagtgacagttgatcatggatcagaaatattcctttttctcctagaggaaatccctcatggcattatcattccctaaggacaatgagatgtccctccgctcaaatcctaaagccccctgatgaaagatttggctctgatttgctgccaacttattggtaagtgctgaatgagttactgtgctttggcatagcttctacatcacagcaagtgacttctcagaggggaaaagccaagctccagacaaggagtgctgttagcccaaggggaagagctaatagatacataggccgtaagcacagggctgtacacagatcctttattggcatctgcatgagaggcctagaaatcggatgttagaagctaggaatcatggctctgagcgccttgcatacaggagatactcactgatactaaatcaaggcatgtaaacaatactgggtaaatcatacctaccagaataaagagtaacattcagagcttttcttttatctgttattttaaatgttactccatatttcaaaagtctgcacgtatgaaattgtgtcttatttctggtttttagagcctaagaaagatactcattcttaattcctatttatcatctgaaaaccaaatgaatttttgaaataaatgttttaccagcatttctgacctggtctggcctgatctctgtgttgggcaagagagggtacaatttgagcagttctcctgagttagactcggctcaaagtctctcttttaaagtgaaaagccacctttctcattgcttttttcataggtggaagaatcagatttcaagagactgaagttcattctgtttcattagggattagactaaaatggacaaacagtggaagaaatccattttccagaagcagctctgcctgtatgtcccagtcaaccacatggatggtctttgtgaaagttttaacttcctgcagagttaccgagtgctcagcgattgagctttgaccacacccgtgtttgttcctagtctgttcccagccataagcatctccacaagccctctgtggcttgtgtggcctgatgtccatggccaccaagggcctctcaccatacgcttctccactcaacctttggagagacacggaccaccaaaggcttgatttttcttcatcctacattatattcaaaacaaacaggctgggtgccgtagctcacacctgtgatcccagcaccttgggaggatgagctgggaagatcgtttgaggctaggagtttgagaccagcccgtgcaaaaaacgagacctcgtgtctaaaataatttttaaaaaagagcaaaaaaaaaaagcaatttcagattaaaggagactgaagagacatgacaattggacacaacatctgattctgaattggatgtttttgttataaaagacattgttgagacaatttgcacaacttgaatgaggtctgaagattagctgggagtaagatgccactgttaattttctgatttcagtggttgtactgggaagaagtaagagagtgtccttgtttgtactggagacactgaggtatctgggggtgaggggcatcatgtctgtttactgtcagatggttgaggggaaaataatgttctttgtacttgcagattttttggaagtttgagatgttttagaatttgtaaaaataattatttttaaaaccccaccatgctatctcctgca

SEQ ID NO: 12754 - DNA, 3663 bp, Homo sapiens
gcggtactgtgacgtcacctgaggggggcacttccggtctcgtgccgccttcccaggaccctcagggagagcgggcagccttccaggtggacagattcaaacgctcaagaaattaaggacatttatggactaaatggacaaatagagcacaaactagctttcctgagaactcatgtgccaaaggacatgaaacttgtgctcattggccattcaataggcagctatttcacacttcagatgctgaagcgagtccctgagctcccggtaattcgtgcctttctgctctttccaacaattgaacgaatgtctgagtcacccaatggcagaattgccactccacttttgtgctggtttcgatatgttctctatgttactggctacttattattgaaaccgtgtcctgagacaatcaagtccttgctaatcagaaggggccttcaagtaatgaacctagagaatgaattttcaccattgaatatattagaaccattctgccttgctaatgctgcctaccttgggggccaagaaatgatggaggtggtgaagagagatgacgaaaccataaaggagcatttatgtaagcttacattttattatggtactatagatccttggtgtccaaaagagtactatgaagacattaagaaggattttccagaaggagacattcgactctgtgagaaaaacatacctcatgctttcatcacccattttaaccaggaaatggcagacatgattgctgactccctaaaggatgacttgtccaaaatgtaaattggcctgaggaacaagcccccactgccagtacatggaggcagtcagtgtactagacttagtaggtaaatgtttaattttgaagactgatattagaaatgaagaaagtgagaacctttgtcttacaaaccaactctccgctcgccatgttataggctgaagtaaacacagttgatgaatcattccataggtttaaccatacattttccaagactcagggaacacagtgatctacacagagtcttgtgtttgcacaagatgcccagtggcaccatatggtttattttggtaggcaggatctttgcagatgaaaaaaaaatctacatgtacttgattttaattgagttacattgtagaataggctcctctggaggaaattatgaaatacctactagaaaatgtaaaataaatcagtgaatgttaagagtatagttagatatgtgaagtgtatgagattatgacaaggatacactcatgttccaggagcaggaagtgaacctgggtctcctgtaagacagaagatgaagatgagcccaggctaacttagcacagatcttggctgagatcatcaatgtgacgtctaatgtacctgcactagacagagaataaagttcaccagacattactctggtcagctaaccagataaagaattgttgaaggaccccaactgtgcctcctgccacaggacaaccagcaagttctatgctgagccttagcctcccaggttataagctccctgcaggctcctcctctccagagccaggatggagaggcactgggctgtcccaaagcaggcttggatgtgccaacgtacagttgctccttctgtaattcttgcactaaaactccattaaagaccatcaatgagccaaatagtgtgctagccattgaggatggagttcttagctacttaatgattcttttcttctggaaatcttctagtgaataatttttaaaagcttcttttaaactgctcagtaaaacattgccatacattaactctccatttctgcattaacttcatttgctggaaagaaattattttgttaatgaaccaaacccagccattaagttatgtgaattcaccttctctagacacattgaggtatggcagagaagacacatattccctggcctagagtgggctgacaatattgctgcctcccctaaattgactcaatcttgagaaccacatactgcagtgacagttgatcatggatcagaaatattcctttttctcctagaggaaatccctcatggcattatcattccctaaggacaatgagatgtccctccgctcaaatcctaaagccccctgatgaaagatttggctctgatttgctgccaacttattggtaagtgctgaatgagttactgtgctttggcatagcttctacatcacagcaagtgacttctcagaggggaaaagccaagctccagacaaggagtgctgttagcccaaggggaagagctaatagatacataggccgtaagcacagggctgtacacagatcctttattggcatctgcatgagaggcctagaaatcggatgttagaagctaggaatcatggctctgagcgccttgcatacaggagatactcactgatactaaatcaaggcatgtaaacaatactgggtaaatcatacctaccagaataaagagtaacattcagagcttttcttttatctgttattttaaatgttactccatatttcaaaagtctgcacgtatgaaattgtgtcttatttctggtttttagagcctaagaaagatactcattcttaattcctatttatcatctgaaaaccaaatgaatttttgaaataaatgttttaccagcatttctgacctggtctggcctgatctctgtgttgggcaagagagggtacaatttgagcagttctcctgagttagactcggctcaaagtctctcttttaaagtgaaaagccacctttctcattgcttttttcataggtggaagaatcagatttcaagagactgaagttcattctgtttcattagggattagactaaaatggacaaacagtggaagaaatccattttccagaagcagctctgcctgtatgtcccagtcaaccacatggatggtctttgtgaaagttttaacttcctgcagagttaccgagtgctcagcgattgagctttgaccacacccgtgtttgttcctagtctgttcccagccataagcatctccacaagccctctgtggcttgtgtggcctgatgtccatggccaccaagggcctctcaccatacgcttctccactcaacctttggagagacacggaccaccaaaggcttgatttttcttcatcctacattatattcaaaacaaacaggctgggtgccgtagctcacacctgtgatcccagcaccttgggaggatgagctgggaagatcgtttgaggctaggagtttgagaccagcccgtgcaaaaaacgagacctcgtgtctaaaataatttttaaaaaagagcaaaaaaaaaaagcaatttcagattaaaggagactgaagagacatgacaattggacacaacatctgattctgaattggatgtttttgttataaaagacattgttgagacaatttgcacaacttgaatgaggtctgaagattagctgggagtaagatgccactgttaattttctgatttcagtggttgtactgggaagaagtaagagagtgtccttgtttgtactggagacactgaggtatctgggggtgaggggcatcatgtctgtttactgtcagatggttgaggggaaaataatgttctttgtacttgcagattttttggaagtttgagatgttttagaatttgtaaaaataattatttttaaaaccccaccatgctatctcctgca

SEQ ID NO: 12755 - DNA, 1179 bp, Homo sapiens
acttccggtctcgtgccgccttcccaggaccctcagggagagcgggcagccttccaggtggacagaaatggactcagaactcaaggaagaaattcctgtgcatgaggaattcattttgtgtggtggagccgaaacccaggttctaaaatgtgggccctggacagacctctttcatgatcaaagtgtcaaaaggcctaagctgcttattttcattattcctgattcaaacgctcaagaaattaaggacatttatggactaaatggacaaatagagcacaaactagctttcctgagaactcatgtgccaaaggacatgaaacttgtgctcattggccattcaataggcagctatttcacacttcagatgctgaagcgagtccctgagctcccggtaattcgtgcctttctgctctttccaacaattgaacgaatgtctgagtcacccaatggcagaattgccactccacttttgtgctggtttcgatatgttctctatgttactggctacttattattgaaaccgtgtcctgagacaatcaagtccttgctaatcagaaggggccttcaagtaatgaacctagagaatgaattttcaccattgaatatattagaaccattctgccttgctaatgctgcctaccttgggggccaagaaatgatggaggtggtgaagagagatgacgaaaccataaaggagcatttatgtaagcttacattttattatggtactatagatccttggtgtccaaaagagtactatgaagacattaagaaggattttccagaaggagacattcgactctgtgagaaaaacatacctcatgctttcatcacccattttaaccaggaaatggcagacatgattgctgactccctaaaggatgacttgtccaaaatgtaaattggcctgaggaacaagcccccactgccagtacatggaggcagtcagtgtactagacttagtaggtaaatgtttaattttgaagactgatattagaaatgaagaaagtgagaacctttgtcttacaaaccaactctccgctcgccatgttataggctgaagtaaacacagttgatgaatcattccataggtttaaccatacattttccaagactcagggaacacagtgatctacacagagtcttgtgtttgcacaagatgcccagtggcaccatatg

SEQ ID NO: 12756 - DNA, 26121 bp, Homo sapiens
gcgtaacgtgagctcgcgaccagcgcgggggaggcgcccacacgcccgtcccgtcttggtgtctggccccaggcggccgcgcctcccctccgaggtggtcccatagcccctgcaccaggcggcccgcgcccgcgacctcaaggcggctgccccgcgccatggcggcccggctgggtgcgctggccgcgtcggggctgtaccggcggcgccagcaccggcagagcccgccgccagccacggggtaggtggccaggggcggggcgggtggcggggacaatggccggaaagctgcggcggcagggcaggccttccctcggaaacccgaccggggccctccgacgccgtgggctctgccccggcgtcggatgggccctgggttggcgacagggtgggcgcgtgcgactttatctaacagggttggatgtcacctgtgatcagctctcctggcagggtgcgcccagggacctatgttagagacgagggagcctgtgtagcccccagcactgctttcagacgggggtgatcatgctgcactttatagatgagcagacaggttctgagcagagcagacacctgctggactcacccaccccaaacatggctatgctgtgatttgaacccaggttagactgactccagcagtggggttcaggatggtcctcagggcatctcagagaatgagttggctctggatggggaggttgggaggggcacggggatggtggtggagccacctcccctcactcttggggtcaggggcatgaggaggagctcctgaaaatgttgcctttgcagtgccgaggggccagcggggaagagagagcaatagggctgtgaccttggggtccttggcatcaaggtgacagatagggaccctggggaggaggccaaggctgggcagaagggctggggcgggggggcagggagggagccaggaacataagtcgcagaggtaggggagggcctggaggacccaggagcagaggaaggccagtgccacccagggcaagcatagcccactctcagctccttgtgtgtggtcagggaaggctcccagagtggcaattagaggactgagccatcaaagatatcttttgctgagaacagaagaggaaggagggcaccgagtggagggcgggaactgcaggccggcagcacggccatctgtggagtccctgctgcatgctgggctcccgcttgtgctggcatggcaggtctggggcagcctgctgttcaggtggggacccccagactcaggaggccaagtcactcacctgagtgtggcagagctggagcaggcaccctccctggtcaacctctggacagccctggatgcgtgtggcataactgtggtaccaggctgcgagtggccagggcactgatggccccaaggctgttctggagtgattttcacagtactgataccacagctgagatgcaggcaggacaggcacgatgatgacaggcctggggcagccctgagcatgcatgcgcatgtgactattcacactgtttttctttgaacttctggttcatgtcctttgtcagttctttgttgttagtgtaacatgtttcagttgtacctgcttaaaagaaaagccactagagcaaagagatatggcaagggcttcaaaaaagctctaatttcagacaggtttcatactgatttggagtctgtttctgatggtgtcaatgcatcttgtgtatagcagcccaggcagcatgttaattttttcttttttattttattattattagactttaagttttagggtacatgtgcacaacctgcaggtttgttccatatgtatacatgtgccatgttggtttgctgcacccattaactcgtcatttagcattaggtatatctcctaatgctatccctccccccaccccccaccccccaccccccaccccacaagagcctctggtgtgtgatgttccccttcctgtgtccatgtgttctcaatgttcaattcccacctacgagtgagaacaggcagcatgttaattttctagcgtccccatggtgggctggctttttgtacatttttgttgacctcatgtggccaggtgacccgacactggcctctggctggcttcatggaggcggggcagggaggaagcccaggcagtgctgagggactggagctgctccctgggctgtgctgcagtagggtccctccccgaaaccctctgcatctggaatagtgcctatcagtgcaggtgctcagtgaggacttcgttggaaggaggacagaagcatgggctgtgcttgcaggaatggcctcactgaaccctcccaacagtccctggaggtagctattcctggcccattttataaacgaggaagttgaggttcagagtcctgtgctgcaggtcacacagacagggggcgtcggggccagggttgcagcctggtgtgcctggctataggggacacacccttggtctgactgctgctcaggccgacgtggcctcagcaacacttgctcatcttgggtgtgaccagacttcttgtggctggcccccaactcttcccagatccttacacacacttccttgactcagatatcaggaaggctgggatggaggaaggtctggggttgttgaagaaacagaatccggaatgggggatgccaagaggagatgggaggaacatgagtccaatcctctgtgaccctcagctggttactgactctctctgtgcttcaatctccttatctggaaccagcctcctccccttatacaaaggcctggaacagagcaggctcctctgatcccacctcagactcagggacatcttgcaacaaattggcttgtattggctgtcaaaactgagagccttctggggtgctggagagggctgaggaagggcatgagatggtgtgctctcccccacctctggggtttggcttccaggctgggtgtgccctgggcagtatgttctacgtagtccagctgggggtgggtagtggtgtctcctgggggataactggacagactctgtgctctctatcttgaaggaatgtgcaaaggaggacatggaatgtccacgtctctgaccctctgacctctcgcagggaccgcaggcagcctgcaggccttcccctaggctgagccatgcagagggactctggaaggctcccagagttgctggaaaacaacagttctccttatccagcgctttgccctgcctggcctggtgctctgtgctggacacgtgggtgccattcattcactttggctcctcgatgtggctgtttctctggtgcacctctttacaaaagagaacgtgaggcctacagaagcgagcatctctctccaggtcccaggctggtggctggggctatcacgtgtagagctgagcggctgggcccaggcctctgccggcctctctgtgtcacactgcctctcttcctcccctgcaggagtcaggaagcgtgttctctcatggtgctgtgtctccgttgtctctgcatgcttctgtctgtcccgtctttgctcttggagcagaatgttccctcacagagctgctgttaggggctctctgtgacttgggctggggcagcccctgggcacaggaaggaggtggccacccccacatccgccccccccacccccacctatgccacgctttgtgcgatactgtcggccacaggcagcaatgatctccctggatgcattcagggaccagccgaggaactgcttacagactggctatcaggtctaactggaagatgagccggaaggtagaggagagtgtgtgtggccaggctgctgtcaggttgaccaggtgtgtccagcattggctccttttggtgggttcttggtctcgctgacttcaacaataaagccatggaccctcacggtgagtgttacagttcttcaagactgtatgtctggagtttgatccttcagacgttcagatatgtccggagtttcttccttccggtggggttgtggtcttactgacttcagaagtgaaggctcagaccctcccactgagtgttacagttcttaaaggtggcacatccggaattatctgttcctcgaaacgattcctccccgtcggttcatggtctcgctggcttcaggattgaaactgcagaccttcgctgtgaacattacagctcataaaggtggcgcagacccaaagaacgtgcagcagcaaaagctactacaaagagcaaaagaacaaactttccacaccaagcaaaggaaccccaactggttgctgctgtgggttcgagtggcctggttttattcccttatttggcccctcccacatcctgctgattggtccattttacagagtgctaattggtctattttatagagtgctgattggtcagtttttaccaagtgctgattggtgtgtttacaaacctttagctagacacagagcactgattggtgcatttacaatcctttggctagacagaaaagttctccaagtccccaccccaaccagaagcccagccagcttcccctttcagtgggaagcaaggtaactggggagtgctagttgagggtgtgtttatgaaacggcgagggaggaagggtggtgaagcagctgggctagcagggcaggagtgcccataaccacaaggaaagtcacaggtcccagcagcacctggcccgtgggagtagggtcagcacagctggaagccagagggggcaggcgtgtgggtgcaggccctaaacagcagttcctggaggcagagaacaggagcctggaagggggtgcgagggatgtgtgctcactcactggggtctagaggtctggctttaaggcggaatctgaaaggctggggctgggtggaagtccttaatttggcttcgttttctgggtccttggagtgaggaattccaggcccagagccatgggatttcctgttgatttccgacttctctaagactcccaaggtctcgctcatgggcaggcactggaatgtcctccctgccaccttgggtgtgtgtttcagaagaggaggttcacagtgttctcccggaaggaaaccaagcctgtcctagtgaagccctgcccagccctcgagggtggcttggggcggccaggctccaccttggtggcctgcctggctcgccccgtggagaccagcagggagctgggagcactgaggaccagccgctgggtgccgaggcctcctttcttcttggtttcttcccaactcctgttgccaccatctttgcttccttgcccctctggcctaaatgtgggctcgcatggtggctttggtctcctaagcaccccagagggcaggccaaggtggacagaagcccagcatgcccagaaagcctggttgaatggccttccagacagcctctgccacatgggtccctaagcagagaagaaaggacagcctgggtgcccctttcaagtttccagtccatctccatttcgcagcagcctcctgtgagaccctccgcccacagcccatgcccagaccctaagcgcagccctgtcgtccacccctggactcatcctaaggcccctcttctctgtggttgacactcttcagactggccctgcccagattgcaggccgcagaacagcccgacaggagcctcactcaccaagcatttccctcatgatgtcgcggcagtgactgctgggtgggattcatcctgggaggcagagcaggcggagaggtattcccaaaggcactgcactcgagtcctgccaccacccggctgcaaccaggcagacgttaccagctggttgcgtcactccccagcgagcctgatgctccctctctgcccagtcttccaggaatccactggagttgacacttgagacagaacccacgttctcccttcctagcaaaaggtgtggggtatccggttctttgaaggtcgtagaggcagttggggtgtttaggactacatcctgaccctgtttttgagtctaaaaggcccctcctggctgtgccgaagggccctggggctggactgattgcgggcctggctcactgtgggcttttcccctgtagttcgcatttcacccctcccagaaggaaacccaccactgactctggggacaggcagtgcccagtatggatgagatttgctccccctcaccacactcccgtctcgtctcaaagattcatactcttgtcttttttatttattttttattttgagacagggtcttgctctgttgcccaggcctgagtgcagtggcactcagcctcggcctcccaggctcaagccatcctcccacttcagcctccagagtagctgagactacaggcttgcaccaccacacctggctaatttttttgttttcttgtatttttattagagatggattcttgccatattgcccaggctggtctcgaactcctgggctcaagggatccgcccaccttggcctcccacagtgctctggatgacaggcttgagccattctgcacacgcacccagctaccctcttgcctgctctgtgtttgggtggttatgtgtttattggaggcagtcagtttgaaactaactcatggtgcagaggatggaaccatggaagactgagcagtctggattcaagtgtggaccccgctctgctgtgtgagcttgggcaagttactcaacctctttgaggcttaggtcccttttctggaagaggccataataatagtagctgcagtattgccctggggattaaatgagagtgtgaatacagagccgctcacctgtgctgggtggtgttctgtgtgcgagactctctggtccctgaagaaggggtaataggggcccaagtgggagttgactgggcccctgacaccccaaggggtgggcactacaagcactgagcagcctggaccctgggttagagcgattttcctgatcctgcagagcgtcttcactttttaatacgaggtgtgtctgtcgggcgcaggcccccgcgtgtgccccatctgcacccctgaccagctctgactcactcctcctgtctcctgcccccagcaatatgtcggacgccttggccaacgccgtgtgccagcgctgccaggcccgcttctcccccgccgagcgcattgtcaacagcaatggggagctgtaccatgagcactgcttcgtgtgtgcccagtgcttccggcccttccccgaggggctcttctatgaggtgaggacactactgagggctttctcagacccagctcggagtctgccctctatgagcgggtgggccgggctccatgcagtggtcccgactggtgacagggccaggtctggagccagcccagaaccaggcttgagctcctgcacgggcccatccttcacctgtgagatgtgaacagcaccccaggtgccctgggtgctaacagagagccacctttcaccagcctcctctgggcagatgctgggcaggccctgggggcaggaagagcctgccctggtggtgcttgccctccctggggactagacagtgagcacagcaaccgcatggcccaccagctggtgctgatgccctgggggtcagggttcccggggtggggtgcggtggtgctcagggaaggtgaggtttgggcacacctgaggggagggagacatactgggcagagggcaccgcatatgcacataccctgtggtgggagaacatggggtgtatggagagcagtaggaagactggtgtgatggaagccgagggcatgagagggagaaggccaggagctgaggaaagggaggtggatctcgcttggccccacgggcctctacggagccataggcttcccctctgcaagaggcaggagccacctcggggtgtggagcagaggagtcacactatctgctgacatttgaaaaggtgacctggccgggcgcggcggctcacgcctgtaatcccagcactttgggaggcggaggcagatggatcacctgaggtcaggagttcaagaccagcctggccaacatggtgaaaccctgtctgtactaaaaatacaaaaaatgagcctggcatggtggcaggtgcctgtaatcccagctactcgggaggctgaggcaggagaatcacttgaacctgggaggcagaggttgcagtgagccgagatcgcgccattgcactccagcctgtgggacagagcaagactccatctaaaaaaaaaaaaaaaaagaaagaaaaaaaaaaggaggcttgtggccgctgtgctgaggagaggatgtaaggcggggcaggaacagaggctgggccaggaggctggggggaccaggagctgaattagtgcaatcacccagatgaaagtgaaggggcccccaccagctcacaggagcagtcgttaaatcatcaacaatcttgggagctggttgggcaacagagttattgtttaaaaattaaattatatcagcgtacaatgggatacaattttattaaaaacaaaggtaacaaatactcaaagcataccacttgctaattattttgttccactttactatcgtctatgctgatggggttatttctgtccattgtgctggtgtggccactgcacatctcccctcaagtccacatcgatgtcatgttggcagccaggagttggccatgacgggaatattcacaccatggacactggcaaacgccccacagcagggcctgcctctgcgccccagagagctggctgttgagcatttaccagaacatcacttgtgcttgtggtggcggtggtggccaggggtcagatgctggctctgtttcaaggtagagctgatgggactggctggtggatggatgtggggcctgtggtccgcctggcagagcaagagccgctgttcctcacagtgtcttcagcctcctgaggaatgctgtctaagtgtagaggcagcgggaggggtgggcaaagctctaggaggggtggccatatgcccagaacaaagcctctctctctcacacacagcaggtgcccagaagattttcattgctgaaagagtttaagcccttcctgactctacaggtcactgggtagggctatatccagtttagtctaataagacactcattttagagaacagggaaaaaccaattaaaaaacagaaaatacaattgttagaggaaagcagaggcaggctttggccccgcttgtggccagcacaggggccctcgctggcagctgccgcctggagggtgtgcacactggctcctgctggccgcagccctgagctcttcccacttccccgtgcccaggcccttcctgcgttcccttccttctgtctcctatacccgggtcttcatggcctctgagagagctggatactcccacagagaaggtatacgaaataggaccaagtgacactacacttcagactggatctcatccctcctggcttaaaaccgcctcgcccccagcctgttctccggaccaacagggtccagatcctcagtagacaccagtggccctttgacaggtggcctcacggacctctccagcttccacgggggcacctccctttgcaccccaccatcccaaaagggccagtgtcctctctggccaggcctgggacccactgctccagcctcagcccggcatgcccctgcctcagtgcctcatcccctgctgtcaggtcctgacccaacaagggcctgggctgctcatggggatgataggtggtttgcttgtcctctctctgcgacccctttgcagtttgaaggccggaagtactgcgaacacgacttccaaatgctgtttgctccgtgctgtggatcctgcggtaaggccggtgacagtacacatcctgggctgcctgggaagtgggcagcagtggcggggggcagggggccgagggggtacacagaactggcccagctctttcctaactccccaccttgcctctctgagcggcagccgtcaggccccctacaggcatcaccatcccacgagggagcccatgggccaggcagagagcaggcggagtgctaggtggacagggcttgggagggtccgaagaggggacaggcacgtgctccccagccagcagggacctgtcttcttccaggtgagttcatcattggccgcgtcatcaaggccatgaacaacaactggcacccgggctgcttccgctgcgagctgtgtgatgtggagctggctgacctgggctttgtgaagaatgccggcaggtgaggtggccgtgttgggccagagaggactgggccacagcccttcctggcacacctgccacctctcctgtgtgctacccacttgctgagggcgcagaagggtcccggtgctgcagcctgcactgatgtagctgccctccctccaggtcaccccggggcggatagtccagctcccagtttacagggccccacgctcagcgagctcctggcagcctctcgggagccatgagaaatcctcacactctgccacccccctggccaccccatctactgaccccacctgtccaccttctcctgcctgtacctgtgcagctcagtgtggctggagggagatgcccacatttactctaaattgagggccacaaacctcatgggtactccagaagttcccaccttctgcgaacccttggtctctcatcctcccttcccaagcactgtccctatagcaggtggccttgtctcccacctcccctggccctagctctgagatcccgtgcagcccggcctctgtctgtgagccctgttcatccccacactttctccagggcttgcttctccacgccactctctcgtcctttctgaaggactgggctggggagctgggttaaaaacactgctgggccttcctccccggcttctcccagcacacccgctgcccctcgcgtgtgctaccctggcctcatctgcccagggacccacacctcctcttgacccctcagcagccctcaccacagctgctgaggtgcagaaacgccccccttctggcacccgggaccctgagttcctgtggttctgcccgcccccacagctgcacctgctcactcccctcctctgagtcacctttctccctgtctctccatggggagtcgtctggggctccgtgcccggccctcatggctgcccttgcagacagaatcctagagccctaaatggcacatgtgtctggagaattccaggctccacttcaggcctctctctcgctgtcctcagctgcccacatgtcacctccacttggtgtccaccaggcatcccaaacgcaatgaggcacaagcagtttgggattctcctccactgaccaccaaggctgcctctgcatgcgtcccctgtatcagtgagaggcagcgccgacccccagaggccccagccatgcttcccctgccacactctctctgtccgggcactctgctccctcccgcagctcctccgagatgcttccccgacactaccgagctcttgtccgtgtgctgcccgtgagagaggcacgtggcctggggcctggcgtccggcccactgtcctcggagctgggcggtgcctggcattgagcagcttgtctaaatgaagggctgaggggcagacggtgcagtgcaggggccgagggacagcaccaggagctcgtgctgaccagcaacgtcgccgacagggtgtgtggagcgagcccaatctccttcctgagccaaggtttgcacagggccactgccccaagggctggttggggaaatctgaaagatgctggaaacgttttggaaagtcaaacatgctacaaaagcatgttgccgtaaggacggtgcagggtggcagctagagtgaggaatgagggcccctacttggccctcccagccccacagtgcagaacctcagaatctgggcagatgtgctgtgagctgccagagccccagcaagagagcccacgaggctgcctctgccactgtaccaccacttcaccattcttgggtcagagaagttctgggaaacgcttcatgttgaccaaacataacaacctgtgtagtcttaaagctacagttatatttatggtccgtacaaacaaatacaaaaaaggacatgttagggaaatatctgcacactagcaagggaaatagctcaggcggagagaggcctctctggaggaagtgggtctgggtcagtgggaggcaggtgcacagcccagccctggcctgagctgagctcccgtgactgcacatgcttgtccaggactgggaggcctgggagcctgtcaaagagctctgggggttgcaggcttgtgcgtggggttacagcaggagagatccagaatccagagctgtgctgagtccctgcaggccgtgagtgctgacgtccgctggcaaccagcctgaaatgtgtggcctgtgtctcttcaactcaggcagtgtgtgtctggcagaggcactacagaggggactcagagtaccttgcactgcaaaggagtattgagactccctccccgtccccaccaggactcccaggtccctcttctgggtcatttgcagcctgccttcagggtctttctgctgagcctcgccgatgagcgattctgtagcgggaaggaggctgggagcctagcgggaaagaaaggcctccattgttcaggggttgttcttccggcctcctctctccctgccacagatgaagtcgttgagtgtctaggagccattgtagccatcacaagcccctgcagaggggtggccgatggatcccctttgtcagttcttcctttttatgggttgagactaggcgatctagagaaatggtgggcatctgctgagatttcaggttgcttgctggggaggtggctggggaaagggcagatgcctcttgctgggtctgctgagtcctaaacagtctgcgctcggcctggacggcgccccccgctcacagctctgacttggcactcagcgagctctcgttggttttcccttcgaagctggggggcgggcccttgagccttttgccacagagcaagttgcacagggcgtggcggaacttctcagccacgaagaaatacatgatggggtcgagtgccccgttgaggctggtgaggcaggaggtgatgcggtttgccagggccaggatgcgctgggtggcgcaggaggccccatggctgcggtagtgcagcacgtagacggagcggttgacgtggtagggcacgaagcagaccaggaagatggccagcactatggcgatcatgcgcactgccttggtcttgaggcgcttctccacacgcaggccctgccgcaggctgcggatgatcagcaggtagcaggtgaccgtggtgatgaacgggaaggtgaaggccactgccagggacaccagggcatggtgggaggccttctcccggtacagctgcaggcagaccaccgtgtggttggtctgcacggtctgtgggctcaccagcagcggggccatggccacagccaccaccacccacaggaaggcacaggccaggtgtgcgtagaggggcctgcggagcttgagggacttgaccgggtgcacaatggccaggaaacggtcggcgctgatgcaggtgaggaagtagatgctggcgtacatgttgaggtagaagaggaagccggtgagacggcatgcgatttccccaaatggccagtggttcccagagaagtggtagaccaggcgggtgggcaggaccagcacgcacgacaagtcggccacggccagatgcatcaggaacacgttggccggggtcccggacttgtggtctcggatgaaaagccacagagccagggtattgccaactaaagccaggataaaatccagaaggtagaaggaggcgaacagcatgttctccagtggcgtctcctggccacattgctctgccgtggccagggagaagttggtgatcagacctgggggagccacttcaaggccattcatgctttggctggagtcagagcctggagggaacaagcaaacagttcacaatgagcttgcgatctaggcagcttcacgctctctgaagtccagaagtcaggcctccaatgccttcagaacctcccactttcaagctcagcaccgcccacggggctgctgaggggacctccttgtccatttggtgtgcgtgagcgtcagaggcattctgaacttcagcacaaggcaaacgcagaaccagggcttggaatttcgccgctatgcagctgcacccctgccacccaggagatctgaggctcctcagagctgggaggaccgggtcagtgccatggcggggaatgggacgtgagccttgcctgggtgaggctctgggttttctgttctgcctctgaggtgtgctgtctgagtgacaggggtggtgaggggcgggggcagtgtgtctccgggattccagctcctcctcagcccaagccttggcaggtgagttctgttcatcctgagtgcctggaccctccctgacccacctgcccacaggtgcagtggccggggtgtcaccgctttctgcttcccctgaccatggcttgcccctggcacttaggagggtgcccccaggatggcagcaagggctgtaccctgggacgtcagaggtctactctttttacccacctgagagtttcagcatctctcttgggggctttctggatccagcccaccaactccgtttggacatcctgacaggtggggagacctgtgtttaggagaagcctgtgcctgggtatcaggccagctgggagtattttctctcccagagtagatccaccaccagggggcagcatctcttccaggaggggaagacccattttacccagcgtcagagacactggccagcgctgttgaggacggatctgcagccccagagaggcctggaggcctcgtggcttgcccacgtttgaaggccaagtgcagagccctgtgacagtcctgggtaacaagtcatgtccgtctggtgaaccctgggtctggatagggtgctccccaccctcagcagagaaacccactcttgttttgattttagtcaactcagaagattgaagaaggagagtgagggtcccaaacactctgcctccccaacccaggcctgcgagtggcagtgtgggcaggcggtggggccagagcagcccgcagcccggaaccagggcaggacagcgcacctggcctgcctttgaattggggtcaccagcgggcttcggccaggtgggtgctgatgatggcacagcttctggggctcctctgggcacctggcttcccagtatccaccatccccaccctgcacagccaggctgaagcagaggctggagagaggtttgcataagagaagctggcatcctgcctgtgcccattgtggcagcaggaggggaggaggcacgggccacagccctggcagggtcctcatcctgggcgagcctggctctgcaccgaacagccggggtcctgcctgcagcaaattcactctgcacatttctccctgcccttccttccttccttccttccttccttccttccttccttccttcctaccttcctctctctctcacttcgctttgcttgtttgcttgcttttctttattttccttttttcttttcttttttctttttttcttttctttttccttccttccttcctttcttcttttctctttctttctttttctttctttcctccctccctccccttcctcccctcccctccctcccctcccctccctcccctccccccctcccctcccctcccctccctctcttttttctttttttctttctctttttcaaggtctccctctgtcacccaggctggagtgcagtggtgcaatcagctcactgcagcctcaacctccagggctcaagtgatcctcccacctcaacctcctgaatagctgggactacaggcgcacaccaccacacccggctaatttttgtattttttggtagagacggttttgccatgttgcccaggctggtctcaaactcctgggctcaagtgatcctctctccttggcctcccaaagtgctccttggcctcccaaagtgctgggattacaggcatgagtcactgcgcccagcccctctcctcttactgattccacagggctgtctcaggatgctggtggcacggggcagagagggcatggtgactgttcatggacacagcagcccctcgaggaggaggctggagccatcctcatatggaggagaagcaggcatggtggtggccctagccctagggaagggtgggccgcacccttccttcaggagagcgagtggccagctgctgtggccctcacatggagggtgagggctggcccgagcacctggccatcaatgtcctcaagcaaaggggagggcaactacctaataatattaccttttagctatttctctaggcaggttcccctacctgaaaagattgcccccggcttcagagtgtttcaagatgcctgaagttctaacaccagagatggtttcctgctgcttccaggaacagggtctgttcttagtccaatgtggagttcctcatggggaccccattccccaggaatccaggttccacagtactctgacttggtctggctggtctcggctggcactttccctaggactgctaaaaccacggtgagggcggagagctgagggccgaagaaggcggggtgagtgatgcttgggagagggagacaggcttggctgaagccctggggaagggctgagggctgtgaagggggctgtggaggagaggtaaaaggagggaggaacacagcccttgacagggcctgtgaggcaggggagaacagggagcaggtaccggtgggacggtggcaggggaggggggcccatgactttgagggtgtcgtgttgcatgtgctgggggtgaggacccggagactggaggaacagggctccagggcagacgcatgggcaagcagagaggacagcccatggtagatgggaggggcacacaggtgtgctgttttcaggttggcaggagaggaggaaggtgtgtgcggggaggccctggagactggaagaggagagggggcccagtgagtgaggggcccttgttagaacctgggggtgggaaggggccaaggtgggtgccctccaccccaggctgtccctcaggcctgtgctgtgccccacagtgcaggcatcacctggccccacgagagagcagctcataggtacgactgaccactctgcctggcatggtgggggcctgcctgtgctggctcaaaccagttttagccccatgttgcaggttagggagtcaaggctgagtgtctgctaacttgtcttaggtcacttgaccaggggacattggccctggagctggaagtgagaccggggaaacggtctcactccctggaagaccgccagggtggggagtgtgactcagtctcagagtttgccatggagttgtctcccaggctcagcaccccctcctggccctggggccactccctcattttaggggcccatgtatgaaatgagaatgtgcagccccttgctcaaaaaggaagagtttcaggacagtgacggcagagtgttactgggctcagggccctgagtgacggcaggggtggcatatctcatggcaccaggtgggcctgtggtgcctcctgcctccagcccgggggcctcagcctgggcactgccctccacttcctgcccgggccgaagggcgtgcccctcgctctctctgggactgagactccattttaaacagctttctggttggtttcaggtttgctgaggtttcttctccctttctgtcccccgtttgaggagttctgatactgattgttgcagtttggtctgagatgggccccgcttcactctctgttgccctttagaaacacaaacttcagtctagactcgctggttcctcacgactcactggtcagacggccaccgagccggtgtccgtaagaggaaagggcgtggcatgggccggggcctgggcagtgttgggtcccgtggctgtgggtgagtcgagcatctaggacaggtcataggcctctgtggaggtggcaggtgggcatgtgtggcctcggggagggcctgtggtggcagcgccatggccaggtggtggcagtttcctttgcattagcgccactccatccctggcccgagccctctcccaggcatctggctcctctatgggtcaaggctgcctaatggttaggggcagcggtgctgtcattgcagcctggactgccggcaagccacttcccctctgcaagcccccatcagagggacgaaacaccgctttgtgggctgctgtgaattcagactgtggtcagccttcgatgcacaggtcagaccatcaccaaagagatgggacgagacaggctgctgcctgtctccctgggcagggctccccgctgagtgtttcctctgcttagccctgggctcccagtccaccccacccagcctgccccttacctctagctgctggtccgggaggaagggacaggggtctgcggggcagcaggtgatctccgcccgtgggtgtcggtggtggcagggggctccttgccgctgtgggtggaacgctggctatttaaggagaggaagggagaccacagcccctctggccctgaaaggctgcttcattcctgaggggtcccttgttgtgtcgggctgctcctctggctgctgctgctgctgccaccggagcgtgaatattctagtgtgtccctagcccatgccccccgcccccagcttggccacatagtctgagtgtgtgactgtctcagagactcagagcaggcgggggctgggtggggggcttgggctggagctgagggacacaacaggacgtttcagaaggggatgatttcctactgatggggggcagggaggggccggctgtcatggcaacaggcggcgctcccaggcctgcgcccgcagacggcggagggggcctgtgaacggagggtgggaggccgaggagtcttgctcacggagtgagaggcgactctttgaggacacttgctgtagggtccttgtgtcctgccctgtataatgaggccccatttgggcacacagaataaatcatggcctttatctggagcgaggaacagctgcaggagcctcataatggggcgctgtcctgtccgtgaggatgcggctcagctcagaggccgggtgctcgccggtgcagctccccttctgcacggaagcccatgaatctgaccgctggcctggggctcctccctggggtggctccgggctggggtgcctttgaatgctgccggcggccgcctctgagactgagtgaacaaagttcatttctctctgtctttctgaaaatgatacatccagcaacatgggaaaccaaatcacccttcctggtttcaaaagactttacattttgttgtttaaacattgaaaactgtatgtatgtggctagcatttaaggggcagtgtcttaaatttgtctcttcacatcaccctgtgcagctgggattattgccccattttacagacaaggaaactgaggctcaggcaaatgaagaaactcacccatcaacaaacagtaggaagcaacagagccaggatttgaacccaagcacatgtcactccagaacttaggctccgtgtgtgtgtgtgttttgtttttctgctgcattttgaatttagaattcttagatttgatcctaattcaacctgaaaaagaattctgaaggccacctttagatctgatgctgtgatctggtctgttgagaagctgtttcccatctggacttccttcaagagagatgggcttcccagtttgtctggcctgagagccagctgggtgtgaggtgtctgagccggggcgcaggtctctttcctgttgtgcccgcaggcggctgtctggaagaactggcccaggctggttggaaaggtggtggcttgaagctaaccaccctgagcagggcatttctgggctcacagaccttctgttattggggtgatcactgtcgatggcttcaagggcattgaccgtggtgatggagttttgaggcgttgagctgattcctgcatctttgagacagaaataattcctcgtgggttgagtgttgtcctgacgctcaggaggagtcaccagaatgtggagtggggtcatggggcctacatgctgagtctgggacagaggcaccgcagggggcatgggctggccgccataggcgccaggtggggcagctcagccccagacctgctgaggaggtggcctggggttggggctggggcacaggtgtctgggcaagggtgggcttcagggattgtggtgatgaagactgaagccacaggccacaactgcttcccgtcgctggggtgtaagagccagggctctggccagtagtcgaggggagatgatgcccaccgaggctcccttcctctcttgtagagtcattcattcaccgaggcattcggtcagctgaccctgagctgttgccccctgctgggcacatagggtcttggggaggcacagagagccagtcggcagcttagccagtgactgctgggcctttgtttgggccccttgccctgcacacagctgatgatgagacaccccagggcagatggagcacagtgctgtgcaggatggagtccagacacccagcagtagcaggtcctggggtccagggagggatgctgaatgggtggccctggcatctggggtctgcccaccataacctgggtggggatcttgggtctgcgattggatctcttccgtatcctccctgaccagcctgtcagaggggccaacactgggcgtcgggcagccgtggaggctcgtgaggagtggagagggcccctggggctggggggcctgggaagggaggcctggatgcagcaggagcaccagagagagattcgggtggcaggtggagacgggggccagggaggttggattggggcctttgtgtatctttgcctggggactctgaatctagattcctgccacctttgaggtccaaggaaacagaaaccatgttgatttgtctctccgttgagaacacagctgtcgtccaacacagcgagtagcatcagaaattattctgaggtcttcacaaaaagactctgtagtgacagttcctgggtttgggggcctccatctgacatagcagtgcttgtctttggagacagaaatcgcctgtacgtgtttgggcccttcttcatctggcaaaccccgaaggaagggggtgagtgggcctcccgggacactcactggccactctgctgggcacagtgacactcattataactcgtgtgtgttaaatacattgggaaaataatgctttcagcagatatcaattaaatgtctactgtattctgcagcatgccccaggcttagagaaagtagaaagaggaaaataccatccagagacagtaacctcgagcattctggcatctttcctgctgagcatgcgtcccattcccaggacacacttgtgaccttctgggccttgtgacagggcagtctgctttcccataccctgggctgagcccctttgaagcccccagctgctcagtgaagttgcaggggtctggcctctcttctcctggaggtggccaggctgtgtgggagtgggggctctgcccctaatgcccccgcctcccgcaggcatctctgccggccttgccacaaccgtgagaaggccaagggcctgggcaagtacatctgccagcggtgccacctggtcatcgacgagcagcccctcatgttcaggagcgacgcctaccaccctgaccacttcaactgcacccactgtgggtaggtgcgcagcccggccctgcagttgtgggggcggggagccagggctggcccagggtaagggcggtggggcctccacctggggaagtgttgaggagggagaggggagcagggtgggcagacagaggggtcccgagagcaaggctgcagggcagaggtgggctgggggctgggaagcagccatggcaggaagcttctctctccagggctctgtttggggggcacttgagactcaggaggcgggtgggctggacccctagactgcagacgagggttgagatggagcagtggaagggacctgagggggcagggcaagagaccgggagtgggcttggtgctggtgttggagagaggagttgcataggcagcccctcagcccccgtcctcgcccacccccaccgtcccctccagtcctctccgtgcctatccagacaccccctctggtttggaggaggaggggggcccaagaacagacctgcttctcagaggcctgggtgcagaacacagcccactcttctgggctgtgcaggaagtctgtgctccagggcctgtctggggcacaggaagtcttcaaagtgcccagagatcagaaggcgctgccgcctcggctctgcagggacagaatgggcccctcggggagccgtgccctggggtggaggcgctgctggcatgaccctgcagaagggcaggggtggcacctgggggctgcacgctgtcttccaggaaggagctgacagccgaggcccgcgagctgaagggtgagctctactgcctgccctgccatgacaagatgggcgtccccatctgcggggcctgccgccggcccatcgagggccgagtggtcaacgcgctgggcaagcagtggcacgtggaggtgagccaggctggtggacacgtggcctcaggttggggggtgccccagctcagggtcatggtaagagccctaaagctcctccacactcccagcccagggcgggtggctggctcccaacgaggcccttcctcaggggtactgcccctccctgtgctcagccagggaccccagcctgcccacgggagccaggagacccgagtgcacacacacggttgggtagctgtgcccacctctcctcttccccctgctggcattctaagagactccaaggtcaggagaaaaccttgggggcagtctgtccagagtgcctgggggttgtggatgacagaacccgctgcatggacagccctgtgcagacacggagctgaagagttcctcaggtgtgagcactgggtcacctggagtgcccccaccgggtggtgggctctcatgttctcatgggtacactgggaacagtgagcccaccacctcccctgatgacctggccagcgctgtgtccggaagctgtgccttgggtggcggcttgggtgggaggccatgcggtcctgccctgatgcaggccccagcccccagccctcatcctcacatgcagatccctgggggaatgcaaggtgctgctcagtgatcccaggcttgcagggggtgcctgcaggaggccccacgtggacaggcagggccgcctctgcctatgagggcccaccatgccgcagcaccaggctggcacctgactcctggggctgaggctgccgagggggaggccagactgggaggggatggtgactcacaaggttaccatcagtgccttagaggaggggtagggtctgctgaccccagggcattcacagaggtgtcagtcccctctgcccagtgtgaatcctgaaaggcctgcacctgcccagactctgctttctgtccccttctgtcactgctgcctcctggggccactgtggtcccctggagtcactggctcctggggtcactgttgtccccgggtcaccactgtccctcggggtcaccgctctagccctgatgccacccggcccgccctttgtccttgcagcactttgtctgtgccaagtgtgagaagccattcctggggcaccggcactatgagaagaagggcctggcctactgcgagactcactacaaccaggtgagcccggtgcagaaccttcagggatgcgggtctggaggggtggccaggagagctgccgtgagcaagggaggctgtgggcaccccctcaggagctctgccaggtgctgagcccaggcctgcaccctcagccctggctcctggcctggggtctcgagacctgggcagctctcttcagtctcagtgtcttcctttgaagaatgttctggggctggtgtgaggtcccgggcacatggggctgacagtgccagcaaccccctccctcccttgctctggtacagaaggcagggggcgctggtgggatgcagtcaccacctgggcccacctccttgcaggacagcagtggccagagcagaggggccttctggggagcaacgccccagcctgttgtccttcccggaagggtggttctcatgggttgccgtgccctcaacccagccttgcagctgggccctgggaggcagggcctgggagatgcctgagaggggccgtgttggagggccaggctggctgcatgatggccctgggctggggtgtgactgcctgcagctactctgacagcctgctcggcccacagctcttcggggacgtctgctacaactgcagccatgtgattgaaggcgatggtgaggccctgtgttccctcccccaccccacctgctctcctggggcctgggtgctgcagctgtgagcccagccgggcctgcggcagcctagccaggcctgctgagtcccacgcttccctcacagtggtgtcggccctcaacaaggcctggtgtgtgagctgcttctcctgctccacctgcaacagcaagctcaccctgaagtgagtccctgtgatcgtgggatggggctcagggtggagggggctcctgcaggtccttcctctcagcagccctcctgcacaccagctgagtctggcctggggatatggtggggacaaggggcagcccggccttataccacccagggagatgggggcaggttcagggggtctaggggatccagggaccccagggaccccaggcacagtgagaggaggaggaacactcatgcctccaacacacctgccagaaccctgggctctggggagggaagggcattccagctcagggaacagcatatgcaaaagcagcagtgtcagctgctcatccaggaagcctcgaggggtgtgggatggctggagctgggagaggagagatggcgtccaggtttccaagggctgtggggaggcatagagggttctggggtttcagaacctgagagaagcctctgggaggcaagggaagcctcaaggcccttctcatccctatgctctctggccatctcaccctagggcctggcctgctggctaggagaggctggtgtggggaggctgggggctgagggaagcccactccacagtcacctgtctggggttaaaggggtgggcgtggggctctgctgacagctcagcttcctcctcaggaacaagtttgtggagttcgacatgaagcccgtgtgtaagaggtgctacgagaagttcccgctggagctgaagaagcggctgaagaagctgtcggagctgacctcccgcaaggcccagcccaaggccacagacctcaactctgcctgaaggccctcttgcgcagctgcctctcggcccctccgccttctcccctcctgctgtccatgcttggccccctcgtccccatccacctgtgccctccgcatcttaccctccctttctctttcctcattgccttctcccttcctgttccctcatctctgccttccccatgtctctcctctccttggccgtggcttctgtctgtgaggaggcaggagctggggagtgggagcctatgaccccacgtctgacagccatgtccacctgtgcccacagcttccgcccacagacctccagggacaggagcaaattgcaccacagctccccgcctggcctggccctccccaggcggctcagtggctcatgctgtcctgtgagagcccctgccccagagcggccccactaagcgcatgtggctcctgggctacccacagccagggcagcctgctggagccacagggccagggccatgcagatggaggcctctgggagccacctccaatccctcaccactcactcaaccagtggcacagtgtccttgtgcccacactgagccagcaagtcctgctgtccacacccacaagctacctggagggacaggacccacctccatccttcggaaggccttcctggaatcccaccttggcctccgccctcggttccgccccgcccctctccccccgaccttggggcttgtgtcgagcccttgggtggggccaggaggaggtgatggcgtcagaggaggtgtggtcagaggtgacttgttcccacctccagggaggacgcttcgtcttcggccagcgcagacctggtgtttgtttgttgggctcacgcttgcacaatgaaggcttgttcacacaa

SEQ ID NO: 12757 - DNA, 2111 bp, Homo sapiens
gcgtaacgtgagctcgcgaccagcgcgggggaggcgcccacacgcccgtcccgtcttggtgtctggccccaggcggccgcgcctcccctccgaggtggtcccatagcccctgcaccaggcggcccgcgcccgcgacctcaaggcggctgccccgcgccatggcggcccggctgggtgcgctggccgcgtcggggctgtaccggcggcgccagcaccggcagagcccgccgccagccacgggcaatatgtcggacgccttggccaacgccgtgtgccagcgctgccaggcccgcttctcccccgccgagcgcattgtcaacagcaatggggagctgtaccatgagcactgcttcgtgtgtgcccagtgcttccggcccttccccgaggggctcttctatgagtttgaaggccggaagtactgcgaacacgacttccaaatgctgtttgctccgtgctgtggatcctgcggtgagttcatcattggccgcgtcatcaaggccatgaacaacaactggcacccgggctgcttccgctgcgagctgtgtgatgtggagctggctgacctgggctttgtgaagaatgccggcaggcatctctgccggccttgccacaaccgtgagaaggccaagggcctgggcaagtacatctgccagcggtgccacctggtcatcgacgagcagcccctcatgttcaggagcgacgcctaccaccctgaccacttcaactgcacccactgtgggaaggagctgacagccgaggcccgcgagctgaagggtgagctctactgcctgccctgccatgacaagatgggcgtccccatctgcggggcctgccgccggcccatcgagggccgagtggtcaacgcgctgggcaagcagtggcacgtggagcactttgtctgtgccaagtgtgagaagccattcctggggcaccggcactatgagaagaagggcctggcctactgcgagactcactacaaccagctcttcggggacgtctgctacaactgcagccatgtgattgaaggcgatgtggtgtcggccctcaacaaggcctggtgtgtgagctgcttctcctgctccacctgcaacagcaagctcaccctgaagaacaagtttgtggagttcgacatgaagcccgtgtgtaagaggtgctacgagaagttcccgctggagctgaagaagcggctgaagaagctgtcggagctgacctcccgcaaggcccagcccaaggccacagacctcaactctgcctgaaggccctcttgcgcagctgcctctcggcccctccgccttctcccctcctgctgtccatgcttggccccctcgtccccatccacctgtgccctccgcatcttaccctccctttctctttcctcattgccttctcccttcctgttccctcatctctgccttccccatgtctctcctctccttggccgtggcttctgtctgtgaggaggcaggagctggggagtgggagcctatgaccccacgtctgacagccatgtccacctgtgcccacagcttccgcccacagacctccagggacaggagcaaattgcaccacagctccccgcctggcctggccctccccaggcggctcagtggctcatgctgtcctgtgagagcccctgccccagagcggccccactaagcgcatgtggctcctgggctacccacagccagggcagcctgctggagccacagggccagggccatgcagatggaggcctctgggagccacctccaatccctcaccactcactcaaccagtggcacagtgtccttgtgcccacactgagccagcaagtcctgctgtccacacccacaagctacctggagggacaggacccacctccatccttcggaaggccttcctggaatcccaccttggcctccgccctcggttccgccccgcccctctccccccgaccttggggcttgtgtcgagcccttgggtggggccaggaggaggtgatggcgtcagaggaggtgtggtcagaggtgacttgttcccacctccagggaggacgcttcgtcttcggccagcgcagacctggtgtttgtttgttgggctcacgcttgcacaatgaaggcttgttcacacaa

SEQ ID NO: 12758 - DNA, 2045 bp, Homo sapiens
gccacccccgcccacccctctcgcgggcggagcggctcttggccttttttgggcgtctccctgctccgcggcccgggctggcgggcgggcgctcggctggcggctgcagcagcagagggagacccgcggcaaccccggcaacccagggctcggcgtcgctgccaccatgacgggaagcaatatgtcggacgccttggccaacgccgtgtgccagcgctgccaggcccgcttctcccccgccgagcgcattgtcaacagcaatggggagctgtaccatgagcactgcttcgtgtgtgcccagtgcttccggcccttccccgaggggctcttctatgagtttgaaggccggaagtactgcgaacacgacttccaaatgctgtttgctccgtgctgtggatcctgcggtgagttcatcattggccgcgtcatcaaggccatgaacaacaactggcacccgggctgcttccgctgcgagctgtgtgatgtggagctggctgacctgggctttgtgaagaatgccggcaggcatctctgccggccttgccacaaccgtgagaaggccaagggcctgggcaagtacatctgccagcggtgccacctggtcatcgacgagcagcccctcatgttcaggagcgacgcctaccaccctgaccacttcaactgcacccactgtgggaaggagctgacagccgaggcccgcgagctgaagggtgagctctactgcctgccctgccatgacaagatgggcgtccccatctgcggggcctgccgccggcccatcgagggccgagtggtcaacgcgctgggcaagcagtggcacgtggagcactttgtctgtgccaagtgtgagaagccattcctggggcaccggcactatgagaagaagggcctggcctactgcgagactcactacaaccagctcttcggggacgtctgctacaactgcagccatgtgattgaaggcgatgtggtgtcggccctcaacaaggcctggtgtgtgagctgcttctcctgctccacctgcaacagcaagctcaccctgaagaacaagtttgtggagttcgacatgaagcccgtgtgtaagaggtgctacgagaagttcccgctggagctgaagaagcggctgaagaagctgtcggagctgacctcccgcaaggcccagcccaaggccacagacctcaactctgcctgaaggccctcttgcgcagctgcctctcggcccctccgccttctcccctcctgctgtccatgcttggccccctcgtccccatccacctgtgccctccgcatcttaccctccctttctctttcctcattgccttctcccttcctgttccctcatctctgccttccccatgtctctcctctccttggccgtggcttctgtctgtgaggaggcaggagctggggagtgggagcctatgaccccacgtctgacagccatgtccacctgtgcccacagcttccgcccacagacctccagggacaggagcaaattgcaccacagctccccgcctggcctggccctccccaggcggctcagtggctcatgctgtcctgtgagagcccctgccccagagcggccccactaagcgcatgtggctcctgggctacccacagccagggcagcctgctggagccacagggccagggccatgcagatggaggcctctgggagccacctccaatccctcaccactcactcaaccagtggcacagtgtccttgtgcccacactgagccagcaagtcctgctgtccacacccacaagctacctggagggacaggacccacctccatccttcggaaggccttcctggaatcccaccttggcctccgccctcggttccgccccgcccctctccccccgaccttggggcttgtgtcgagcccttgggtggggccaggaggaggtgatggcgtcagaggaggtgtggtcagaggtgacttgttcccacctccagggaggacgcttcgtcttcggccagcgcagacctggtgtttgtttgttgggctcacgcttgcacaatgaaggcttgttcacac

SEQ ID NO: 12759 - DNA, 11342 bp, Homo sapiens
gcattctgaacttcagcacaaggcaaacgcagaaccagggcttggaatttcgccgctatgcagctgcacccctgccacccaggagatctgaggctcctcagagctgggaggaccgggtcagtgccatggcggggaatgggacgtgagccttgcctgggtgaggctctgggttttctgttctgcctctgaggtgtgctgtctgagtgacaggggtggtgaggggcgggggcagtgtgtctccgggattccagctcctcctcagcccaagccttggcaggtgagttctgttcatcctgagtgcctggaccctccctgacccacctgcccacaggtgcagtggccggggtgtcaccgctttctgcttcccctgaccatggcttgcccctggcacttaggagggtgcccccaggatggcagcaagggctgtaccctgggacgtcagaggtctactctttttacccacctgagagtttcagcatctctcttgggggctttctggatccagcccaccaactccgtttggacatcctgacaggtggggagacctgtgtttaggagaagcctgtgcctgggtatcaggccagctgggagtattttctctcccagagtagatccaccaccagggggcagcatctcttccaggaggggaagacccattttacccagcgtcagagacactggccagcgctgttgaggacggatctgcagccccagagaggcctggaggcctcgtggcttgcccacgtttgaaggccaagtgcagagccctgtgacagtcctgggtaacaagtcatgtccgtctggtgaaccctgggtctggatagggtgctccccaccctcagcagagaaacccactcttgttttgattttagtcaactcagaagattgaagaaggagagtgagggtcccaaacactctgcctccccaacccaggcctgcgagtggcagtgtgggcaggcggtggggccagagcagcccgcagcccggaaccagggcaggacagcgcacctggcctgcctttgaattggggtcaccagcgggcttcggccaggtgggtgctgatgatggcacagcttctggggctcctctgggcacctggcttcccagtatccaccatccccaccctgcacagccaggctgaagcagaggctggagagaggtttgcataagagaagctggcatcctgcctgtgcccattgtggcagcaggaggggaggaggcacgggccacagccctggcagggtcctcatcctgggcgagcctggctctgcaccgaacagccggggtcctgcctgcagcaaattcactctgcacatttctccctgcccttccttccttccttccttccttccttccttccttccttccttcctaccttcctctctctctcacttcgctttgcttgtttgcttgcttttctttattttccttttttcttttcttttttctttttttcttttctttttccttccttccttcctttcttcttttctctttctttctttttctttctttcctccctccctccccttcctcccctcccctccctcccctcccctccctcccctccccccctcccctcccctcccctccctctcttttttctttttttctttctctttttcaaggtctccctctgtcacccaggctggagtgcagtggtgcaatcagctcactgcagcctcaacctccagggctcaagtgatcctcccacctcaacctcctgaatagctgggactacaggcgcacaccaccacacccggctaatttttgtattttttggtagagacggttttgccatgttgcccaggctggtctcaaactcctgggctcaagtgatcctctctccttggcctcccaaagtgctccttggcctcccaaagtgctgggattacaggcatgagtcactgcgcccagcccctctcctcttactgattccacagggctgtctcaggatgctggtggcacggggcagagagggcatggtgactgttcatggacacagcagcccctcgaggaggaggctggagccatcctcatatggaggagaagcaggcatggtggtggccctagccctagggaagggtgggccgcacccttccttcaggagagcgagtggccagctgctgtggccctcacatggagggtgagggctggcccgagcacctggccatcaatgtcctcaagcaaaggggagggcaactacctaataatattaccttttagctatttctctaggcaggttcccctacctgaaaagattgcccccggcttcagagtgtttcaagatgcctgaagttctaacaccagagatggtttcctgctgcttccaggaacagggtctgttcttagtccaatgtggagttcctcatggggaccccattccccaggaatccaggttccacagtactctgacttggtctggctggtctcggctggcactttccctaggactgctaaaaccacggtgagggcggagagctgagggccgaagaaggcggggtgagtgatgcttgggagagggagacaggcttggctgaagccctggggaagggctgagggctgtgaagggggctgtggaggagaggtaaaaggagggaggaacacagcccttgacagggcctgtgaggcaggggagaacagggagcaggtaccggtgggacggtggcaggggaggggggcccatgactttgagggtgtcgtgttgcatgtgctgggggtgaggacccggagactggaggaacagggctccagggcagacgcatgggcaagcagagaggacagcccatggtagatgggaggggcacacaggtgtgctgttttcaggttggcaggagaggaggaaggtgtgtgcggggaggccctggagactggaagaggagagggggcccagtgagtgaggggcccttgttagaacctgggggtgggaaggggccaaggtgggtgccctccaccccaggctgtccctcaggcctgtgctgtgccccacagtgcaggcatcacctggccccacgagagagcagctcataggtacgactgaccactctgcctggcatggtgggggcctgcctgtgctggctcaaaccagttttagccccatgttgcaggttagggagtcaaggctgagtgtctgctaacttgtcttaggtcacttgaccaggggacattggccctggagctggaagtgagaccggggaaacggtctcactccctggaagaccgccagggtggggagtgtgactcagtctcagagtttgccatggagttgtctcccaggctcagcaccccctcctggccctggggccactccctcattttaggggcccatgtatgaaatgagaatgtgcagccccttgctcaaaaaggaagagtttcaggacagtgacggcagagtgttactgggctcagggccctgagtgacggcaggggtggcatatctcatggcaccaggtgggcctgtggtgcctcctgcctccagcccgggggcctcagcctgggcactgccctccacttcctgcccgggccgaagggcgtgcccctcgctctctctgggactgagactccattttaaacagctttctggttggtttcaggtttgctgaggtttcttctccctttctgtcccccgtttgaggagttctgatactgattgttgcagtttggtctgagatgggccccgcttcactctctgttgccctttagaaacacaaacttcagtctagactcgctggttcctcacgactcactggtcagacggccaccgagccggtgtccgtaagaggaaagggcgtggcatgggccggggcctgggcagtgttgggtcccgtggctgtgggtgagtcgagcatctaggacaggtcataggcctctgtggaggtggcaggtgggcatgtgtggcctcggggagggcctgtggtggcagcgccatggccaggtggtggcagtttcctttgcattagcgccactccatccctggcccgagccctctcccaggcatctggctcctctatgggtcaaggctgcctaatggttaggggcagcggtgctgtcattgcagcctggactgccggcaagccacttcccctctgcaagcccccatcagagggacgaaacaccgctttgtgggctgctgtgaattcagactgtggtcagccttcgatgcacaggtcagaccatcaccaaagagatgggacgagacaggctgctgcctgtctccctgggcagggctccccgctgagtgtttcctctgcttagccctgggctcccagtccaccccacccagcctgccccttacctctagctgctggtccgggaggaagggacaggggtctgcggggcagcaggtgatctccgcccgtgggtgtcggtggtggcagggggctccttgccgctgtgggtggaacgctggctatttaaggagaggaagggagaccacagcccctctggccctgaaaggctgcttcattcctgaggggtcccttgttgtgtcgggctgctcctctggctgctgctgctgctgccaccggagcgtgaatattctagtgtgtccctagcccatgccccccgcccccagcttggccacatagtctgagtgtgtgactgtctcagagactcagagcaggcgggggctgggtggggggcttgggctggagctgagggacacaacaggacgtttcagaaggggatgatttcctactgatggggggcagggaggggccggctgtcatggcaacaggcggcgctcccaggcctgcgcccgcagacggcggagggggcctgtgaacggagggtgggaggccgaggagtcttgctcacggagtgagaggcgactctttgaggacacttgctgtagggtccttgtgtcctgccctgtataatgaggccccatttgggcacacagaataaatcatggcctttatctggagcgaggaacagctgcaggagcctcataatggggcgctgtcctgtccgtgaggatgcggctcagctcagaggccgggtgctcgccggtgcagctccccttctgcacggaagcccatgaatctgaccgctggcctggggctcctccctggggtggctccgggctggggtgcctttgaatgctgccggcggccgcctctgagactgagtgaacaaagttcatttctctctgtctttctgaaaatgatacatccagcaacatgggaaaccaaatcacccttcctggtttcaaaagactttacattttgttgtttaaacattgaaaactgtatgtatgtggctagcatttaaggggcagtgtcttaaatttgtctcttcacatcaccctgtgcagctgggattattgccccattttacagacaaggaaactgaggctcaggcaaatgaagaaactcacccatcaacaaacagtaggaagcaacagagccaggatttgaacccaagcacatgtcactccagaacttaggctccgtgtgtgtgtgtgttttgtttttctgctgcattttgaatttagaattcttagatttgatcctaattcaacctgaaaaagaattctgaaggccacctttagatctgatgctgtgatctggtctgttgagaagctgtttcccatctggacttccttcaagagagatgggcttcccagtttgtctggcctgagagccagctgggtgtgaggtgtctgagccggggcgcaggtctctttcctgttgtgcccgcaggcggctgtctggaagaactggcccaggctggttggaaaggtggtggcttgaagctaaccaccctgagcagggcatttctgggctcacagaccttctgttattggggtgatcactgtcgatggcttcaagggcattgaccgtggtgatggagttttgaggcgttgagctgattcctgcatctttgagacagaaataattcctcgtgggttgagtgttgtcctgacgctcaggaggagtcaccagaatgtggagtggggtcatggggcctacatgctgagtctgggacagaggcaccgcagggggcatgggctggccgccataggcgccaggtggggcagctcagccccagacctgctgaggaggtggcctggggttggggctggggcacaggtgtctgggcaagggtgggcttcagggattgtggtgatgaagactgaagccacaggccacaactgcttcccgtcgctggggtgtaagagccagggctctggccagtagtcgaggggagatgatgcccaccgaggctcccttcctctcttgtagagtcattcattcaccgaggcattcggtcagctgaccctgagctgttgccccctgctgggcacatagggtcttggggaggcacagagagccagtcggcagcttagccagtgactgctgggcctttgtttgggccccttgccctgcacacagctgatgatgagacaccccagggcagatggagcacagtgctgtgcaggatggagtccagacacccagcagtagcaggtcctggggtccagggagggatgctgaatgggtggccctggcatctggggtctgcccaccataacctgggtggggatcttgggtctgcgattggatctcttccgtatcctccctgaccagcctgtcagaggggccaacactgggcgtcgggcagccgtggaggctcgtgaggagtggagagggcccctggggctggggggcctgggaagggaggcctggatgcagcaggagcaccagagagagattcgggtggcaggtggagacgggggccagggaggttggattggggcctttgtgtatctttgcctggggactctgaatctagattcctgccacctttgaggtccaaggaaacagaaaccatgttgatttgtctctccgttgagaacacagctgtcgtccaacacagcgagtagcatcagaaattattctgaggtcttcacaaaaagactctgtagtgacagttcctgggtttgggggcctccatctgacatagcagtgcttgtctttggagacagaaatcgcctgtacgtgtttgggcccttcttcatctggcaaaccccgaaggaagggggtgagtgggcctcccgggacactcactggccactctgctgggcacagtgacactcattataactcgtgtgtgttaaatacattgggaaaataatgctttcagcagatatcaattaaatgtctactgtattctgcagcatgccccaggcttagagaaagtagaaagaggaaaataccatccagagacagtaacctcgagcattctggcatctttcctgctgagcatgcgtcccattcccaggacacacttgtgaccttctgggccttgtgacagggcagtctgctttcccataccctgggctgagcccctttgaagcccccagctgctcagtgaagttgcaggggtctggcctctcttctcctggaggtggccaggctgtgtgggagtgggggctctgcccctaatgcccccgcctcccgcaggcatctctgccggccttgccacaaccgtgagaaggccaagggcctgggcaagtacatctgccagcggtgccacctggtcatcgacgagcagcccctcatgttcaggagcgacgcctaccaccctgaccacttcaactgcacccactgtgggtaggtgcgcagcccggccctgcagttgtgggggcggggagccagggctggcccagggtaagggcggtggggcctccacctggggaagtgttgaggagggagaggggagcagggtgggcagacagaggggtcccgagagcaaggctgcagggcagaggtgggctgggggctgggaagcagccatggcaggaagcttctctctccagggctctgtttggggggcacttgagactcaggaggcgggtgggctggacccctagactgcagacgagggttgagatggagcagtggaagggacctgagggggcagggcaagagaccgggagtgggcttggtgctggtgttggagagaggagttgcataggcagcccctcagcccccgtcctcgcccacccccaccgtcccctccagtcctctccgtgcctatccagacaccccctctggtttggaggaggaggggggcccaagaacagacctgcttctcagaggcctgggtgcagaacacagcccactcttctgggctgtgcaggaagtctgtgctccagggcctgtctggggcacaggaagtcttcaaagtgcccagagatcagaaggcgctgccgcctcggctctgcagggacagaatgggcccctcggggagccgtgccctggggtggaggcgctgctggcatgaccctgcagaagggcaggggtggcacctgggggctgcacgctgtcttccaggaaggagctgacagccgaggcccgcgagctgaagggtgagctctactgcctgccctgccatgacaagatgggcgtccccatctgcggggcctgccgccggcccatcgagggccgagtggtcaacgcgctgggcaagcagtggcacgtggaggtgagccaggctggtggacacgtggcctcaggttggggggtgccccagctcagggtcatggtaagagccctaaagctcctccacactcccagcccagggcgggtggctggctcccaacgaggcccttcctcaggggtactgcccctccctgtgctcagccagggaccccagcctgcccacgggagccaggagacccgagtgcacacacacggttgggtagctgtgcccacctctcctcttccccctgctggcattctaagagactccaaggtcaggagaaaaccttgggggcagtctgtccagagtgcctgggggttgtggatgacagaacccgctgcatggacagccctgtgcagacacggagctgaagagttcctcaggtgtgagcactgggtcacctggagtgcccccaccgggtggtgggctctcatgttctcatgggtacactgggaacagtgagcccaccacctcccctgatgacctggccagcgctgtgtccggaagctgtgccttgggtggcggcttgggtgggaggccatgcggtcctgccctgatgcaggccccagcccccagccctcatcctcacatgcagatccctgggggaatgcaaggtgctgctcagtgatcccaggcttgcagggggtgcctgcaggaggccccacgtggacaggcagggccgcctctgcctatgagggcccaccatgccgcagcaccaggctggcacctgactcctggggctgaggctgccgagggggaggccagactgggaggggatggtgactcacaaggttaccatcagtgccttagaggaggggtagggtctgctgaccccagggcattcacagaggtgtcagtcccctctgcccagtgtgaatcctgaaaggcctgcacctgcccagactctgctttctgtccccttctgtcactgctgcctcctggggccactgtggtcccctggagtcactggctcctggggtcactgttgtccccgggtcaccactgtccctcggggtcaccgctctagccctgatgccacccggcccgccctttgtccttgcagcactttgtctgtgccaagtgtgagaagccattcctggggcaccggcactatgagaagaagggcctggcctactgcgagactcactacaaccaggtgagcccggtgcagaaccttcagggatgcgggtctggaggggtggccaggagagctgccgtgagcaagggaggctgtgggcaccccctcaggagctctgccaggtgctgagcccaggcctgcaccctcagccctggctcctggcctggggtctcgagacctgggcagctctcttcagtctcagtgtcttcctttgaagaatgttctggggctggtgtgaggtcccgggcacatggggctgacagtgccagcaaccccctccctcccttgctctggtacagaaggcagggggcgctggtgggatgcagtcaccacctgggcccacctccttgcaggacagcagtggccagagcagaggggccttctggggagcaacgccccagcctgttgtccttcccggaagggtggttctcatgggttgccgtgccctcaacccagccttgcagctgggccctgggaggcagggcctgggagatgcctgagaggggccgtgttggagggccaggctggctgcatgatggccctgggctggggtgtgactgcctgcagctactctgacagcctgctcggcccacagctcttcggggacgtctgctacaactgcagccatgtgattgaaggcgatggtgaggccctgtgttccctcccccaccccacctgctctcctggggcctgggtgctgcagctgtgagcccagccgggcctgcggcagcctagccaggcctgctgagtcccacgcttccctcacagtggtgtcggccctcaacaaggcctggtgtgtgagctgcttctcctgctccacctgcaacagcaagctcaccctgaagtgagtccctgtgatcgtgggatggggctcagggtggagggggctcctgcaggtccttcctctcagcagccctcctgcacaccagctgagtctggcctggggatatggtggggacaaggggcagcccggccttataccacccagggagatgggggcaggttcagggggtctaggggatccagggaccccagggaccccaggcacagtgagaggaggaggaacactcatgcctccaacacacctgccagaaccctgggctctggggagggaagggcattccagctcagggaacagcatatgcaaaagcagcagtgtcagctgctcatccaggaagcctcgaggggtgtgggatggctggagctgggagaggagagatggcgtccaggtttccaagggctgtggggaggcatagagggttctggggtttcagaacctgagagaagcctctgggaggcaagggaagcctcaaggcccttctcatccctatgctctctggccatctcaccctagggcctggcctgctggctaggagaggctggtgtggggaggctgggggctgagggaagcccactccacagtcacctgtctggggttaaaggggtgggcgtggggctctgctgacagctcagcttcctcctcaggaacaagtttgtggagttcgacatgaagcccgtgtgtaagaggtgctacgagaagttcccgctggagctgaagaagcggctgaagaagctgtcggagctgacctcccgcaaggcccagcccaaggccacagacctcaactctgcctgaaggccctcttgcgcagctgcctctcggcccctccgccttctcccctcctgctgtccatgcttggccccctcgtccccatccacc

SEQ ID NO: 12760 - DNA, 867 bp, Homo sapiens
gcattctgaacttcagcacaaggcaaacgcagaaccagggcttggaatttcgccgctatgcagctgcacccctgccacccaggagatctgaggctcctcagagctgggaggaccgggcatctctgccggccttgccacaaccgtgagaaggccaagggcctgggcaagtacatctgccagcggtgccacctggtcatcgacgagcagcccctcatgttcaggagcgacgcctaccaccctgaccacttcaactgcacccactgtgggaaggagctgacagccgaggcccgcgagctgaagggtgagctctactgcctgccctgccatgacaagatgggcgtccccatctgcggggcctgccgccggcccatcgagggccgagtggtcaacgcgctgggcaagcagtggcacgtggagcactttgtctgtgccaagtgtgagaagccattcctggggcaccggcactatgagaagaagggcctggcctactgcgagactcactacaaccagctcttcggggacgtctgctacaactgcagccatgtgattgaaggcgatgtggtgtcggccctcaacaaggcctggtgtgtgagctgcttctcctgctccacctgcaacagcaagctcaccctgaagaacaagtttgtggagttcgacatgaagcccgtgtgtaagaggtgctacgagaagttcccgctggagctgaagaagcggctgaagaagctgtcggagctgacctcccgcaaggcccagcccaaggccacagacctcaactctgcctgaaggccctcttgcgcagctgcctctcggcccctccgccttctcccctcctgctgtccatgcttggccccctcgtccccatccacc

SEQ ID NO: 12761 - DNA, 4803 bp, Homo sapiens
gtgacagggcagtctgctttcccataccctgggctgagcccctttgaagcccccagctgctcagtgaagttgcaggggtctggcctctcttctcctggaggtggccaggctgtgtgggagtgggggctctgcccctaatgcccccgcctcccgcaggcatctctgccggccttgccacaaccgtgagaaggccaagggcctgggcaagtacatctgccagcggtgccacctggtcatcgacgagcagcccctcatgttcaggagcgacgcctaccaccctgaccacttcaactgcacccactgtgggtaggtgcgcagcccggccctgcagttgtgggggcggggagccagggctggcccagggtaagggcggtggggcctccacctggggaagtgttgaggagggagaggggagcagggtgggcagacagaggggtcccgagagcaaggctgcagggcagaggtgggctgggggctgggaagcagccatggcaggaagcttctctctccagggctctgtttggggggcacttgagactcaggaggcgggtgggctggacccctagactgcagacgagggttgagatggagcagtggaagggacctgagggggcagggcaagagaccgggagtgggcttggtgctggtgttggagagaggagttgcataggcagcccctcagcccccgtcctcgcccacccccaccgtcccctccagtcctctccgtgcctatccagacaccccctctggtttggaggaggaggggggcccaagaacagacctgcttctcagaggcctgggtgcagaacacagcccactcttctgggctgtgcaggaagtctgtgctccagggcctgtctggggcacaggaagtcttcaaagtgcccagagatcagaaggcgctgccgcctcggctctgcagggacagaatgggcccctcggggagccgtgccctggggtggaggcgctgctggcatgaccctgcagaagggcaggggtggcacctgggggctgcacgctgtcttccaggaaggagctgacagccgaggcccgcgagctgaagggtgagctctactgcctgccctgccatgacaagatgggcgtccccatctgcggggcctgccgccggcccatcgagggccgagtggtcaacgcgctgggcaagcagtggcacgtggaggtgagccaggctggtggacacgtggcctcaggttggggggtgccccagctcagggtcatggtaagagccctaaagctcctccacactcccagcccagggcgggtggctggctcccaacgaggcccttcctcaggggtactgcccctccctgtgctcagccagggaccccagcctgcccacgggagccaggagacccgagtgcacacacacggttgggtagctgtgcccacctctcctcttccccctgctggcattctaagagactccaaggtcaggagaaaaccttgggggcagtctgtccagagtgcctgggggttgtggatgacagaacccgctgcatggacagccctgtgcagacacggagctgaagagttcctcaggtgtgagcactgggtcacctggagtgcccccaccgggtggtgggctctcatgttctcatgggtacactgggaacagtgagcccaccacctcccctgatgacctggccagcgctgtgtccggaagctgtgccttgggtggcggcttgggtgggaggccatgcggtcctgccctgatgcaggccccagcccccagccctcatcctcacatgcagatccctgggggaatgcaaggtgctgctcagtgatcccaggcttgcagggggtgcctgcaggaggccccacgtggacaggcagggccgcctctgcctatgagggcccaccatgccgcagcaccaggctggcacctgactcctggggctgaggctgccgagggggaggccagactgggaggggatggtgactcacaaggttaccatcagtgccttagaggaggggtagggtctgctgaccccagggcattcacagaggtgtcagtcccctctgcccagtgtgaatcctgaaaggcctgcacctgcccagactctgctttctgtccccttctgtcactgctgcctcctggggccactgtggtcccctggagtcactggctcctggggtcactgttgtccccgggtcaccactgtccctcggggtcaccgctctagccctgatgccacccggcccgccctttgtccttgcagcactttgtctgtgccaagtgtgagaagccattcctggggcaccggcactatgagaagaagggcctggcctactgcgagactcactacaaccaggtgagcccggtgcagaaccttcagggatgcgggtctggaggggtggccaggagagctgccgtgagcaagggaggctgtgggcaccccctcaggagctctgccaggtgctgagcccaggcctgcaccctcagccctggctcctggcctggggtctcgagacctgggcagctctcttcagtctcagtgtcttcctttgaagaatgttctggggctggtgtgaggtcccgggcacatggggctgacagtgccagcaaccccctccctcccttgctctggtacagaaggcagggggcgctggtgggatgcagtcaccacctgggcccacctccttgcaggacagcagtggccagagcagaggggccttctggggagcaacgccccagcctgttgtccttcccggaagggtggttctcatgggttgccgtgccctcaacccagccttgcagctgggccctgggaggcagggcctgggagatgcctgagaggggccgtgttggagggccaggctggctgcatgatggccctgggctggggtgtgactgcctgcagctactctgacagcctgctcggcccacagctcttcggggacgtctgctacaactgcagccatgtgattgaaggcgatggtgaggccctgtgttccctcccccaccccacctgctctcctggggcctgggtgctgcagctgtgagcccagccgggcctgcggcagcctagccaggcctgctgagtcccacgcttccctcacagtggtgtcggccctcaacaaggcctggtgtgtgagctgcttctcctgctccacctgcaacagcaagctcaccctgaagtgagtccctgtgatcgtgggatggggctcagggtggagggggctcctgcaggtccttcctctcagcagccctcctgcacaccagctgagtctggcctggggatatggtggggacaaggggcagcccggccttataccacccagggagatgggggcaggttcagggggtctaggggatccagggaccccagggaccccaggcacagtgagaggaggaggaacactcatgcctccaacacacctgccagaaccctgggctctggggagggaagggcattccagctcagggaacagcatatgcaaaagcagcagtgtcagctgctcatccaggaagcctcgaggggtgtgggatggctggagctgggagaggagagatggcgtccaggtttccaagggctgtggggaggcatagagggttctggggtttcagaacctgagagaagcctctgggaggcaagggaagcctcaaggcccttctcatccctatgctctctggccatctcaccctagggcctggcctgctggctaggagaggctggtgtggggaggctgggggctgagggaagcccactccacagtcacctgtctggggttaaaggggtgggcgtggggctctgctgacagctcagcttcctcctcaggaacaagtttgtggagttcgacatgaagcccgtgtgtaagaggtgctacgagaagttcccgctggagctgaagaagcggctgaagaagctgtcggagctgacctcccgcaaggcccagcccaaggccacagacctcaactctgcctgaaggccctcttgcgcagctgcctctcggcccctccgccttctcccctcctgctgtccatgcttggccccctcgtccccatccacctgtgccctccgcatcttaccctccctttctctttcctcattgccttctcccttcctgttccctcatctctgccttccccatgtctctcctctccttggccgtggcttctgtctgtgaggaggcaggagctggggagtgggagcctatgaccccacgtctgacagccatgtccacctgtgcccacagcttccgcccacagacctccagggacaggagcaaattgcaccacagctccccgcctggcctggccctccccaggcggctcagtggctcatgctgtcctgtgagagcccctgccccagagcggccccactaagcgcatgtggctcctgggctacccacagccagggcagcctgctggagccacagggccagggccatgcagatggaggcctctgggagccacctccaatccctcaccactcactcaaccagtggcacagtgtccttgtgcccacactgagccagcaagtcctgctgtccacacccacaagctacctggagggacaggacccacctccatccttcggaaggccttcctggaatcccaccttggcctccgccctcggttccgccccgcccctctccccccgaccttggggcttgtgtcgagcccttgggtggggccaggaggaggtgatggcgtcagaggaggtgtggtcagaggtgacttgttcccacctccagggaggacgcttcgtcttcggccagcgcagacctggtgtttgtttgttgggctcacgcttgcacaatgaaggcttgttcacacaa

SEQ ID NO: 12762 - DNA, 1678 bp, Homo sapiens
gtgacagggcagtctgctttcccataccctgggctgagcccctttgaagcccccagctgctcagtgaagttgcaggggtctggcctctcttctcctggaggtggccaggctgtgtgggagtgggggctctgcccctaatgcccccgcctcccgcaggcatctctgccggccttgccacaaccgtgagaaggccaagggcctgggcaagtacatctgccagcggtgccacctggtcatcgacgagcagcccctcatgttcaggagcgacgcctaccaccctgaccacttcaactgcacccactgtgggaaggagctgacagccgaggcccgcgagctgaagggtgagctctactgcctgccctgccatgacaagatgggcgtccccatctgcggggcctgccgccggcccatcgagggccgagtggtcaacgcgctgggcaagcagtggcacgtggagcactttgtctgtgccaagtgtgagaagccattcctggggcaccggcactatgagaagaagggcctggcctactgcgagactcactacaaccagctcttcggggacgtctgctacaactgcagccatgtgattgaaggcgatgtggtgtcggccctcaacaaggcctggtgtgtgagctgcttctcctgctccacctgcaacagcaagctcaccctgaagaacaagtttgtggagttcgacatgaagcccgtgtgtaagaggtgctacgagaagttcccgctggagctgaagaagcggctgaagaagctgtcggagctgacctcccgcaaggcccagcccaaggccacagacctcaactctgcctgaaggccctcttgcgcagctgcctctcggcccctccgccttctcccctcctgctgtccatgcttggccccctcgtccccatccacctgtgccctccgcatcttaccctccctttctctttcctcattgccttctcccttcctgttccctcatctctgccttccccatgtctctcctctccttggccgtggcttctgtctgtgaggaggcaggagctggggagtgggagcctatgaccccacgtctgacagccatgtccacctgtgcccacagcttccgcccacagacctccagggacaggagcaaattgcaccacagctccccgcctggcctggccctccccaggcggctcagtggctcatgctgtcctgtgagagcccctgccccagagcggccccactaagcgcatgtggctcctgggctacccacagccagggcagcctgctggagccacagggccagggccatgcagatggaggcctctgggagccacctccaatccctcaccactcactcaaccagtggcacagtgtccttgtgcccacactgagccagcaagtcctgctgtccacacccacaagctacctggagggacaggacccacctccatccttcggaaggccttcctggaatcccaccttggcctccgccctcggttccgccccgcccctctccccccgaccttggggcttgtgtcgagcccttgggtggggccaggaggaggtgatggcgtcagaggaggtgtggtcagaggtgacttgttcccacctccagggaggacgcttcgtcttcggccagcgcagacctggtgtttgtttgttgggctcacgcttgcacaatgaaggcttgttcacacaa

SEQ ID NO: 12763 - DNA, 2500 bp, Homo sapiens
aagtgcatgactcaggactgggtgggagggggctgtccctgaggccctggtctcccccagccaagtcctggcagggggatgctgttcttcaggatcccatgacctggggctcttggggagccccagcccggagagtgacctgtggctttgctggggaaaggggcttggagggtacagggcagtgtccaggattgcagtctcaaatccgaggcccacaggggagctgcctctgtgatcgccattaaggctgtggcctggggtctcagggcagcccaggaaccaaaaatagcctgtaacttgtcactttgtaagtcctgccctccagacacacttccctttcttctccccaagcctctcttcccagttagctcccctgacttggagtcacctctaagccttggcccaggcccctctgcagtgagatggagggactcatcccccggagagtggcatctgcaggcccactggctgcctgtggtcaccccctagggttctagcggggctgcctcccattttcctcagagcatccctgccagctggctggttctcactctcctgttttctaggaaaagaaagtggggagagacaggaacagggtccggagcagccccagcagcagcattgaggtggagcaatatgtcggacgccttggccaacgccgtgtgccagcgctgccaggcccgcttctcccccgccgagcgcattgtcaacagcaatggggagctgtaccatgagcactgcttcgtgtgtgcccagtgcttccggcccttccccgaggggctcttctatgagtttgaaggccggaagtactgcgaacacgacttccaaatgctgtttgctccgtgctgtggatcctgcggtgagttcatcattggccgcgtcatcaaggccatgaacaacaactggcacccgggctgcttccgctgcgagctgtgtgatgtggagctggctgacctgggctttgtgaagaatgccggcaggcatctctgccggccttgccacaaccgtgagaaggccaagggcctgggcaagtacatctgccagcggtgccacctggtcatcgacgagcagcccctcatgttcaggagcgacgcctaccaccctgaccacttcaactgcacccactgtgggaaggagctgacagccgaggcccgcgagctgaagggtgagctctactgcctgccctgccatgacaagatgggcgtccccatctgcggggcctgccgccggcccatcgagggccgagtggtcaacgcgctgggcaagcagtggcacgtggagcactttgtctgtgccaagtgtgagaagccattcctggggcaccggcactatgagaagaagggcctggcctactgcgagactcactacaaccagctcttcggggacgtctgctacaactgcagccatgtgattgaaggcgatgtggtgtcggccctcaacaaggcctggtgtgtgagctgcttctcctgctccacctgcaacagcaagctcaccctgaagaacaagtttgtggagttcgacatgaagcccgtgtgtaagaggtgctacgagaagttcccgctggagctgaagaagcggctgaagaagctgtcggagctgacctcccgcaaggcccagcccaaggccacagacctcaactctgcctgaaggccctcttgcgcagctgcctctcggcccctccgccttctcccctcctgctgtccatgcttggccccctcgtccccatccacctgtgccctccgcatcttaccctccctttctctttcctcattgccttctcccttcctgttccctcatctctgccttccccatgtctctcctctccttggccgtggcttctgtctgtgaggaggcaggagctggggagtgggagcctatgaccccacgtctgacagccatgtccacctgtgcccacagcttccgcccacagacctccagggacaggagcaaattgcaccacagctccccgcctggcctggccctccccaggcggctcagtggctcatgctgtcctgtgagagcccctgccccagagcggccccactaagcgcatgtggctcctgggctacccacagccagggcagcctgctggagccacagggccagggccatgcagatggaggcctctgggagccacctccaatccctcaccactcactcaaccagtggcacagtgtccttgtgcccacactgagccagcaagtcctgctgtccacacccacaagctacctggagggacaggacccacctccatccttcggaaggccttcctggaatcccaccttggcctccgccctcggttccgccccgcccctctccccccgaccttggggcttgtgtcgagcccttgggtggggccaggaggaggtgatggcgtcagaggaggtgtggtcagaggtgacttgttcccacctccagggaggacgcttcgtcttcggccagcgcagacctggtgtttgtttgttgggctcacgcttgcacaatgaaggcttgttcacac

SEQ ID NO: 12764 - DNA, 5685 bp, Homo sapiens
cagtgctgtgcaggatggagtccagacacccagcagtagcaggtcctggggtccagggagggatgctgaatgggtggccctggcatctggggtctgcccaccataacctgggtggggatcttgggtctgcgattggatctcttccgtatcctccctgaccagcctgtcagaggggccaacactgggcgtcgggcagccgtggaggctcgtgaggagtggagagggcccctggggctggggggcctgggaagggaggcctggatgcagcaggagcaccagagagagattcgggtggcaggtggagacgggggccagggaggttggattggggcctttgtgtatctttgcctggggactctgaatctagattcctgccacctttgaggtccaaggaaacagaaaccatgttgatttgtctctccgttgagaacacagctgtcgtccaacacagcgagtagcatcagaaattattctgaggtcttcacaaaaagactctgtagtgacagttcctgggtttgggggcctccatctgacatagcagtgcttgtctttggagacagaaatcgcctgtacgtgtttgggcccttcttcatctggcaaaccccgaaggaagggggtgagtgggcctcccgggacactcactggccactctgctgggcacagtgacactcattataactcgtgtgtgttaaatacattgggaaaataatgctttcagcagatatcaattaaatgtctactgtattctgcagcatgccccaggcttagagaaagtagaaagaggaaaataccatccagagacagtaacctcgagcattctggcatctttcctgctgagcatgcgtcccattcccaggacacacttgtgaccttctgggccttgtgacagggcagtctgctttcccataccctgggctgagcccctttgaagcccccagctgctcagtgaagttgcaggggtctggcctctcttctcctggaggtggccaggctgtgtgggagtgggggctctgcccctaatgcccccgcctcccgcaggcatctctgccggccttgccacaaccgtgagaaggccaagggcctgggcaagtacatctgccagcggtgccacctggtcatcgacgagcagcccctcatgttcaggagcgacgcctaccaccctgaccacttcaactgcacccactgtgggtaggtgcgcagcccggccctgcagttgtgggggcggggagccagggctggcccagggtaagggcggtggggcctccacctggggaagtgttgaggagggagaggggagcagggtgggcagacagaggggtcccgagagcaaggctgcagggcagaggtgggctgggggctgggaagcagccatggcaggaagcttctctctccagggctctgtttggggggcacttgagactcaggaggcgggtgggctggacccctagactgcagacgagggttgagatggagcagtggaagggacctgagggggcagggcaagagaccgggagtgggcttggtgctggtgttggagagaggagttgcataggcagcccctcagcccccgtcctcgcccacccccaccgtcccctccagtcctctccgtgcctatccagacaccccctctggtttggaggaggaggggggcccaagaacagacctgcttctcagaggcctgggtgcagaacacagcccactcttctgggctgtgcaggaagtctgtgctccagggcctgtctggggcacaggaagtcttcaaagtgcccagagatcagaaggcgctgccgcctcggctctgcagggacagaatgggcccctcggggagccgtgccctggggtggaggcgctgctggcatgaccctgcagaagggcaggggtggcacctgggggctgcacgctgtcttccaggaaggagctgacagccgaggcccgcgagctgaagggtgagctctactgcctgccctgccatgacaagatgggcgtccccatctgcggggcctgccgccggcccatcgagggccgagtggtcaacgcgctgggcaagcagtggcacgtggaggtgagccaggctggtggacacgtggcctcaggttggggggtgccccagctcagggtcatggtaagagccctaaagctcctccacactcccagcccagggcgggtggctggctcccaacgaggcccttcctcaggggtactgcccctccctgtgctcagccagggaccccagcctgcccacgggagccaggagacccgagtgcacacacacggttgggtagctgtgcccacctctcctcttccccctgctggcattctaagagactccaaggtcaggagaaaaccttgggggcagtctgtccagagtgcctgggggttgtggatgacagaacccgctgcatggacagccctgtgcagacacggagctgaagagttcctcaggtgtgagcactgggtcacctggagtgcccccaccgggtggtgggctctcatgttctcatgggtacactgggaacagtgagcccaccacctcccctgatgacctggccagcgctgtgtccggaagctgtgccttgggtggcggcttgggtgggaggccatgcggtcctgccctgatgcaggccccagcccccagccctcatcctcacatgcagatccctgggggaatgcaaggtgctgctcagtgatcccaggcttgcagggggtgcctgcaggaggccccacgtggacaggcagggccgcctctgcctatgagggcccaccatgccgcagcaccaggctggcacctgactcctggggctgaggctgccgagggggaggccagactgggaggggatggtgactcacaaggttaccatcagtgccttagaggaggggtagggtctgctgaccccagggcattcacagaggtgtcagtcccctctgcccagtgtgaatcctgaaaggcctgcacctgcccagactctgctttctgtccccttctgtcactgctgcctcctggggccactgtggtcccctggagtcactggctcctggggtcactgttgtccccgggtcaccactgtccctcggggtcaccgctctagccctgatgccacccggcccgccctttgtccttgcagcactttgtctgtgccaagtgtgagaagccattcctggggcaccggcactatgagaagaagggcctggcctactgcgagactcactacaaccaggtgagcccggtgcagaaccttcagggatgcgggtctggaggggtggccaggagagctgccgtgagcaagggaggctgtgggcaccccctcaggagctctgccaggtgctgagcccaggcctgcaccctcagccctggctcctggcctggggtctcgagacctgggcagctctcttcagtctcagtgtcttcctttgaagaatgttctggggctggtgtgaggtcccgggcacatggggctgacagtgccagcaaccccctccctcccttgctctggtacagaaggcagggggcgctggtgggatgcagtcaccacctgggcccacctccttgcaggacagcagtggccagagcagaggggccttctggggagcaacgccccagcctgttgtccttcccggaagggtggttctcatgggttgccgtgccctcaacccagccttgcagctgggccctgggaggcagggcctgggagatgcctgagaggggccgtgttggagggccaggctggctgcatgatggccctgggctggggtgtgactgcctgcagctactctgacagcctgctcggcccacagctcttcggggacgtctgctacaactgcagccatgtgattgaaggcgatggtgaggccctgtgttccctcccccaccccacctgctctcctggggcctgggtgctgcagctgtgagcccagccgggcctgcggcagcctagccaggcctgctgagtcccacgcttccctcacagtggtgtcggccctcaacaaggcctggtgtgtgagctgcttctcctgctccacctgcaacagcaagctcaccctgaagtgagtccctgtgatcgtgggatggggctcagggtggagggggctcctgcaggtccttcctctcagcagccctcctgcacaccagctgagtctggcctggggatatggtggggacaaggggcagcccggccttataccacccagggagatgggggcaggttcagggggtctaggggatccagggaccccagggaccccaggcacagtgagaggaggaggaacactcatgcctccaacacacctgccagaaccctgggctctggggagggaagggcattccagctcagggaacagcatatgcaaaagcagcagtgtcagctgctcatccaggaagcctcgaggggtgtgggatggctggagctgggagaggagagatggcgtccaggtttccaagggctgtggggaggcatagagggttctggggtttcagaacctgagagaagcctctgggaggcaagggaagcctcaaggcccttctcatccctatgctctctggccatctcaccctagggcctggcctgctggctaggagaggctggtgtggggaggctgggggctgagggaagcccactccacagtcacctgtctggggttaaaggggtgggcgtggggctctgctgacagctcagcttcctcctcaggaacaagtttgtggagttcgacatgaagcccgtgtgtaagaggtgctacgagaagttcccgctggagctgaagaagcggctgaagaagctgtcggagctgacctcccgcaaggcccagcccaaggccacagacctcaactctgcctgaaggccctcttgcgcagctgcctctcggcccctccgccttctcccctcctgctgtccatgcttggccccctcgtccccatccacctgtgccctccgcatcttaccctccctttctctttcctcattgccttctcccttcctgttccctcatctctgccttccccatgtctctcctctccttggccgtggcttctgtctgtgaggaggcaggagctggggagtgggagcctatgaccccacgtctgacagccatgtccacctgtgcccacagcttccgcccacagacctccagggacaggagcaaattgcaccacagctccccgcctggcctggccctccccaggcggctcagtggctcatgctgtcctgtgagagcccctgccccagagcggccccactaagcgcatgtggctcctgggctacccacagccagggcagcctgctggagccacagggccagggccatgcagatggaggcctctgggagccacctccaatccctcaccactcactcaaccagtggcacagtgtccttgtgcccacactgagccagcaagtcctgctgtccacacccacaagctacctggagggacaggacccacctccatccttcggaaggccttcctggaatcccaccttggcctccgccctcggttccgccccgcccctctccccccgaccttggggcttgtgtcgagcccttgggtggggccaggaggaggtgatggcgtcagaggaggtgtggtcagaggtgacttgttcccacctccagggaggacgcttcgtcttcggccagcgcagacctggtgtttgtttgttgggctcacgcttgcacaatgaaggcttgttcacacaa

SEQ ID NO: 12765 - DNA, 1620 bp, Homo sapiens
cagtgctgtgcaggatggagtccagacacccagcagtagcagaaatcgcctgtacgtgtttgggcccttcttcatctggcaaaccccgaaggaagggggcatctctgccggccttgccacaaccgtgagaaggccaagggcctgggcaagtacatctgccagcggtgccacctggtcatcgacgagcagcccctcatgttcaggagcgacgcctaccaccctgaccacttcaactgcacccactgtgggaaggagctgacagccgaggcccgcgagctgaagggtgagctctactgcctgccctgccatgacaagatgggcgtccccatctgcggggcctgccgccggcccatcgagggccgagtggtcaacgcgctgggcaagcagtggcacgtggagcactttgtctgtgccaagtgtgagaagccattcctggggcaccggcactatgagaagaagggcctggcctactgcgagactcactacaaccagctcttcggggacgtctgctacaactgcagccatgtgattgaaggcgatgtggtgtcggccctcaacaaggcctggtgtgtgagctgcttctcctgctccacctgcaacagcaagctcaccctgaagaacaagtttgtggagttcgacatgaagcccgtgtgtaagaggtgctacgagaagttcccgctggagctgaagaagcggctgaagaagctgtcggagctgacctcccgcaaggcccagcccaaggccacagacctcaactctgcctgaaggccctcttgcgcagctgcctctcggcccctccgccttctcccctcctgctgtccatgcttggccccctcgtccccatccacctgtgccctccgcatcttaccctccctttctctttcctcattgccttctcccttcctgttccctcatctctgccttccccatgtctctcctctccttggccgtggcttctgtctgtgaggaggcaggagctggggagtgggagcctatgaccccacgtctgacagccatgtccacctgtgcccacagcttccgcccacagacctccagggacaggagcaaattgcaccacagctccccgcctggcctggccctccccaggcggctcagtggctcatgctgtcctgtgagagcccctgccccagagcggccccactaagcgcatgtggctcctgggctacccacagccagggcagcctgctggagccacagggccagggccatgcagatggaggcctctgggagccacctccaatccctcaccactcactcaaccagtggcacagtgtccttgtgcccacactgagccagcaagtcctgctgtccacacccacaagctacctggagggacaggacccacctccatccttcggaaggccttcctggaatcccaccttggcctccgccctcggttccgccccgcccctctccccccgaccttggggcttgtgtcgagcccttgggtggggccaggaggaggtgatggcgtcagaggaggtgtggtcagaggtgacttgttcccacctccagggaggacgcttcgtcttcggccagcgcagacctggtgtttgtttgttgggctcacgcttgcacaatgaaggcttgttcacacaa

SEQ ID NO: 12766 - DNA, 2315 bp, Homo sapiens
ctatactcccgcaacctcccaccgtcacctccccaacacccccaccaccctcagccttgacctccccatcccaccccgccccgcgggccccaccctgccacccccgcccacccctctcgcgggcggagcggctcttggccttttttgggcgtctccctgctccgcggcccgggctggcgggcgggcgctcggctggcggctgcagcagcagagggagacccgcggcaaccccggcaacccagggctcggcgtcgctgccaccatgacgggaagatgaggtcaccagaggccacagaggctgagccactcaggaggccagtcacaggtccaccagtgtccggccagtgtttgtccctgcagccctttctggaacctagctgggaaaagaaagtggggagagacaggaacagggtccggagcagccccagcagcagcattgaggtggagcaatatgtcggacgccttggccaacgccgtgtgccagcgctgccaggcccgcttctcccccgccgagcgcattgtcaacagcaatggggagctgtaccatgagcactgcttcgtgtgtgcccagtgcttccggcccttccccgaggggctcttctatgagtttgaaggccggaagtactgcgaacacgacttccaaatgctgtttgctccgtgctgtggatcctgcggtgagttcatcattggccgcgtcatcaaggccatgaacaacaactggcacccgggctgcttccgctgcgagctgtgtgatgtggagctggctgacctgggctttgtgaagaatgccggcaggcatctctgccggccttgccacaaccgtgagaaggccaagggcctgggcaagtacatctgccagcggtgccacctggtcatcgacgagcagcccctcatgttcaggagcgacgcctaccaccctgaccacttcaactgcacccactgtgggaaggagctgacagccgaggcccgcgagctgaagggtgagctctactgcctgccctgccatgacaagatgggcgtccccatctgcggggcctgccgccggcccatcgagggccgagtggtcaacgcgctgggcaagcagtggcacgtggagcactttgtctgtgccaagtgtgagaagccattcctggggcaccggcactatgagaagaagggcctggcctactgcgagactcactacaaccagctcttcggggacgtctgctacaactgcagccatgtgattgaaggcgatgtggtgtcggccctcaacaaggcctggtgtgtgagctgcttctcctgctccacctgcaacagcaagctcaccctgaagaacaagtttgtggagttcgacatgaagcccgtgtgtaagaggtgctacgagaagttcccgctggagctgaagaagcggctgaagaagctgtcggagctgacctcccgcaaggcccagcccaaggccacagacctcaactctgcctgaaggccctcttgcgcagctgcctctcggcccctccgccttctcccctcctgctgtccatgcttggccccctcgtccccatccacctgtgccctccgcatcttaccctccctttctctttcctcattgccttctcccttcctgttccctcatctctgccttccccatgtctctcctctccttggccgtggcttctgtctgtgaggaggcaggagctggggagtgggagcctatgaccccacgtctgacagccatgtccacctgtgcccacagcttccgcccacagacctccagggacaggagcaaattgcaccacagctccccgcctggcctggccctccccaggcggctcagtggctcatgctgtcctgtgagagcccctgccccagagcggccccactaagcgcatgtggctcctgggctacccacagccagggcagcctgctggagccacagggccagggccatgcagatggaggcctctgggagccacctccaatccctcaccactcactcaaccagtggcacagtgtccttgtgcccacactgagccagcaagtcctgctgtccacacccacaagctacctggagggacaggacccacctccatccttcggaaggccttcctggaatcccaccttggcctccgccctcggttccgccccgcccctctccccccgaccttggggcttgtgtcgagcccttgggtggggccaggaggaggtgatggcgtcagaggaggtgtggtcagaggtgacttgttcccacctccagggaggacgcttcgtcttcggccagcgcagacctggtgtttgtttgttgggctcacgcttgcacaatgaaggcttgttcacac

SEQ ID NO: 12767 - DNA, 2335 bp, Homo sapiens
ttttgcagtctgtccgtggatactgtgaacatcaggctactcggccgggctcctgcgctcagggcttcgagaaatgctcattttggggctgcccctctgccggcctctctggattcagagggcagccgctgctccttttgttttgtgggcctggctctgggcccggagcagcacctccctggggaggccgcctttccttccgcggcttcttccgtctcctcctgaccccaaggtgcctccggcctctgcctccagctaaggacctctggccaagcctcctgcccagggagaggtgaagctgccgtgcctgggtgccccgtggtggccggacactcctggcggctgctcagtcttgcacgtggctgtgccaagcgggccaggcagctgctatttccctcagagaagttgctggcggcgctcagggaaggaagcacccgaggaggcggagcggcatctcagccacagagcaatatgtcggacgccttggccaacgccgtgtgccagcgctgccaggcccgcttctcccccgccgagcgcattgtcaacagcaatggggagctgtaccatgagcactgcttcgtgtgtgcccagtgcttccggcccttccccgaggggctcttctatgagtttgaaggccggaagtactgcgaacacgacttccaaatgctgtttgctccgtgctgtggatcctgcggtgagttcatcattggccgcgtcatcaaggccatgaacaacaactggcacccgggctgcttccgctgcgagctgtgtgatgtggagctggctgacctgggctttgtgaagaatgccggcaggcatctctgccggccttgccacaaccgtgagaaggccaagggcctgggcaagtacatctgccagcggtgccacctggtcatcgacgagcagcccctcatgttcaggagcgacgcctaccaccctgaccacttcaactgcacccactgtgggaaggagctgacagccgaggcccgcgagctgaagggtgagctctactgcctgccctgccatgacaagatgggcgtccccatctgcggggcctgccgccggcccatcgagggccgagtggtcaacgcgctgggcaagcagtggcacgtggagcactttgtctgtgccaagtgtgagaagccattcctggggcaccggcactatgagaagaagggcctggcctactgcgagactcactacaaccagctcttcggggacgtctgctacaactgcagccatgtgattgaaggcgatgtggtgtcggccctcaacaaggcctggtgtgtgagctgcttctcctgctccacctgcaacagcaagctcaccctgaagaacaagtttgtggagttcgacatgaagcccgtgtgtaagaggtgctacgagaagttcccgctggagctgaagaagcggctgaagaagctgtcggagctgacctcccgcaaggcccagcccaaggccacagacctcaactctgcctgaaggccctcttgcgcagctgcctctcggcccctccgccttctcccctcctgctgtccatgcttggccccctcgtccccatccacctgtgccctccgcatcttaccctccctttctctttcctcattgccttctcccttcctgttccctcatctctgccttccccatgtctctcctctccttggccgtggcttctgtctgtgaggaggcaggagctggggagtgggagcctatgaccccacgtctgacagccatgtccacctgtgcccacagcttccgcccacagacctccagggacaggagcaaattgcaccacagctccccgcctggcctggccctccccaggcggctcagtggctcatgctgtcctgtgagagcccctgccccagagcggccccactaagcgcatgtggctcctgggctacccacagccagggcagcctgctggagccacagggccagggccatgcagatggaggcctctgggagccacctccaatccctcaccactcactcaaccagtggcacagtgtccttgtgcccacactgagccagcaagtcctgctgtccacacccacaagctacctggagggacaggacccacctccatccttcggaaggccttcctggaatcccaccttggcctccgccctcggttccgccccgcccctctccccccgaccttggggcttgtgtcgagcccttgggtggggccaggaggaggtgatggcgtcagaggaggtgtggtcagaggtgacttgttcccacctccagggaggacgcttcgtcttcggccagcgcagacctggtgtttgtttgttgggctcacgcttgcacaatgaaggcttgttcacac

SEQ ID NO: 12768 - DNA, 9784 bp, Homo sapiens
aagatgcctgaagttctaacaccagagatggtttcctgctgcttccaggaacagggtctgttcttagtccaatgtggagttcctcatggggaccccattccccaggaatccaggttccacagtactctgacttggtctggctggtctcggctggcactttccctaggactgctaaaaccacggtgagggcggagagctgagggccgaagaaggcggggtgagtgatgcttgggagagggagacaggcttggctgaagccctggggaagggctgagggctgtgaagggggctgtggaggagaggtaaaaggagggaggaacacagcccttgacagggcctgtgaggcaggggagaacagggagcaggtaccggtgggacggtggcaggggaggggggcccatgactttgagggtgtcgtgttgcatgtgctgggggtgaggacccggagactggaggaacagggctccagggcagacgcatgggcaagcagagaggacagcccatggtagatgggaggggcacacaggtgtgctgttttcaggttggcaggagaggaggaaggtgtgtgcggggaggccctggagactggaagaggagagggggcccagtgagtgaggggcccttgttagaacctgggggtgggaaggggccaaggtgggtgccctccaccccaggctgtccctcaggcctgtgctgtgccccacagtgcaggcatcacctggccccacgagagagcagctcataggtacgactgaccactctgcctggcatggtgggggcctgcctgtgctggctcaaaccagttttagccccatgttgcaggttagggagtcaaggctgagtgtctgctaacttgtcttaggtcacttgaccaggggacattggccctggagctggaagtgagaccggggaaacggtctcactccctggaagaccgccagggtggggagtgtgactcagtctcagagtttgccatggagttgtctcccaggctcagcaccccctcctggccctggggccactccctcattttaggggcccatgtatgaaatgagaatgtgcagccccttgctcaaaaaggaagagtttcaggacagtgacggcagagtgttactgggctcagggccctgagtgacggcaggggtggcatatctcatggcaccaggtgggcctgtggtgcctcctgcctccagcccgggggcctcagcctgggcactgccctccacttcctgcccgggccgaagggcgtgcccctcgctctctctgggactgagactccattttaaacagctttctggttggtttcaggtttgctgaggtttcttctccctttctgtcccccgtttgaggagttctgatactgattgttgcagtttggtctgagatgggccccgcttcactctctgttgccctttagaaacacaaacttcagtctagactcgctggttcctcacgactcactggtcagacggccaccgagccggtgtccgtaagaggaaagggcgtggcatgggccggggcctgggcagtgttgggtcccgtggctgtgggtgagtcgagcatctaggacaggtcataggcctctgtggaggtggcaggtgggcatgtgtggcctcggggagggcctgtggtggcagcgccatggccaggtggtggcagtttcctttgcattagcgccactccatccctggcccgagccctctcccaggcatctggctcctctatgggtcaaggctgcctaatggttaggggcagcggtgctgtcattgcagcctggactgccggcaagccacttcccctctgcaagcccccatcagagggacgaaacaccgctttgtgggctgctgtgaattcagactgtggtcagccttcgatgcacaggtcagaccatcaccaaagagatgggacgagacaggctgctgcctgtctccctgggcagggctccccgctgagtgtttcctctgcttagccctgggctcccagtccaccccacccagcctgccccttacctctagctgctggtccgggaggaagggacaggggtctgcggggcagcaggtgatctccgcccgtgggtgtcggtggtggcagggggctccttgccgctgtgggtggaacgctggctatttaaggagaggaagggagaccacagcccctctggccctgaaaggctgcttcattcctgaggggtcccttgttgtgtcgggctgctcctctggctgctgctgctgctgccaccggagcgtgaatattctagtgtgtccctagcccatgccccccgcccccagcttggccacatagtctgagtgtgtgactgtctcagagactcagagcaggcgggggctgggtggggggcttgggctggagctgagggacacaacaggacgtttcagaaggggatgatttcctactgatggggggcagggaggggccggctgtcatggcaacaggcggcgctcccaggcctgcgcccgcagacggcggagggggcctgtgaacggagggtgggaggccgaggagtcttgctcacggagtgagaggcgactctttgaggacacttgctgtagggtccttgtgtcctgccctgtataatgaggccccatttgggcacacagaataaatcatggcctttatctggagcgaggaacagctgcaggagcctcataatggggcgctgtcctgtccgtgaggatgcggctcagctcagaggccgggtgctcgccggtgcagctccccttctgcacggaagcccatgaatctgaccgctggcctggggctcctccctggggtggctccgggctggggtgcctttgaatgctgccggcggccgcctctgagactgagtgaacaaagttcatttctctctgtctttctgaaaatgatacatccagcaacatgggaaaccaaatcacccttcctggtttcaaaagactttacattttgttgtttaaacattgaaaactgtatgtatgtggctagcatttaaggggcagtgtcttaaatttgtctcttcacatcaccctgtgcagctgggattattgccccattttacagacaaggaaactgaggctcaggcaaatgaagaaactcacccatcaacaaacagtaggaagcaacagagccaggatttgaacccaagcacatgtcactccagaacttaggctccgtgtgtgtgtgtgttttgtttttctgctgcattttgaatttagaattcttagatttgatcctaattcaacctgaaaaagaattctgaaggccacctttagatctgatgctgtgatctggtctgttgagaagctgtttcccatctggacttccttcaagagagatgggcttcccagtttgtctggcctgagagccagctgggtgtgaggtgtctgagccggggcgcaggtctctttcctgttgtgcccgcaggcggctgtctggaagaactggcccaggctggttggaaaggtggtggcttgaagctaaccaccctgagcagggcatttctgggctcacagaccttctgttattggggtgatcactgtcgatggcttcaagggcattgaccgtggtgatggagttttgaggcgttgagctgattcctgcatctttgagacagaaataattcctcgtgggttgagtgttgtcctgacgctcaggaggagtcaccagaatgtggagtggggtcatggggcctacatgctgagtctgggacagaggcaccgcagggggcatgggctggccgccataggcgccaggtggggcagctcagccccagacctgctgaggaggtggcctggggttggggctggggcacaggtgtctgggcaagggtgggcttcagggattgtggtgatgaagactgaagccacaggccacaactgcttcccgtcgctggggtgtaagagccagggctctggccagtagtcgaggggagatgatgcccaccgaggctcccttcctctcttgtagagtcattcattcaccgaggcattcggtcagctgaccctgagctgttgccccctgctgggcacatagggtcttggggaggcacagagagccagtcggcagcttagccagtgactgctgggcctttgtttgggccccttgccctgcacacagctgatgatgagacaccccagggcagatggagcacagtgctgtgcaggatggagtccagacacccagcagtagcaggtcctggggtccagggagggatgctgaatgggtggccctggcatctggggtctgcccaccataacctgggtggggatcttgggtctgcgattggatctcttccgtatcctccctgaccagcctgtcagaggggccaacactgggcgtcgggcagccgtggaggctcgtgaggagtggagagggcccctggggctggggggcctgggaagggaggcctggatgcagcaggagcaccagagagagattcgggtggcaggtggagacgggggccagggaggttggattggggcctttgtgtatctttgcctggggactctgaatctagattcctgccacctttgaggtccaaggaaacagaaaccatgttgatttgtctctccgttgagaacacagctgtcgtccaacacagcgagtagcatcagaaattattctgaggtcttcacaaaaagactctgtagtgacagttcctgggtttgggggcctccatctgacatagcagtgcttgtctttggagacagaaatcgcctgtacgtgtttgggcccttcttcatctggcaaaccccgaaggaagggggtgagtgggcctcccgggacactcactggccactctgctgggcacagtgacactcattataactcgtgtgtgttaaatacattgggaaaataatgctttcagcagatatcaattaaatgtctactgtattctgcagcatgccccaggcttagagaaagtagaaagaggaaaataccatccagagacagtaacctcgagcattctggcatctttcctgctgagcatgcgtcccattcccaggacacacttgtgaccttctgggccttgtgacagggcagtctgctttcccataccctgggctgagcccctttgaagcccccagctgctcagtgaagttgcaggggtctggcctctcttctcctggaggtggccaggctgtgtgggagtgggggctctgcccctaatgcccccgcctcccgcaggcatctctgccggccttgccacaaccgtgagaaggccaagggcctgggcaagtacatctgccagcggtgccacctggtcatcgacgagcagcccctcatgttcaggagcgacgcctaccaccctgaccacttcaactgcacccactgtgggtaggtgcgcagcccggccctgcagttgtgggggcggggagccagggctggcccagggtaagggcggtggggcctccacctggggaagtgttgaggagggagaggggagcagggtgggcagacagaggggtcccgagagcaaggctgcagggcagaggtgggctgggggctgggaagcagccatggcaggaagcttctctctccagggctctgtttggggggcacttgagactcaggaggcgggtgggctggacccctagactgcagacgagggttgagatggagcagtggaagggacctgagggggcagggcaagagaccgggagtgggcttggtgctggtgttggagagaggagttgcataggcagcccctcagcccccgtcctcgcccacccccaccgtcccctccagtcctctccgtgcctatccagacaccccctctggtttggaggaggaggggggcccaagaacagacctgcttctcagaggcctgggtgcagaacacagcccactcttctgggctgtgcaggaagtctgtgctccagggcctgtctggggcacaggaagtcttcaaagtgcccagagatcagaaggcgctgccgcctcggctctgcagggacagaatgggcccctcggggagccgtgccctggggtggaggcgctgctggcatgaccctgcagaagggcaggggtggcacctgggggctgcacgctgtcttccaggaaggagctgacagccgaggcccgcgagctgaagggtgagctctactgcctgccctgccatgacaagatgggcgtccccatctgcggggcctgccgccggcccatcgagggccgagtggtcaacgcgctgggcaagcagtggcacgtggaggtgagccaggctggtggacacgtggcctcaggttggggggtgccccagctcagggtcatggtaagagccctaaagctcctccacactcccagcccagggcgggtggctggctcccaacgaggcccttcctcaggggtactgcccctccctgtgctcagccagggaccccagcctgcccacgggagccaggagacccgagtgcacacacacggttgggtagctgtgcccacctctcctcttccccctgctggcattctaagagactccaaggtcaggagaaaaccttgggggcagtctgtccagagtgcctgggggttgtggatgacagaacccgctgcatggacagccctgtgcagacacggagctgaagagttcctcaggtgtgagcactgggtcacctggagtgcccccaccgggtggtgggctctcatgttctcatgggtacactgggaacagtgagcccaccacctcccctgatgacctggccagcgctgtgtccggaagctgtgccttgggtggcggcttgggtgggaggccatgcggtcctgccctgatgcaggccccagcccccagccctcatcctcacatgcagatccctgggggaatgcaaggtgctgctcagtgatcccaggcttgcagggggtgcctgcaggaggccccacgtggacaggcagggccgcctctgcctatgagggcccaccatgccgcagcaccaggctggcacctgactcctggggctgaggctgccgagggggaggccagactgggaggggatggtgactcacaaggttaccatcagtgccttagaggaggggtagggtctgctgaccccagggcattcacagaggtgtcagtcccctctgcccagtgtgaatcctgaaaggcctgcacctgcccagactctgctttctgtccccttctgtcactgctgcctcctggggccactgtggtcccctggagtcactggctcctggggtcactgttgtccccgggtcaccactgtccctcggggtcaccgctctagccctgatgccacccggcccgccctttgtccttgcagcactttgtctgtgccaagtgtgagaagccattcctggggcaccggcactatgagaagaagggcctggcctactgcgagactcactacaaccaggtgagcccggtgcagaaccttcagggatgcgggtctggaggggtggccaggagagctgccgtgagcaagggaggctgtgggcaccccctcaggagctctgccaggtgctgagcccaggcctgcaccctcagccctggctcctggcctggggtctcgagacctgggcagctctcttcagtctcagtgtcttcctttgaagaatgttctggggctggtgtgaggtcccgggcacatggggctgacagtgccagcaaccccctccctcccttgctctggtacagaaggcagggggcgctggtgggatgcagtcaccacctgggcccacctccttgcaggacagcagtggccagagcagaggggccttctggggagcaacgccccagcctgttgtccttcccggaagggtggttctcatgggttgccgtgccctcaacccagccttgcagctgggccctgggaggcagggcctgggagatgcctgagaggggccgtgttggagggccaggctggctgcatgatggccctgggctggggtgtgactgcctgcagctactctgacagcctgctcggcccacagctcttcggggacgtctgctacaactgcagccatgtgattgaaggcgatggtgaggccctgtgttccctcccccaccccacctgctctcctggggcctgggtgctgcagctgtgagcccagccgggcctgcggcagcctagccaggcctgctgagtcccacgcttccctcacagtggtgtcggccctcaacaaggcctggtgtgtgagctgcttctcctgctccacctgcaacagcaagctcaccctgaagtgagtccctgtgatcgtgggatggggctcagggtggagggggctcctgcaggtccttcctctcagcagccctcctgcacaccagctgagtctggcctggggatatggtggggacaaggggcagcccggccttataccacccagggagatgggggcaggttcagggggtctaggggatccagggaccccagggaccccaggcacagtgagaggaggaggaacactcatgcctccaacacacctgccagaaccctgggctctggggagggaagggcattccagctcagggaacagcatatgcaaaagcagcagtgtcagctgctcatccaggaagcctcgaggggtgtgggatggctggagctgggagaggagagatggcgtccaggtttccaagggctgtggggaggcatagagggttctggggtttcagaacctgagagaagcctctgggaggcaagggaagcctcaaggcccttctcatccctatgctctctggccatctcaccctagggcctggcctgctggctaggagaggctggtgtggggaggctgggggctgagggaagcccactccacagtcacctgtctggggttaaaggggtgggcgtggggctctgctgacagctcagcttcctcctcaggaacaagtttgtggagttcgacatgaagcccgtgtgtaagaggtgctacgagaagttcccgctggagctgaagaagcggctgaagaagctgtcggagctgacctcccgcaaggcccagcccaaggccacagacctcaactctgcctgaaggccctcttgcgcagctgcctctcggcccctccgccttctcccctcctgctgtccatgcttggccccctcgtccccatccacctgtgccctccgcatcttaccctccctttctctttcctcattgccttctcccttcctgttccctcatctctgccttccccatgtctctcctctccttggccgtggcttctgtctgtgaggaggcaggagctggggagtgggagcctatgaccccacgtctgacagccatgtccacctgtgcccacagcttccgcccacagacctccagggacaggagcaaattgcaccacagctccccgcctggcctggccctccccaggcggctcagtggctcatgctgtcctgtgagagcccctgccccagagcggccccactaagcgcatgtggctcctgggctacccacagccagggcagcctgctggagccacagggccagggccatgcagatggaggcctctgggagccacctccaatccctcaccactcactcaaccagtggcacagtgtccttgtgcccacactgagccagcaagtcctgctgtccacacccacaagctacctggagggacaggacccacctccatccttcggaaggccttcctggaatcccaccttggcctccgccctcggttccgccccgcccctctccccccgaccttggggcttgtgtcgagcccttgggtggggccaggaggaggtgatggcgtcagaggaggtgtggtcagaggtgacttgttcccacctccagggaggacgcttcgtcttcggccagcgcagacctggtgttt

SEQ ID NO: 12769 - DNA, 1695 bp, Homo sapiens
aagatgcctgaagttctaacaccagagatggtttcctgctgcttccaggaacagggtctgttcttagtccaatgtggagttcctcatggggaccccattccccaggaatccaggttccacagtactctgacttggtctggctggtctcggctggcactttccctaggactgctaaaaccacggtgagggcggagagctgagggccgaagaaggcggggcatctctgccggccttgccacaaccgtgagaaggccaagggcctgggcaagtacatctgccagcggtgccacctggtcatcgacgagcagcccctcatgttcaggagcgacgcctaccaccctgaccacttcaactgcacccactgtgggaaggagctgacagccgaggcccgcgagctgaagggtgagctctactgcctgccctgccatgacaagatgggcgtccccatctgcggggcctgccgccggcccatcgagggccgagtggtcaacgcgctgggcaagcagtggcacgtggagcactttgtctgtgccaagtgtgagaagccattcctggggcaccggcactatgagaagaagggcctggcctactgcgagactcactacaaccagctcttcggggacgtctgctacaactgcagccatgtgattgaaggcgatgtggtgtcggccctcaacaaggcctggtgtgtgagctgcttctcctgctccacctgcaacagcaagctcaccctgaagaacaagtttgtggagttcgacatgaagcccgtgtgtaagaggtgctacgagaagttcccgctggagctgaagaagcggctgaagaagctgtcggagctgacctcccgcaaggcccagcccaaggccacagacctcaactctgcctgaaggccctcttgcgcagctgcctctcggcccctccgccttctcccctcctgctgtccatgcttggccccctcgtccccatccacctgtgccctccgcatcttaccctccctttctctttcctcattgccttctcccttcctgttccctcatctctgccttccccatgtctctcctctccttggccgtggcttctgtctgtgaggaggcaggagctggggagtgggagcctatgaccccacgtctgacagccatgtccacctgtgcccacagcttccgcccacagacctccagggacaggagcaaattgcaccacagctccccgcctggcctggccctccccaggcggctcagtggctcatgctgtcctgtgagagcccctgccccagagcggccccactaagcgcatgtggctcctgggctacccacagccagggcagcctgctggagccacagggccagggccatgcagatggaggcctctgggagccacctccaatccctcaccactcactcaaccagtggcacagtgtccttgtgcccacactgagccagcaagtcctgctgtccacacccacaagctacctggagggacaggacccacctccatccttcggaaggccttcctggaatcccaccttggcctccgccctcggttccgccccgcccctctccccccgaccttggggcttgtgtcgagcccttgggtggggccaggaggaggtgatggcgtcagaggaggtgtggtcagaggtgacttgttcccacctccagggaggacgcttcgtcttcggccagcgcagacctggtgttt

SEQ ID NO: 12770 - DNA, 11556 bp, Homo sapiens
gcattctgaacttcagcacaaggcaaacgcagaaccagggcttggaatttcgccgctatgcagctgcacccctgccacccaggagatctgaggctcctcagagctgggaggaccgggtcagtgccatggcggggaatgggacgtgagccttgcctgggtgaggctctgggttttctgttctgcctctgaggtgtgctgtctgagtgacaggggtggtgaggggcgggggcagtgtgtctccgggattccagctcctcctcagcccaagccttggcaggtgagttctgttcatcctgagtgcctggaccctccctgacccacctgcccacaggtgcagtggccggggtgtcaccgctttctgcttcccctgaccatggcttgcccctggcacttaggagggtgcccccaggatggcagcaagggctgtaccctgggacgtcagaggtctactctttttacccacctgagagtttcagcatctctcttgggggctttctggatccagcccaccaactccgtttggacatcctgacaggtggggagacctgtgtttaggagaagcctgtgcctgggtatcaggccagctgggagtattttctctcccagagtagatccaccaccagggggcagcatctcttccaggaggggaagacccattttacccagcgtcagagacactggccagcgctgttgaggacggatctgcagccccagagaggcctggaggcctcgtggcttgcccacgtttgaaggccaagtgcagagccctgtgacagtcctgggtaacaagtcatgtccgtctggtgaaccctgggtctggatagggtgctccccaccctcagcagagaaacccactcttgttttgattttagtcaactcagaagattgaagaaggagagtgagggtcccaaacactctgcctccccaacccaggcctgcgagtggcagtgtgggcaggcggtggggccagagcagcccgcagcccggaaccagggcaggacagcgcacctggcctgcctttgaattggggtcaccagcgggcttcggccaggtgggtgctgatgatggcacagcttctggggctcctctgggcacctggcttcccagtatccaccatccccaccctgcacagccaggctgaagcagaggctggagagaggtttgcataagagaagctggcatcctgcctgtgcccattgtggcagcaggaggggaggaggcacgggccacagccctggcagggtcctcatcctgggcgagcctggctctgcaccgaacagccggggtcctgcctgcagcaaattcactctgcacatttctccctgcccttccttccttccttccttccttccttccttccttccttccttcctaccttcctctctctctcacttcgctttgcttgtttgcttgcttttctttattttccttttttcttttcttttttctttttttcttttctttttccttccttccttcctttcttcttttctctttctttctttttctttctttcctccctccctccccttcctcccctcccctccctcccctcccctccctcccctccccccctcccctcccctcccctccctctcttttttctttttttctttctctttttcaaggtctccctctgtcacccaggctggagtgcagtggtgcaatcagctcactgcagcctcaacctccagggctcaagtgatcctcccacctcaacctcctgaatagctgggactacaggcgcacaccaccacacccggctaatttttgtattttttggtagagacggttttgccatgttgcccaggctggtctcaaactcctgggctcaagtgatcctctctccttggcctcccaaagtgctccttggcctcccaaagtgctgggattacaggcatgagtcactgcgcccagcccctctcctcttactgattccacagggctgtctcaggatgctggtggcacggggcagagagggcatggtgactgttcatggacacagcagcccctcgaggaggaggctggagccatcctcatatggaggagaagcaggcatggtggtggccctagccctagggaagggtgggccgcacccttccttcaggagagcgagtggccagctgctgtggccctcacatggagggtgagggctggcccgagcacctggccatcaatgtcctcaagcaaaggggagggcaactacctaataatattaccttttagctatttctctaggcaggttcccctacctgaaaagattgcccccggcttcagagtgtttcaagatgcctgaagttctaacaccagagatggtttcctgctgcttccaggaacagggtctgttcttagtccaatgtggagttcctcatggggaccccattccccaggaatccaggttccacagtactctgacttggtctggctggtctcggctggcactttccctaggactgctaaaaccacggtgagggcggagagctgagggccgaagaaggcggggtgagtgatgcttgggagagggagacaggcttggctgaagccctggggaagggctgagggctgtgaagggggctgtggaggagaggtaaaaggagggaggaacacagcccttgacagggcctgtgaggcaggggagaacagggagcaggtaccggtgggacggtggcaggggaggggggcccatgactttgagggtgtcgtgttgcatgtgctgggggtgaggacccggagactggaggaacagggctccagggcagacgcatgggcaagcagagaggacagcccatggtagatgggaggggcacacaggtgtgctgttttcaggttggcaggagaggaggaaggtgtgtgcggggaggccctggagactggaagaggagagggggcccagtgagtgaggggcccttgttagaacctgggggtgggaaggggccaaggtgggtgccctccaccccaggctgtccctcaggcctgtgctgtgccccacagtgcaggcatcacctggccccacgagagagcagctcataggtacgactgaccactctgcctggcatggtgggggcctgcctgtgctggctcaaaccagttttagccccatgttgcaggttagggagtcaaggctgagtgtctgctaacttgtcttaggtcacttgaccaggggacattggccctggagctggaagtgagaccggggaaacggtctcactccctggaagaccgccagggtggggagtgtgactcagtctcagagtttgccatggagttgtctcccaggctcagcaccccctcctggccctggggccactccctcattttaggggcccatgtatgaaatgagaatgtgcagccccttgctcaaaaaggaagagtttcaggacagtgacggcagagtgttactgggctcagggccctgagtgacggcaggggtggcatatctcatggcaccaggtgggcctgtggtgcctcctgcctccagcccgggggcctcagcctgggcactgccctccacttcctgcccgggccgaagggcgtgcccctcgctctctctgggactgagactccattttaaacagctttctggttggtttcaggtttgctgaggtttcttctccctttctgtcccccgtttgaggagttctgatactgattgttgcagtttggtctgagatgggccccgcttcactctctgttgccctttagaaacacaaacttcagtctagactcgctggttcctcacgactcactggtcagacggccaccgagccggtgtccgtaagaggaaagggcgtggcatgggccggggcctgggcagtgttgggtcccgtggctgtgggtgagtcgagcatctaggacaggtcataggcctctgtggaggtggcaggtgggcatgtgtggcctcggggagggcctgtggtggcagcgccatggccaggtggtggcagtttcctttgcattagcgccactccatccctggcccgagccctctcccaggcatctggctcctctatgggtcaaggctgcctaatggttaggggcagcggtgctgtcattgcagcctggactgccggcaagccacttcccctctgcaagcccccatcagagggacgaaacaccgctttgtgggctgctgtgaattcagactgtggtcagccttcgatgcacaggtcagaccatcaccaaagagatgggacgagacaggctgctgcctgtctccctgggcagggctccccgctgagtgtttcctctgcttagccctgggctcccagtccaccccacccagcctgccccttacctctagctgctggtccgggaggaagggacaggggtctgcggggcagcaggtgatctccgcccgtgggtgtcggtggtggcagggggctccttgccgctgtgggtggaacgctggctatttaaggagaggaagggagaccacagcccctctggccctgaaaggctgcttcattcctgaggggtcccttgttgtgtcgggctgctcctctggctgctgctgctgctgccaccggagcgtgaatattctagtgtgtccctagcccatgccccccgcccccagcttggccacatagtctgagtgtgtgactgtctcagagactcagagcaggcgggggctgggtggggggcttgggctggagctgagggacacaacaggacgtttcagaaggggatgatttcctactgatggggggcagggaggggccggctgtcatggcaacaggcggcgctcccaggcctgcgcccgcagacggcggagggggcctgtgaacggagggtgggaggccgaggagtcttgctcacggagtgagaggcgactctttgaggacacttgctgtagggtccttgtgtcctgccctgtataatgaggccccatttgggcacacagaataaatcatggcctttatctggagcgaggaacagctgcaggagcctcataatggggcgctgtcctgtccgtgaggatgcggctcagctcagaggccgggtgctcgccggtgcagctccccttctgcacggaagcccatgaatctgaccgctggcctggggctcctccctggggtggctccgggctggggtgcctttgaatgctgccggcggccgcctctgagactgagtgaacaaagttcatttctctctgtctttctgaaaatgatacatccagcaacatgggaaaccaaatcacccttcctggtttcaaaagactttacattttgttgtttaaacattgaaaactgtatgtatgtggctagcatttaaggggcagtgtcttaaatttgtctcttcacatcaccctgtgcagctgggattattgccccattttacagacaaggaaactgaggctcaggcaaatgaagaaactcacccatcaacaaacagtaggaagcaacagagccaggatttgaacccaagcacatgtcactccagaacttaggctccgtgtgtgtgtgtgttttgtttttctgctgcattttgaatttagaattcttagatttgatcctaattcaacctgaaaaagaattctgaaggccacctttagatctgatgctgtgatctggtctgttgagaagctgtttcccatctggacttccttcaagagagatgggcttcccagtttgtctggcctgagagccagctgggtgtgaggtgtctgagccggggcgcaggtctctttcctgttgtgcccgcaggcggctgtctggaagaactggcccaggctggttggaaaggtggtggcttgaagctaaccaccctgagcagggcatttctgggctcacagaccttctgttattggggtgatcactgtcgatggcttcaagggcattgaccgtggtgatggagttttgaggcgttgagctgattcctgcatctttgagacagaaataattcctcgtgggttgagtgttgtcctgacgctcaggaggagtcaccagaatgtggagtggggtcatggggcctacatgctgagtctgggacagaggcaccgcagggggcatgggctggccgccataggcgccaggtggggcagctcagccccagacctgctgaggaggtggcctggggttggggctggggcacaggtgtctgggcaagggtgggcttcagggattgtggtgatgaagactgaagccacaggccacaactgcttcccgtcgctggggtgtaagagccagggctctggccagtagtcgaggggagatgatgcccaccgaggctcccttcctctcttgtagagtcattcattcaccgaggcattcggtcagctgaccctgagctgttgccccctgctgggcacatagggtcttggggaggcacagagagccagtcggcagcttagccagtgactgctgggcctttgtttgggccccttgccctgcacacagctgatgatgagacaccccagggcagatggagcacagtgctgtgcaggatggagtccagacacccagcagtagcaggtcctggggtccagggagggatgctgaatgggtggccctggcatctggggtctgcccaccataacctgggtggggatcttgggtctgcgattggatctcttccgtatcctccctgaccagcctgtcagaggggccaacactgggcgtcgggcagccgtggaggctcgtgaggagtggagagggcccctggggctggggggcctgggaagggaggcctggatgcagcaggagcaccagagagagattcgggtggcaggtggagacgggggccagggaggttggattggggcctttgtgtatctttgcctggggactctgaatctagattcctgccacctttgaggtccaaggaaacagaaaccatgttgatttgtctctccgttgagaacacagctgtcgtccaacacagcgagtagcatcagaaattattctgaggtcttcacaaaaagactctgtagtgacagttcctgggtttgggggcctccatctgacatagcagtgcttgtctttggagacagaaatcgcctgtacgtgtttgggcccttcttcatctggcaaaccccgaaggaagggggtgagtgggcctcccgggacactcactggccactctgctgggcacagtgacactcattataactcgtgtgtgttaaatacattgggaaaataatgctttcagcagatatcaattaaatgtctactgtattctgcagcatgccccaggcttagagaaagtagaaagaggaaaataccatccagagacagtaacctcgagcattctggcatctttcctgctgagcatgcgtcccattcccaggacacacttgtgaccttctgggccttgtgacagggcagtctgctttcccataccctgggctgagcccctttgaagcccccagctgctcagtgaagttgcaggggtctggcctctcttctcctggaggtggccaggctgtgtgggagtgggggctctgcccctaatgcccccgcctcccgcaggcatctctgccggccttgccacaaccgtgagaaggccaagggcctgggcaagtacatctgccagcggtgccacctggtcatcgacgagcagcccctcatgttcaggagcgacgcctaccaccctgaccacttcaactgcacccactgtgggtaggtgcgcagcccggccctgcagttgtgggggcggggagccagggctggcccagggtaagggcggtggggcctccacctggggaagtgttgaggagggagaggggagcagggtgggcagacagaggggtcccgagagcaaggctgcagggcagaggtgggctgggggctgggaagcagccatggcaggaagcttctctctccagggctctgtttggggggcacttgagactcaggaggcgggtgggctggacccctagactgcagacgagggttgagatggagcagtggaagggacctgagggggcagggcaagagaccgggagtgggcttggtgctggtgttggagagaggagttgcataggcagcccctcagcccccgtcctcgcccacccccaccgtcccctccagtcctctccgtgcctatccagacaccccctctggtttggaggaggaggggggcccaagaacagacctgcttctcagaggcctgggtgcagaacacagcccactcttctgggctgtgcaggaagtctgtgctccagggcctgtctggggcacaggaagtcttcaaagtgcccagagatcagaaggcgctgccgcctcggctctgcagggacagaatgggcccctcggggagccgtgccctggggtggaggcgctgctggcatgaccctgcagaagggcaggggtggcacctgggggctgcacgctgtcttccaggaaggagctgacagccgaggcccgcgagctgaagggtgagctctactgcctgccctgccatgacaagatgggcgtccccatctgcggggcctgccgccggcccatcgagggccgagtggtcaacgcgctgggcaagcagtggcacgtggaggtgagccaggctggtggacacgtggcctcaggttggggggtgccccagctcagggtcatggtaagagccctaaagctcctccacactcccagcccagggcgggtggctggctcccaacgaggcccttcctcaggggtactgcccctccctgtgctcagccagggaccccagcctgcccacgggagccaggagacccgagtgcacacacacggttgggtagctgtgcccacctctcctcttccccctgctggcattctaagagactccaaggtcaggagaaaaccttgggggcagtctgtccagagtgcctgggggttgtggatgacagaacccgctgcatggacagccctgtgcagacacggagctgaagagttcctcaggtgtgagcactgggtcacctggagtgcccccaccgggtggtgggctctcatgttctcatgggtacactgggaacagtgagcccaccacctcccctgatgacctggccagcgctgtgtccggaagctgtgccttgggtggcggcttgggtgggaggccatgcggtcctgccctgatgcaggccccagcccccagccctcatcctcacatgcagatccctgggggaatgcaaggtgctgctcagtgatcccaggcttgcagggggtgcctgcaggaggccccacgtggacaggcagggccgcctctgcctatgagggcccaccatgccgcagcaccaggctggcacctgactcctggggctgaggctgccgagggggaggccagactgggaggggatggtgactcacaaggttaccatcagtgccttagaggaggggtagggtctgctgaccccagggcattcacagaggtgtcagtcccctctgcccagtgtgaatcctgaaaggcctgcacctgcccagactctgctttctgtccccttctgtcactgctgcctcctggggccactgtggtcccctggagtcactggctcctggggtcactgttgtccccgggtcaccactgtccctcggggtcaccgctctagccctgatgccacccggcccgccctttgtccttgcagcactttgtctgtgccaagtgtgagaagccattcctggggcaccggcactatgagaagaagggcctggcctactgcgagactcactacaaccaggtgagcccggtgcagaaccttcagggatgcgggtctggaggggtggccaggagagctgccgtgagcaagggaggctgtgggcaccccctcaggagctctgccaggtgctgagcccaggcctgcaccctcagccctggctcctggcctggggtctcgagacctgggcagctctcttcagtctcagtgtcttcctttgaagaatgttctggggctggtgtgaggtcccgggcacatggggctgacagtgccagcaaccccctccctcccttgctctggtacagaaggcagggggcgctggtgggatgcagtcaccacctgggcccacctccttgcaggacagcagtggccagagcagaggggccttctggggagcaacgccccagcctgttgtccttcccggaagggtggttctcatgggttgccgtgccctcaacccagccttgcagctgggccctgggaggcagggcctgggagatgcctgagaggggccgtgttggagggccaggctggctgcatgatggccctgggctggggtgtgactgcctgcagctactctgacagcctgctcggcccacagctcttcggggacgtctgctacaactgcagccatgtgattgaaggcgatggtgaggccctgtgttccctcccccaccccacctgctctcctggggcctgggtgctgcagctgtgagcccagccgggcctgcggcagcctagccaggcctgctgagtcccacgcttccctcacagtggtgtcggccctcaacaaggcctggtgtgtgagctgcttctcctgctccacctgcaacagcaagctcaccctgaagtgagtccctgtgatcgtgggatggggctcagggtggagggggctcctgcaggtccttcctctcagcagccctcctgcacaccagctgagtctggcctggggatatggtggggacaaggggcagcccggccttataccacccagggagatgggggcaggttcagggggtctaggggatccagggaccccagggaccccaggcacagtgagaggaggaggaacactcatgcctccaacacacctgccagaaccctgggctctggggagggaagggcattccagctcagggaacagcatatgcaaaagcagcagtgtcagctgctcatccaggaagcctcgaggggtgtgggatggctggagctgggagaggagagatggcgtccaggtttccaagggctgtggggaggcatagagggttctggggtttcagaacctgagagaagcctctgggaggcaagggaagcctcaaggcccttctcatccctatgctctctggccatctcaccctagggcctggcctgctggctaggagaggctggtgtggggaggctgggggctgagggaagcccactccacagtcacctgtctggggttaaaggggtgggcgtggggctctgctgacagctcagcttcctcctcaggaacaagtttgtggagttcgacatgaagcccgtgtgtaagaggtgctacgagaagttcccgctggagctgaagaagcggctgaagaagctgtcggagctgacctcccgcaaggcccagcccaaggccacagacctcaactctgcctgaaggccctcttgcgcagctgcctctcggcccctccgccttctcccctcctgctgtccatgcttggccccctcgtccccatccacctgtgccctccgcatcttaccctccctttctctttcctcattgccttctcccttcctgttccctcatctctgccttccccatgtctctcctctccttggccgtggcttctgtctgtgaggaggcaggagctggggagtgggagcctatgaccccacgtctgacagccatgtccacctgtgcccacagcttccgcccacagacctccagggacagg

SEQ ID NO: 12771 - DNA, 930 bp, Homo sapiens
gcattctgaacttcagcacaaggcaaacgcagaaccagggcttggaatttcgccgctatgcagctgcacccctgccacccaggagatctgaggctcctcagagctgggaggaccgggcatctctgccggccttgccacaaccgtgagaaggccaagggcctgggcaagtacatctgccagcggtgccacctggtcatcgacgagcagcccctcatgttcaggagcgacgcctaccaccctgaccacttcaactgcacccactgtggcactttgtctgtgccaagtgtgagaagccattcctggggcaccggcactatgagaagaagggcctggcctactgcgagactcactacaaccagctcttcggggacgtctgctacaactgcagccatgtgattgaaggcgatgtggtgtcggccctcaacaaggcctggtgtgtgagctgcttctcctgctccacctgcaacagcaagctcaccctgaagaacaagtttgtggagttcgacatgaagcccgtgtgtaagaggtgctacgagaagttcccgctggagctgaagaagcggctgaagaagctgtcggagctgacctcccgcaaggcccagcccaaggccacagacctcaactctgcctgaaggccctcttgcgcagctgcctctcggcccctccgccttctcccctcctgctgtccatgcttggccccctcgtccccatccacctgtgccctccgcatcttaccctccctttctctttcctcattgccttctcccttcctgttccctcatctctgccttccccatgtctctcctctccttggccgtggcttctgtctgtgaggaggcaggagctggggagtgggagcctatgaccccacgtctgacagccatgtccacctgtgcccacagcttccgcccacagacctccagggacagg

SEQ ID NO: 12772 - DNA, 3751 bp, Homo sapiens
tgggcgtccccatctgcggggcctgccgccggcccatcgagggccgagtggtcaacgcgctgggcaagcagtggcacgtggaggtgagccaggctggtggacacgtggcctcaggttggggggtgccccagctcagggtcatggtaagagccctaaagctcctccacactcccagcccagggcgggtggctggctcccaacgaggcccttcctcaggggtactgcccctccctgtgctcagccagggaccccagcctgcccacgggagccaggagacccgagtgcacacacacggttgggtagctgtgcccacctctcctcttccccctgctggcattctaagagactccaaggtcaggagaaaaccttgggggcagtctgtccagagtgcctgggggttgtggatgacagaacccgctgcatggacagccctgtgcagacacggagctgaagagttcctcaggtgtgagcactgggtcacctggagtgcccccaccgggtggtgggctctcatgttctcatgggtacactgggaacagtgagcccaccacctcccctgatgacctggccagcgctgtgtccggaagctgtgccttgggtggcggcttgggtgggaggccatgcggtcctgccctgatgcaggccccagcccccagccctcatcctcacatgcagatccctgggggaatgcaaggtgctgctcagtgatcccaggcttgcagggggtgcctgcaggaggccccacgtggacaggcagggccgcctctgcctatgagggcccaccatgccgcagcaccaggctggcacctgactcctggggctgaggctgccgagggggaggccagactgggaggggatggtgactcacaaggttaccatcagtgccttagaggaggggtagggtctgctgaccccagggcattcacagaggtgtcagtcccctctgcccagtgtgaatcctgaaaggcctgcacctgcccagactctgctttctgtccccttctgtcactgctgcctcctggggccactgtggtcccctggagtcactggctcctggggtcactgttgtccccgggtcaccactgtccctcggggtcaccgctctagccctgatgccacccggcccgccctttgtccttgcagcactttgtctgtgccaagtgtgagaagccattcctggggcaccggcactatgagaagaagggcctggcctactgcgagactcactacaaccaggtgagcccggtgcagaaccttcagggatgcgggtctggaggggtggccaggagagctgccgtgagcaagggaggctgtgggcaccccctcaggagctctgccaggtgctgagcccaggcctgcaccctcagccctggctcctggcctggggtctcgagacctgggcagctctcttcagtctcagtgtcttcctttgaagaatgttctggggctggtgtgaggtcccgggcacatggggctgacagtgccagcaaccccctccctcccttgctctggtacagaaggcagggggcgctggtgggatgcagtcaccacctgggcccacctccttgcaggacagcagtggccagagcagaggggccttctggggagcaacgccccagcctgttgtccttcccggaagggtggttctcatgggttgccgtgccctcaacccagccttgcagctgggccctgggaggcagggcctgggagatgcctgagaggggccgtgttggagggccaggctggctgcatgatggccctgggctggggtgtgactgcctgcagctactctgacagcctgctcggcccacagctcttcggggacgtctgctacaactgcagccatgtgattgaaggcgatggtgaggccctgtgttccctcccccaccccacctgctctcctggggcctgggtgctgcagctgtgagcccagccgggcctgcggcagcctagccaggcctgctgagtcccacgcttccctcacagtggtgtcggccctcaacaaggcctggtgtgtgagctgcttctcctgctccacctgcaacagcaagctcaccctgaagtgagtccctgtgatcgtgggatggggctcagggtggagggggctcctgcaggtccttcctctcagcagccctcctgcacaccagctgagtctggcctggggatatggtggggacaaggggcagcccggccttataccacccagggagatgggggcaggttcagggggtctaggggatccagggaccccagggaccccaggcacagtgagaggaggaggaacactcatgcctccaacacacctgccagaaccctgggctctggggagggaagggcattccagctcagggaacagcatatgcaaaagcagcagtgtcagctgctcatccaggaagcctcgaggggtgtgggatggctggagctgggagaggagagatggcgtccaggtttccaagggctgtggggaggcatagagggttctggggtttcagaacctgagagaagcctctgggaggcaagggaagcctcaaggcccttctcatccctatgctctctggccatctcaccctagggcctggcctgctggctaggagaggctggtgtggggaggctgggggctgagggaagcccactccacagtcacctgtctggggttaaaggggtgggcgtggggctctgctgacagctcagcttcctcctcaggaacaagtttgtggagttcgacatgaagcccgtgtgtaagaggtgctacgagaagttcccgctggagctgaagaagcggctgaagaagctgtcggagctgacctcccgcaaggcccagcccaaggccacagacctcaactctgcctgaaggccctcttgcgcagctgcctctcggcccctccgccttctcccctcctgctgtccatgcttggccccctcgtccccatccacctgtgccctccgcatcttaccctccctttctctttcctcattgccttctcccttcctgttccctcatctctgccttccccatgtctctcctctccttggccgtggcttctgtctgtgaggaggcaggagctggggagtgggagcctatgaccccacgtctgacagccatgtccacctgtgcccacagcttccgcccacagacctccagggacaggagcaaattgcaccacagctccccgcctggcctggccctccccaggcggctcagtggctcatgctgtcctgtgagagcccctgccccagagcggccccactaagcgcatgtggctcctgggctacccacagccagggcagcctgctggagccacagggccagggccatgcagatggaggcctctgggagccacctccaatccctcaccactcactcaaccagtggcacagtgtccttgtgcccacactgagccagcaagtcctgctgtccacacccacaagctacctggagggacaggacccacctccatccttcggaaggccttcctggaatcccaccttggcctccgccctcggttccgccccgcccctctccccccgaccttggggcttgtgtcgagcccttgggtggggccaggaggaggtgatggcgtcagaggaggtgtggtcagaggtgacttgttcccacctccagggaggacgcttcgtcttcggccagcgcagacctggtgtttgtttgttgggctcacgcttgcacaatgaaggcttgttcacacaaccacagcagcctgcgtggtttgtggcgggggtcgggggtggaggg

SEQ ID NO: 12773 - DNA, 1409 bp, Homo sapiens
tgggcgtccccatctgcggggcctgccgccggcccatcgagggccgagtggtcaacgcgctgggcaagcagtggcacgtggaggtgagccaggctggtggacacgtggcctcaggttggggggtgccccagctcagggtcatgcactttgtctgtgccaagtgtgagaagccattcctggggcaccggcactatgagaagaagggcctggcctactgcgagactcactacaaccagctcttcggggacgtctgctacaactgcagccatgtgattgaaggcgatgtggtgtcggccctcaacaaggcctggtgtgtgagctgcttctcctgctccacctgcaacagcaagctcaccctgaagaacaagtttgtggagttcgacatgaagcccgtgtgtaagaggtgctacgagaagttcccgctggagctgaagaagcggctgaagaagctgtcggagctgacctcccgcaaggcccagcccaaggccacagacctcaactctgcctgaaggccctcttgcgcagctgcctctcggcccctccgccttctcccctcctgctgtccatgcttggccccctcgtccccatccacctgtgccctccgcatcttaccctccctttctctttcctcattgccttctcccttcctgttccctcatctctgccttccccatgtctctcctctccttggccgtggcttctgtctgtgaggaggcaggagctggggagtgggagcctatgaccccacgtctgacagccatgtccacctgtgcccacagcttccgcccacagacctccagggacaggagcaaattgcaccacagctccccgcctggcctggccctccccaggcggctcagtggctcatgctgtcctgtgagagcccctgccccagagcggccccactaagcgcatgtggctcctgggctacccacagccagggcagcctgctggagccacagggccagggccatgcagatggaggcctctgggagccacctccaatccctcaccactcactcaaccagtggcacagtgtccttgtgcccacactgagccagcaagtcctgctgtccacacccacaagctacctggagggacaggacccacctccatccttcggaaggccttcctggaatcccaccttggcctccgccctcggttccgccccgcccctctccccccgaccttggggcttgtgtcgagcccttgggtggggccaggaggaggtgatggcgtcagaggaggtgtggtcagaggtgacttgttcccacctccagggaggacgcttcgtcttcggccagcgcagacctggtgtttgtttgttgggctcacgcttgcacaatgaaggcttgttcacacaaccacagcagcctgcgtggtttgtggcgggggtcgggggtggaggg

SEQ ID NO: 12774 - DNA, 26025 bp, Homo sapiens
gtggtcccatagcccctgcaccaggcggcccgcgcccgcgacctcaaggcggctgccccgcgccatggcggcccggctgggtgcgctggccgcgtcggggctgtaccggcggcgccagcaccggcagagcccgccgccagccacggggtaggtggccaggggcggggcgggtggcggggacaatggccggaaagctgcggcggcagggcaggccttccctcggaaacccgaccggggccctccgacgccgtgggctctgccccggcgtcggatgggccctgggttggcgacagggtgggcgcgtgcgactttatctaacagggttggatgtcacctgtgatcagctctcctggcagggtgcgcccagggacctatgttagagacgagggagcctgtgtagcccccagcactgctttcagacgggggtgatcatgctgcactttatagatgagcagacaggttctgagcagagcagacacctgctggactcacccaccccaaacatggctatgctgtgatttgaacccaggttagactgactccagcagtggggttcaggatggtcctcagggcatctcagagaatgagttggctctggatggggaggttgggaggggcacggggatggtggtggagccacctcccctcactcttggggtcaggggcatgaggaggagctcctgaaaatgttgcctttgcagtgccgaggggccagcggggaagagagagcaatagggctgtgaccttggggtccttggcatcaaggtgacagatagggaccctggggaggaggccaaggctgggcagaagggctggggcgggggggcagggagggagccaggaacataagtcgcagaggtaggggagggcctggaggacccaggagcagaggaaggccagtgccacccagggcaagcatagcccactctcagctccttgtgtgtggtcagggaaggctcccagagtggcaattagaggactgagccatcaaagatatcttttgctgagaacagaagaggaaggagggcaccgagtggagggcgggaactgcaggccggcagcacggccatctgtggagtccctgctgcatgctgggctcccgcttgtgctggcatggcaggtctggggcagcctgctgttcaggtggggacccccagactcaggaggccaagtcactcacctgagtgtggcagagctggagcaggcaccctccctggtcaacctctggacagccctggatgcgtgtggcataactgtggtaccaggctgcgagtggccagggcactgatggccccaaggctgttctggagtgattttcacagtactgataccacagctgagatgcaggcaggacaggcacgatgatgacaggcctggggcagccctgagcatgcatgcgcatgtgactattcacactgtttttctttgaacttctggttcatgtcctttgtcagttctttgttgttagtgtaacatgtttcagttgtacctgcttaaaagaaaagccactagagcaaagagatatggcaagggcttcaaaaaagctctaatttcagacaggtttcatactgatttggagtctgtttctgatggtgtcaatgcatcttgtgtatagcagcccaggcagcatgttaattttttcttttttattttattattattagactttaagttttagggtacatgtgcacaacctgcaggtttgttccatatgtatacatgtgccatgttggtttgctgcacccattaactcgtcatttagcattaggtatatctcctaatgctatccctccccccaccccccaccccccaccccccaccccacaagagcctctggtgtgtgatgttccccttcctgtgtccatgtgttctcaatgttcaattcccacctacgagtgagaacaggcagcatgttaattttctagcgtccccatggtgggctggctttttgtacatttttgttgacctcatgtggccaggtgacccgacactggcctctggctggcttcatggaggcggggcagggaggaagcccaggcagtgctgagggactggagctgctccctgggctgtgctgcagtagggtccctccccgaaaccctctgcatctggaatagtgcctatcagtgcaggtgctcagtgaggacttcgttggaaggaggacagaagcatgggctgtgcttgcaggaatggcctcactgaaccctcccaacagtccctggaggtagctattcctggcccattttataaacgaggaagttgaggttcagagtcctgtgctgcaggtcacacagacagggggcgtcggggccagggttgcagcctggtgtgcctggctataggggacacacccttggtctgactgctgctcaggccgacgtggcctcagcaacacttgctcatcttgggtgtgaccagacttcttgtggctggcccccaactcttcccagatccttacacacacttccttgactcagatatcaggaaggctgggatggaggaaggtctggggttgttgaagaaacagaatccggaatgggggatgccaagaggagatgggaggaacatgagtccaatcctctgtgaccctcagctggttactgactctctctgtgcttcaatctccttatctggaaccagcctcctccccttatacaaaggcctggaacagagcaggctcctctgatcccacctcagactcagggacatcttgcaacaaattggcttgtattggctgtcaaaactgagagccttctggggtgctggagagggctgaggaagggcatgagatggtgtgctctcccccacctctggggtttggcttccaggctgggtgtgccctgggcagtatgttctacgtagtccagctgggggtgggtagtggtgtctcctgggggataactggacagactctgtgctctctatcttgaaggaatgtgcaaaggaggacatggaatgtccacgtctctgaccctctgacctctcgcagggaccgcaggcagcctgcaggccttcccctaggctgagccatgcagagggactctggaaggctcccagagttgctggaaaacaacagttctccttatccagcgctttgccctgcctggcctggtgctctgtgctggacacgtgggtgccattcattcactttggctcctcgatgtggctgtttctctggtgcacctctttacaaaagagaacgtgaggcctacagaagcgagcatctctctccaggtcccaggctggtggctggggctatcacgtgtagagctgagcggctgggcccaggcctctgccggcctctctgtgtcacactgcctctcttcctcccctgcaggagtcaggaagcgtgttctctcatggtgctgtgtctccgttgtctctgcatgcttctgtctgtcccgtctttgctcttggagcagaatgttccctcacagagctgctgttaggggctctctgtgacttgggctggggcagcccctgggcacaggaaggaggtggccacccccacatccgccccccccacccccacctatgccacgctttgtgcgatactgtcggccacaggcagcaatgatctccctggatgcattcagggaccagccgaggaactgcttacagactggctatcaggtctaactggaagatgagccggaaggtagaggagagtgtgtgtggccaggctgctgtcaggttgaccaggtgtgtccagcattggctccttttggtgggttcttggtctcgctgacttcaacaataaagccatggaccctcacggtgagtgttacagttcttcaagactgtatgtctggagtttgatccttcagacgttcagatatgtccggagtttcttccttccggtggggttgtggtcttactgacttcagaagtgaaggctcagaccctcccactgagtgttacagttcttaaaggtggcacatccggaattatctgttcctcgaaacgattcctccccgtcggttcatggtctcgctggcttcaggattgaaactgcagaccttcgctgtgaacattacagctcataaaggtggcgcagacccaaagaacgtgcagcagcaaaagctactacaaagagcaaaagaacaaactttccacaccaagcaaaggaaccccaactggttgctgctgtgggttcgagtggcctggttttattcccttatttggcccctcccacatcctgctgattggtccattttacagagtgctaattggtctattttatagagtgctgattggtcagtttttaccaagtgctgattggtgtgtttacaaacctttagctagacacagagcactgattggtgcatttacaatcctttggctagacagaaaagttctccaagtccccaccccaaccagaagcccagccagcttcccctttcagtgggaagcaaggtaactggggagtgctagttgagggtgtgtttatgaaacggcgagggaggaagggtggtgaagcagctgggctagcagggcaggagtgcccataaccacaaggaaagtcacaggtcccagcagcacctggcccgtgggagtagggtcagcacagctggaagccagagggggcaggcgtgtgggtgcaggccctaaacagcagttcctggaggcagagaacaggagcctggaagggggtgcgagggatgtgtgctcactcactggggtctagaggtctggctttaaggcggaatctgaaaggctggggctgggtggaagtccttaatttggcttcgttttctgggtccttggagtgaggaattccaggcccagagccatgggatttcctgttgatttccgacttctctaagactcccaaggtctcgctcatgggcaggcactggaatgtcctccctgccaccttgggtgtgtgtttcagaagaggaggttcacagtgttctcccggaaggaaaccaagcctgtcctagtgaagccctgcccagccctcgagggtggcttggggcggccaggctccaccttggtggcctgcctggctcgccccgtggagaccagcagggagctgggagcactgaggaccagccgctgggtgccgaggcctcctttcttcttggtttcttcccaactcctgttgccaccatctttgcttccttgcccctctggcctaaatgtgggctcgcatggtggctttggtctcctaagcaccccagagggcaggccaaggtggacagaagcccagcatgcccagaaagcctggttgaatggccttccagacagcctctgccacatgggtccctaagcagagaagaaaggacagcctgggtgcccctttcaagtttccagtccatctccatttcgcagcagcctcctgtgagaccctccgcccacagcccatgcccagaccctaagcgcagccctgtcgtccacccctggactcatcctaaggcccctcttctctgtggttgacactcttcagactggccctgcccagattgcaggccgcagaacagcccgacaggagcctcactcaccaagcatttccctcatgatgtcgcggcagtgactgctgggtgggattcatcctgggaggcagagcaggcggagaggtattcccaaaggcactgcactcgagtcctgccaccacccggctgcaaccaggcagacgttaccagctggttgcgtcactccccagcgagcctgatgctccctctctgcccagtcttccaggaatccactggagttgacacttgagacagaacccacgttctcccttcctagcaaaaggtgtggggtatccggttctttgaaggtcgtagaggcagttggggtgtttaggactacatcctgaccctgtttttgagtctaaaaggcccctcctggctgtgccgaagggccctggggctggactgattgcgggcctggctcactgtgggcttttcccctgtagttcgcatttcacccctcccagaaggaaacccaccactgactctggggacaggcagtgcccagtatggatgagatttgctccccctcaccacactcccgtctcgtctcaaagattcatactcttgtcttttttatttattttttattttgagacagggtcttgctctgttgcccaggcctgagtgcagtggcactcagcctcggcctcccaggctcaagccatcctcccacttcagcctccagagtagctgagactacaggcttgcaccaccacacctggctaatttttttgttttcttgtatttttattagagatggattcttgccatattgcccaggctggtctcgaactcctgggctcaagggatccgcccaccttggcctcccacagtgctctggatgacaggcttgagccattctgcacacgcacccagctaccctcttgcctgctctgtgtttgggtggttatgtgtttattggaggcagtcagtttgaaactaactcatggtgcagaggatggaaccatggaagactgagcagtctggattcaagtgtggaccccgctctgctgtgtgagcttgggcaagttactcaacctctttgaggcttaggtcccttttctggaagaggccataataatagtagctgcagtattgccctggggattaaatgagagtgtgaatacagagccgctcacctgtgctgggtggtgttctgtgtgcgagactctctggtccctgaagaaggggtaataggggcccaagtgggagttgactgggcccctgacaccccaaggggtgggcactacaagcactgagcagcctggaccctgggttagagcgattttcctgatcctgcagagcgtcttcactttttaatacgaggtgtgtctgtcgggcgcaggcccccgcgtgtgccccatctgcacccctgaccagctctgactcactcctcctgtctcctgcccccagcaatatgtcggacgccttggccaacgccgtgtgccagcgctgccaggcccgcttctcccccgccgagcgcattgtcaacagcaatggggagctgtaccatgagcactgcttcgtgtgtgcccagtgcttccggcccttccccgaggggctcttctatgaggtgaggacactactgagggctttctcagacccagctcggagtctgccctctatgagcgggtgggccgggctccatgcagtggtcccgactggtgacagggccaggtctggagccagcccagaaccaggcttgagctcctgcacgggcccatccttcacctgtgagatgtgaacagcaccccaggtgccctgggtgctaacagagagccacctttcaccagcctcctctgggcagatgctgggcaggccctgggggcaggaagagcctgccctggtggtgcttgccctccctggggactagacagtgagcacagcaaccgcatggcccaccagctggtgctgatgccctgggggtcagggttcccggggtggggtgcggtggtgctcagggaaggtgaggtttgggcacacctgaggggagggagacatactgggcagagggcaccgcatatgcacataccctgtggtgggagaacatggggtgtatggagagcagtaggaagactggtgtgatggaagccgagggcatgagagggagaaggccaggagctgaggaaagggaggtggatctcgcttggccccacgggcctctacggagccataggcttcccctctgcaagaggcaggagccacctcggggtgtggagcagaggagtcacactatctgctgacatttgaaaaggtgacctggccgggcgcggcggctcacgcctgtaatcccagcactttgggaggcggaggcagatggatcacctgaggtcaggagttcaagaccagcctggccaacatggtgaaaccctgtctgtactaaaaatacaaaaaatgagcctggcatggtggcaggtgcctgtaatcccagctactcgggaggctgaggcaggagaatcacttgaacctgggaggcagaggttgcagtgagccgagatcgcgccattgcactccagcctgtgggacagagcaagactccatctaaaaaaaaaaaaaaaaagaaagaaaaaaaaaaggaggcttgtggccgctgtgctgaggagaggatgtaaggcggggcaggaacagaggctgggccaggaggctggggggaccaggagctgaattagtgcaatcacccagatgaaagtgaaggggcccccaccagctcacaggagcagtcgttaaatcatcaacaatcttgggagctggttgggcaacagagttattgtttaaaaattaaattatatcagcgtacaatgggatacaattttattaaaaacaaaggtaacaaatactcaaagcataccacttgctaattattttgttccactttactatcgtctatgctgatggggttatttctgtccattgtgctggtgtggccactgcacatctcccctcaagtccacatcgatgtcatgttggcagccaggagttggccatgacgggaatattcacaccatggacactggcaaacgccccacagcagggcctgcctctgcgccccagagagctggctgttgagcatttaccagaacatcacttgtgcttgtggtggcggtggtggccaggggtcagatgctggctctgtttcaaggtagagctgatgggactggctggtggatggatgtggggcctgtggtccgcctggcagagcaagagccgctgttcctcacagtgtcttcagcctcctgaggaatgctgtctaagtgtagaggcagcgggaggggtgggcaaagctctaggaggggtggccatatgcccagaacaaagcctctctctctcacacacagcaggtgcccagaagattttcattgctgaaagagtttaagcccttcctgactctacaggtcactgggtagggctatatccagtttagtctaataagacactcattttagagaacagggaaaaaccaattaaaaaacagaaaatacaattgttagaggaaagcagaggcaggctttggccccgcttgtggccagcacaggggccctcgctggcagctgccgcctggagggtgtgcacactggctcctgctggccgcagccctgagctcttcccacttccccgtgcccaggcccttcctgcgttcccttccttctgtctcctatacccgggtcttcatggcctctgagagagctggatactcccacagagaaggtatacgaaataggaccaagtgacactacacttcagactggatctcatccctcctggcttaaaaccgcctcgcccccagcctgttctccggaccaacagggtccagatcctcagtagacaccagtggccctttgacaggtggcctcacggacctctccagcttccacgggggcacctccctttgcaccccaccatcccaaaagggccagtgtcctctctggccaggcctgggacccactgctccagcctcagcccggcatgcccctgcctcagtgcctcatcccctgctgtcaggtcctgacccaacaagggcctgggctgctcatggggatgataggtggtttgcttgtcctctctctgcgacccctttgcagtttgaaggccggaagtactgcgaacacgacttccaaatgctgtttgctccgtgctgtggatcctgcggtaaggccggtgacagtacacatcctgggctgcctgggaagtgggcagcagtggcggggggcagggggccgagggggtacacagaactggcccagctctttcctaactccccaccttgcctctctgagcggcagccgtcaggccccctacaggcatcaccatcccacgagggagcccatgggccaggcagagagcaggcggagtgctaggtggacagggcttgggagggtccgaagaggggacaggcacgtgctccccagccagcagggacctgtcttcttccaggtgagttcatcattggccgcgtcatcaaggccatgaacaacaactggcacccgggctgcttccgctgcgagctgtgtgatgtggagctggctgacctgggctttgtgaagaatgccggcaggtgaggtggccgtgttgggccagagaggactgggccacagcccttcctggcacacctgccacctctcctgtgtgctacccacttgctgagggcgcagaagggtcccggtgctgcagcctgcactgatgtagctgccctccctccaggtcaccccggggcggatagtccagctcccagtttacagggccccacgctcagcgagctcctggcagcctctcgggagccatgagaaatcctcacactctgccacccccctggccaccccatctactgaccccacctgtccaccttctcctgcctgtacctgtgcagctcagtgtggctggagggagatgcccacatttactctaaattgagggccacaaacctcatgggtactccagaagttcccaccttctgcgaacccttggtctctcatcctcccttcccaagcactgtccctatagcaggtggccttgtctcccacctcccctggccctagctctgagatcccgtgcagcccggcctctgtctgtgagccctgttcatccccacactttctccagggcttgcttctccacgccactctctcgtcctttctgaaggactgggctggggagctgggttaaaaacactgctgggccttcctccccggcttctcccagcacacccgctgcccctcgcgtgtgctaccctggcctcatctgcccagggacccacacctcctcttgacccctcagcagccctcaccacagctgctgaggtgcagaaacgccccccttctggcacccgggaccctgagttcctgtggttctgcccgcccccacagctgcacctgctcactcccctcctctgagtcacctttctccctgtctctccatggggagtcgtctggggctccgtgcccggccctcatggctgcccttgcagacagaatcctagagccctaaatggcacatgtgtctggagaattccaggctccacttcaggcctctctctcgctgtcctcagctgcccacatgtcacctccacttggtgtccaccaggcatcccaaacgcaatgaggcacaagcagtttgggattctcctccactgaccaccaaggctgcctctgcatgcgtcccctgtatcagtgagaggcagcgccgacccccagaggccccagccatgcttcccctgccacactctctctgtccgggcactctgctccctcccgcagctcctccgagatgcttccccgacactaccgagctcttgtccgtgtgctgcccgtgagagaggcacgtggcctggggcctggcgtccggcccactgtcctcggagctgggcggtgcctggcattgagcagcttgtctaaatgaagggctgaggggcagacggtgcagtgcaggggccgagggacagcaccaggagctcgtgctgaccagcaacgtcgccgacagggtgtgtggagcgagcccaatctccttcctgagccaaggtttgcacagggccactgccccaagggctggttggggaaatctgaaagatgctggaaacgttttggaaagtcaaacatgctacaaaagcatgttgccgtaaggacggtgcagggtggcagctagagtgaggaatgagggcccctacttggccctcccagccccacagtgcagaacctcagaatctgggcagatgtgctgtgagctgccagagccccagcaagagagcccacgaggctgcctctgccactgtaccaccacttcaccattcttgggtcagagaagttctgggaaacgcttcatgttgaccaaacataacaacctgtgtagtcttaaagctacagttatatttatggtccgtacaaacaaatacaaaaaaggacatgttagggaaatatctgcacactagcaagggaaatagctcaggcggagagaggcctctctggaggaagtgggtctgggtcagtgggaggcaggtgcacagcccagccctggcctgagctgagctcccgtgactgcacatgcttgtccaggactgggaggcctgggagcctgtcaaagagctctgggggttgcaggcttgtgcgtggggttacagcaggagagatccagaatccagagctgtgctgagtccctgcaggccgtgagtgctgacgtccgctggcaaccagcctgaaatgtgtggcctgtgtctcttcaactcaggcagtgtgtgtctggcagaggcactacagaggggactcagagtaccttgcactgcaaaggagtattgagactccctccccgtccccaccaggactcccaggtccctcttctgggtcatttgcagcctgccttcagggtctttctgctgagcctcgccgatgagcgattctgtagcgggaaggaggctgggagcctagcgggaaagaaaggcctccattgttcaggggttgttcttccggcctcctctctccctgccacagatgaagtcgttgagtgtctaggagccattgtagccatcacaagcccctgcagaggggtggccgatggatcccctttgtcagttcttcctttttatgggttgagactaggcgatctagagaaatggtgggcatctgctgagatttcaggttgcttgctggggaggtggctggggaaagggcagatgcctcttgctgggtctgctgagtcctaaacagtctgcgctcggcctggacggcgccccccgctcacagctctgacttggcactcagcgagctctcgttggttttcccttcgaagctggggggcgggcccttgagccttttgccacagagcaagttgcacagggcgtggcggaacttctcagccacgaagaaatacatgatggggtcgagtgccccgttgaggctggtgaggcaggaggtgatgcggtttgccagggccaggatgcgctgggtggcgcaggaggccccatggctgcggtagtgcagcacgtagacggagcggttgacgtggtagggcacgaagcagaccaggaagatggccagcactatggcgatcatgcgcactgccttggtcttgaggcgcttctccacacgcaggccctgccgcaggctgcggatgatcagcaggtagcaggtgaccgtggtgatgaacgggaaggtgaaggccactgccagggacaccagggcatggtgggaggccttctcccggtacagctgcaggcagaccaccgtgtggttggtctgcacggtctgtgggctcaccagcagcggggccatggccacagccaccaccacccacaggaaggcacaggccaggtgtgcgtagaggggcctgcggagcttgagggacttgaccgggtgcacaatggccaggaaacggtcggcgctgatgcaggtgaggaagtagatgctggcgtacatgttgaggtagaagaggaagccggtgagacggcatgcgatttccccaaatggccagtggttcccagagaagtggtagaccaggcgggtgggcaggaccagcacgcacgacaagtcggccacggccagatgcatcaggaacacgttggccggggtcccggacttgtggtctcggatgaaaagccacagagccagggtattgccaactaaagccaggataaaatccagaaggtagaaggaggcgaacagcatgttctccagtggcgtctcctggccacattgctctgccgtggccagggagaagttggtgatcagacctgggggagccacttcaaggccattcatgctttggctggagtcagagcctggagggaacaagcaaacagttcacaatgagcttgcgatctaggcagcttcacgctctctgaagtccagaagtcaggcctccaatgccttcagaacctcccactttcaagctcagcaccgcccacggggctgctgaggggacctccttgtccatttggtgtgcgtgagcgtcagaggcattctgaacttcagcacaaggcaaacgcagaaccagggcttggaatttcgccgctatgcagctgcacccctgccacccaggagatctgaggctcctcagagctgggaggaccgggtcagtgccatggcggggaatgggacgtgagccttgcctgggtgaggctctgggttttctgttctgcctctgaggtgtgctgtctgagtgacaggggtggtgaggggcgggggcagtgtgtctccgggattccagctcctcctcagcccaagccttggcaggtgagttctgttcatcctgagtgcctggaccctccctgacccacctgcccacaggtgcagtggccggggtgtcaccgctttctgcttcccctgaccatggcttgcccctggcacttaggagggtgcccccaggatggcagcaagggctgtaccctgggacgtcagaggtctactctttttacccacctgagagtttcagcatctctcttgggggctttctggatccagcccaccaactccgtttggacatcctgacaggtggggagacctgtgtttaggagaagcctgtgcctgggtatcaggccagctgggagtattttctctcccagagtagatccaccaccagggggcagcatctcttccaggaggggaagacccattttacccagcgtcagagacactggccagcgctgttgaggacggatctgcagccccagagaggcctggaggcctcgtggcttgcccacgtttgaaggccaagtgcagagccctgtgacagtcctgggtaacaagtcatgtccgtctggtgaaccctgggtctggatagggtgctccccaccctcagcagagaaacccactcttgttttgattttagtcaactcagaagattgaagaaggagagtgagggtcccaaacactctgcctccccaacccaggcctgcgagtggcagtgtgggcaggcggtggggccagagcagcccgcagcccggaaccagggcaggacagcgcacctggcctgcctttgaattggggtcaccagcgggcttcggccaggtgggtgctgatgatggcacagcttctggggctcctctgggcacctggcttcccagtatccaccatccccaccctgcacagccaggctgaagcagaggctggagagaggtttgcataagagaagctggcatcctgcctgtgcccattgtggcagcaggaggggaggaggcacgggccacagccctggcagggtcctcatcctgggcgagcctggctctgcaccgaacagccggggtcctgcctgcagcaaattcactctgcacatttctccctgcccttccttccttccttccttccttccttccttccttccttccttcctaccttcctctctctctcacttcgctttgcttgtttgcttgcttttctttattttccttttttcttttcttttttctttttttcttttctttttccttccttccttcctttcttcttttctctttctttctttttctttctttcctccctccctccccttcctcccctcccctccctcccctcccctccctcccctccccccctcccctcccctcccctccctctcttttttctttttttctttctctttttcaaggtctccctctgtcacccaggctggagtgcagtggtgcaatcagctcactgcagcctcaacctccagggctcaagtgatcctcccacctcaacctcctgaatagctgggactacaggcgcacaccaccacacccggctaatttttgtattttttggtagagacggttttgccatgttgcccaggctggtctcaaactcctgggctcaagtgatcctctctccttggcctcccaaagtgctccttggcctcccaaagtgctgggattacaggcatgagtcactgcgcccagcccctctcctcttactgattccacagggctgtctcaggatgctggtggcacggggcagagagggcatggtgactgttcatggacacagcagcccctcgaggaggaggctggagccatcctcatatggaggagaagcaggcatggtggtggccctagccctagggaagggtgggccgcacccttccttcaggagagcgagtggccagctgctgtggccctcacatggagggtgagggctggcccgagcacctggccatcaatgtcctcaagcaaaggggagggcaactacctaataatattaccttttagctatttctctaggcaggttcccctacctgaaaagattgcccccggcttcagagtgtttcaagatgcctgaagttctaacaccagagatggtttcctgctgcttccaggaacagggtctgttcttagtccaatgtggagttcctcatggggaccccattccccaggaatccaggttccacagtactctgacttggtctggctggtctcggctggcactttccctaggactgctaaaaccacggtgagggcggagagctgagggccgaagaaggcggggtgagtgatgcttgggagagggagacaggcttggctgaagccctggggaagggctgagggctgtgaagggggctgtggaggagaggtaaaaggagggaggaacacagcccttgacagggcctgtgaggcaggggagaacagggagcaggtaccggtgggacggtggcaggggaggggggcccatgactttgagggtgtcgtgttgcatgtgctgggggtgaggacccggagactggaggaacagggctccagggcagacgcatgggcaagcagagaggacagcccatggtagatgggaggggcacacaggtgtgctgttttcaggttggcaggagaggaggaaggtgtgtgcggggaggccctggagactggaagaggagagggggcccagtgagtgaggggcccttgttagaacctgggggtgggaaggggccaaggtgggtgccctccaccccaggctgtccctcaggcctgtgctgtgccccacagtgcaggcatcacctggccccacgagagagcagctcataggtacgactgaccactctgcctggcatggtgggggcctgcctgtgctggctcaaaccagttttagccccatgttgcaggttagggagtcaaggctgagtgtctgctaacttgtcttaggtcacttgaccaggggacattggccctggagctggaagtgagaccggggaaacggtctcactccctggaagaccgccagggtggggagtgtgactcagtctcagagtttgccatggagttgtctcccaggctcagcaccccctcctggccctggggccactccctcattttaggggcccatgtatgaaatgagaatgtgcagccccttgctcaaaaaggaagagtttcaggacagtgacggcagagtgttactgggctcagggccctgagtgacggcaggggtggcatatctcatggcaccaggtgggcctgtggtgcctcctgcctccagcccgggggcctcagcctgggcactgccctccacttcctgcccgggccgaagggcgtgcccctcgctctctctgggactgagactccattttaaacagctttctggttggtttcaggtttgctgaggtttcttctccctttctgtcccccgtttgaggagttctgatactgattgttgcagtttggtctgagatgggccccgcttcactctctgttgccctttagaaacacaaacttcagtctagactcgctggttcctcacgactcactggtcagacggccaccgagccggtgtccgtaagaggaaagggcgtggcatgggccggggcctgggcagtgttgggtcccgtggctgtgggtgagtcgagcatctaggacaggtcataggcctctgtggaggtggcaggtgggcatgtgtggcctcggggagggcctgtggtggcagcgccatggccaggtggtggcagtttcctttgcattagcgccactccatccctggcccgagccctctcccaggcatctggctcctctatgggtcaaggctgcctaatggttaggggcagcggtgctgtcattgcagcctggactgccggcaagccacttcccctctgcaagcccccatcagagggacgaaacaccgctttgtgggctgctgtgaattcagactgtggtcagccttcgatgcacaggtcagaccatcaccaaagagatgggacgagacaggctgctgcctgtctccctgggcagggctccccgctgagtgtttcctctgcttagccctgggctcccagtccaccccacccagcctgccccttacctctagctgctggtccgggaggaagggacaggggtctgcggggcagcaggtgatctccgcccgtgggtgtcggtggtggcagggggctccttgccgctgtgggtggaacgctggctatttaaggagaggaagggagaccacagcccctctggccctgaaaggctgcttcattcctgaggggtcccttgttgtgtcgggctgctcctctggctgctgctgctgctgccaccggagcgtgaatattctagtgtgtccctagcccatgccccccgcccccagcttggccacatagtctgagtgtgtgactgtctcagagactcagagcaggcgggggctgggtggggggcttgggctggagctgagggacacaacaggacgtttcagaaggggatgatttcctactgatggggggcagggaggggccggctgtcatggcaacaggcggcgctcccaggcctgcgcccgcagacggcggagggggcctgtgaacggagggtgggaggccgaggagtcttgctcacggagtgagaggcgactctttgaggacacttgctgtagggtccttgtgtcctgccctgtataatgaggccccatttgggcacacagaataaatcatggcctttatctggagcgaggaacagctgcaggagcctcataatggggcgctgtcctgtccgtgaggatgcggctcagctcagaggccgggtgctcgccggtgcagctccccttctgcacggaagcccatgaatctgaccgctggcctggggctcctccctggggtggctccgggctggggtgcctttgaatgctgccggcggccgcctctgagactgagtgaacaaagttcatttctctctgtctttctgaaaatgatacatccagcaacatgggaaaccaaatcacccttcctggtttcaaaagactttacattttgttgtttaaacattgaaaactgtatgtatgtggctagcatttaaggggcagtgtcttaaatttgtctcttcacatcaccctgtgcagctgggattattgccccattttacagacaaggaaactgaggctcaggcaaatgaagaaactcacccatcaacaaacagtaggaagcaacagagccaggatttgaacccaagcacatgtcactccagaacttaggctccgtgtgtgtgtgtgttttgtttttctgctgcattttgaatttagaattcttagatttgatcctaattcaacctgaaaaagaattctgaaggccacctttagatctgatgctgtgatctggtctgttgagaagctgtttcccatctggacttccttcaagagagatgggcttcccagtttgtctggcctgagagccagctgggtgtgaggtgtctgagccggggcgcaggtctctttcctgttgtgcccgcaggcggctgtctggaagaactggcccaggctggttggaaaggtggtggcttgaagctaaccaccctgagcagggcatttctgggctcacagaccttctgttattggggtgatcactgtcgatggcttcaagggcattgaccgtggtgatggagttttgaggcgttgagctgattcctgcatctttgagacagaaataattcctcgtgggttgagtgttgtcctgacgctcaggaggagtcaccagaatgtggagtggggtcatggggcctacatgctgagtctgggacagaggcaccgcagggggcatgggctggccgccataggcgccaggtggggcagctcagccccagacctgctgaggaggtggcctggggttggggctggggcacaggtgtctgggcaagggtgggcttcagggattgtggtgatgaagactgaagccacaggccacaactgcttcccgtcgctggggtgtaagagccagggctctggccagtagtcgaggggagatgatgcccaccgaggctcccttcctctcttgtagagtcattcattcaccgaggcattcggtcagctgaccctgagctgttgccccctgctgggcacatagggtcttggggaggcacagagagccagtcggcagcttagccagtgactgctgggcctttgtttgggccccttgccctgcacacagctgatgatgagacaccccagggcagatggagcacagtgctgtgcaggatggagtccagacacccagcagtagcaggtcctggggtccagggagggatgctgaatgggtggccctggcatctggggtctgcccaccataacctgggtggggatcttgggtctgcgattggatctcttccgtatcctccctgaccagcctgtcagaggggccaacactgggcgtcgggcagccgtggaggctcgtgaggagtggagagggcccctggggctggggggcctgggaagggaggcctggatgcagcaggagcaccagagagagattcgggtggcaggtggagacgggggccagggaggttggattggggcctttgtgtatctttgcctggggactctgaatctagattcctgccacctttgaggtccaaggaaacagaaaccatgttgatttgtctctccgttgagaacacagctgtcgtccaacacagcgagtagcatcagaaattattctgaggtcttcacaaaaagactctgtagtgacagttcctgggtttgggggcctccatctgacatagcagtgcttgtctttggagacagaaatcgcctgtacgtgtttgggcccttcttcatctggcaaaccccgaaggaagggggtgagtgggcctcccgggacactcactggccactctgctgggcacagtgacactcattataactcgtgtgtgttaaatacattgggaaaataatgctttcagcagatatcaattaaatgtctactgtattctgcagcatgccccaggcttagagaaagtagaaagaggaaaataccatccagagacagtaacctcgagcattctggcatctttcctgctgagcatgcgtcccattcccaggacacacttgtgaccttctgggccttgtgacagggcagtctgctttcccataccctgggctgagcccctttgaagcccccagctgctcagtgaagttgcaggggtctggcctctcttctcctggaggtggccaggctgtgtgggagtgggggctctgcccctaatgcccccgcctcccgcaggcatctctgccggccttgccacaaccgtgagaaggccaagggcctgggcaagtacatctgccagcggtgccacctggtcatcgacgagcagcccctcatgttcaggagcgacgcctaccaccctgaccacttcaactgcacccactgtgggtaggtgcgcagcccggccctgcagttgtgggggcggggagccagggctggcccagggtaagggcggtggggcctccacctggggaagtgttgaggagggagaggggagcagggtgggcagacagaggggtcccgagagcaaggctgcagggcagaggtgggctgggggctgggaagcagccatggcaggaagcttctctctccagggctctgtttggggggcacttgagactcaggaggcgggtgggctggacccctagactgcagacgagggttgagatggagcagtggaagggacctgagggggcagggcaagagaccgggagtgggcttggtgctggtgttggagagaggagttgcataggcagcccctcagcccccgtcctcgcccacccccaccgtcccctccagtcctctccgtgcctatccagacaccccctctggtttggaggaggaggggggcccaagaacagacctgcttctcagaggcctgggtgcagaacacagcccactcttctgggctgtgcaggaagtctgtgctccagggcctgtctggggcacaggaagtcttcaaagtgcccagagatcagaaggcgctgccgcctcggctctgcagggacagaatgggcccctcggggagccgtgccctggggtggaggcgctgctggcatgaccctgcagaagggcaggggtggcacctgggggctgcacgctgtcttccaggaaggagctgacagccgaggcccgcgagctgaagggtgagctctactgcctgccctgccatgacaagatgggcgtccccatctgcggggcctgccgccggcccatcgagggccgagtggtcaacgcgctgggcaagcagtggcacgtggaggtgagccaggctggtggacacgtggcctcaggttggggggtgccccagctcagggtcatggtaagagccctaaagctcctccacactcccagcccagggcgggtggctggctcccaacgaggcccttcctcaggggtactgcccctccctgtgctcagccagggaccccagcctgcccacgggagccaggagacccgagtgcacacacacggttgggtagctgtgcccacctctcctcttccccctgctggcattctaagagactccaaggtcaggagaaaaccttgggggcagtctgtccagagtgcctgggggttgtggatgacagaacccgctgcatggacagccctgtgcagacacggagctgaagagttcctcaggtgtgagcactgggtcacctggagtgcccccaccgggtggtgggctctcatgttctcatgggtacactgggaacagtgagcccaccacctcccctgatgacctggccagcgctgtgtccggaagctgtgccttgggtggcggcttgggtgggaggccatgcggtcctgccctgatgcaggccccagcccccagccctcatcctcacatgcagatccctgggggaatgcaaggtgctgctcagtgatcccaggcttgcagggggtgcctgcaggaggccccacgtggacaggcagggccgcctctgcctatgagggcccaccatgccgcagcaccaggctggcacctgactcctggggctgaggctgccgagggggaggccagactgggaggggatggtgactcacaaggttaccatcagtgccttagaggaggggtagggtctgctgaccccagggcattcacagaggtgtcagtcccctctgcccagtgtgaatcctgaaaggcctgcacctgcccagactctgctttctgtccccttctgtcactgctgcctcctggggccactgtggtcccctggagtcactggctcctggggtcactgttgtccccgggtcaccactgtccctcggggtcaccgctctagccctgatgccacccggcccgccctttgtccttgcagcactttgtctgtgccaagtgtgagaagccattcctggggcaccggcactatgagaagaagggcctggcctactgcgagactcactacaaccaggtgagcccggtgcagaaccttcagggatgcgggtctggaggggtggccaggagagctgccgtgagcaagggaggctgtgggcaccccctcaggagctctgccaggtgctgagcccaggcctgcaccctcagccctggctcctggcctggggtctcgagacctgggcagctctcttcagtctcagtgtcttcctttgaagaatgttctggggctggtgtgaggtcccgggcacatggggctgacagtgccagcaaccccctccctcccttgctctggtacagaaggcagggggcgctggtgggatgcagtcaccacctgggcccacctccttgcaggacagcagtggccagagcagaggggccttctggggagcaacgccccagcctgttgtccttcccggaagggtggttctcatgggttgccgtgccctcaacccagccttgcagctgggccctgggaggcagggcctgggagatgcctgagaggggccgtgttggagggccaggctggctgcatgatggccctgggctggggtgtgactgcctgcagctactctgacagcctgctcggcccacagctcttcggggacgtctgctacaactgcagccatgtgattgaaggcgatggtgaggccctgtgttccctcccccaccccacctgctctcctggggcctgggtgctgcagctgtgagcccagccgggcctgcggcagcctagccaggcctgctgagtcccacgcttccctcacagtggtgtcggccctcaacaaggcctggtgtgtgagctgcttctcctgctccacctgcaacagcaagctcaccctgaagtgagtccctgtgatcgtgggatggggctcagggtggagggggctcctgcaggtccttcctctcagcagccctcctgcacaccagctgagtctggcctggggatatggtggggacaaggggcagcccggccttataccacccagggagatgggggcaggttcagggggtctaggggatccagggaccccagggaccccaggcacagtgagaggaggaggaacactcatgcctccaacacacctgccagaaccctgggctctggggagggaagggcattccagctcagggaacagcatatgcaaaagcagcagtgtcagctgctcatccaggaagcctcgaggggtgtgggatggctggagctgggagaggagagatggcgtccaggtttccaagggctgtggggaggcatagagggttctggggtttcagaacctgagagaagcctctgggaggcaagggaagcctcaaggcccttctcatccctatgctctctggccatctcaccctagggcctggcctgctggctaggagaggctggtgtggggaggctgggggctgagggaagcccactccacagtcacctgtctggggttaaaggggtgggcgtggggctctgctgacagctcagcttcctcctcaggaacaagtttgtggagttcgacatgaagcccgtgtgtaagaggtgctacgagaagttcccgctggagctgaagaagcggctgaagaagctgtcggagctgacctcccgcaaggcccagcccaaggccacagacctcaactctgcctgaaggccctcttgcgcagctgcctctcggcccctccgccttctcccctcctgctgtccatgcttggccccctcgtccccatccacctgtgccctccgcatcttaccctccctttctctttcctcattgccttctcccttcctgttccctcatctctgccttccccatgtctctcctctccttggccgtggcttctgtctgtgaggaggcaggagctggggagtgggagcctatgaccccacgtctgacagccatgtccacctgtgcccacagcttccgcccacagacctccagggacaggagcaaattgcaccacagctccccgcctggcctggccctccccaggcggctcagtggctcatgctgtcctgtgagagcccctgccccagagcggccccactaagcgcatgtggctcctgggctacccacagccagggcagcctgctggagccacagggccagggccatgcagatggaggcctctgggagccacctccaatccctcaccactcactcaaccagtggcacagtgtccttgtgcccacactgagccagcaagtcctgctgtccacacccacaagctacctggagggacaggacccacctccatccttcggaaggccttcctggaatcccaccttggcctccgccctcggttccgccccgcccctctccccccgaccttggggcttgtgtcgagcccttgggtggggccaggaggaggtgatggcgtcagaggaggtgtggtcagaggtgacttgttcccacctccagggaggacgcttcgtcttcggccagcgcagacctggtgtttgtttgttgggctcacgcttgcacaatgaaggcttgttcacac

SEQ ID NO: 12775 - DNA, 2592 bp, Homo sapiens
gtggtcccatagcccctgcaccaggcggcccgcgcccgcgacctcaaggcggctgccccgcgccatggcggcccggctgggtgcgctggccgcgtcggggctgtaccggcggcgccagcaccggcagagcccgccgccagccacgggcaatatgtcggacgccttggccaacgccgtgtgccagcgctgccaggcccgcttctcccccgccgagcgcattgtcaacagcaatggggagctgtaccatgagcactgcttcgtgtgtgcccagtgcttccggcccttccccgaggggctcttctatgagtttgaaggccggaagtactgcgaacacgacttccaaatgctgtttgctccgtgctgtggatcctgcggtgagttcatcattggccgcgtcatcaaggccatgaacaacaactggcacccgggctgcttccgctgcgagctgtgtgatgtggagctggctgacctgggctttgtgaagaatgccggcaggcatctctgccggccttgccacaaccgtgagaaggccaagggcctgggcaagtacatctgccagcggtgccacctggtcatcgacgagcagcccctcatgttcaggagcgacgcctaccaccctgaccacttcaactgcacccactgtgggaaggagctgacagccgaggcccgcgagctgaagggtgagctctactgcctgccctgccatgacaagatgggcgtccccatctgcggggcctgccgccggcccatcgagggccgagtggtcaacgcgctgggcaagcagtggcacgtggagcactttgtctgtgccaagtgtgagaagccattcctggggcaccggcactatgagaagaagggcctggcctactgcgagactcactacaaccaggtgagcccggtgcagaaccttcagggatgcgggtctggaggggtggccaggagagctgccgtgagcaagggaggctgtgggcaccccctcaggagctctgccaggtgctgagcccaggcctgcaccctcagccctggctcctggcctggggtctcgagacctgggcagctctcttcagtctcagtgtcttcctttgaagaatgttctggggctggtgtgaggtcccgggcacatggggctgacagtgccagcaaccccctccctcccttgctctggtacagaaggcagggggcgctggtgggatgcagtcaccacctgggcccacctccttgcaggacagcagtggccagagcagaggggccttctggggagcaacgccccagcctgttgtccttcccggaagggtggttctcatgggttgccgtgccctcaacccagccttgcagctgggccctgggaggcagggcctgggagatgcctgagaggggccgtgttggagggccaggctggctgcatgatggccctgggctggggtgtgactgcctgcagctactctgacagcctgctcggcccacagctcttcggggacgtctgctacaactgcagccatgtgattgaaggcgatgtggtgtcggccctcaacaaggcctggtgtgtgagctgcttctcctgctccacctgcaacagcaagctcaccctgaagaacaagtttgtggagttcgacatgaagcccgtgtgtaagaggtgctacgagaagttcccgctggagctgaagaagcggctgaagaagctgtcggagctgacctcccgcaaggcccagcccaaggccacagacctcaactctgcctgaaggccctcttgcgcagctgcctctcggcccctccgccttctcccctcctgctgtccatgcttggccccctcgtccccatccacctgtgccctccgcatcttaccctccctttctctttcctcattgccttctcccttcctgttccctcatctctgccttccccatgtctctcctctccttggccgtggcttctgtctgtgaggaggcaggagctggggagtgggagcctatgaccccacgtctgacagccatgtccacctgtgcccacagcttccgcccacagacctccagggacaggagcaaattgcaccacagctccccgcctggcctggccctccccaggcggctcagtggctcatgctgtcctgtgagagcccctgccccagagcggccccactaagcgcatgtggctcctgggctacccacagccagggcagcctgctggagccacagggccagggccatgcagatggaggcctctgggagccacctccaatccctcaccactcactcaaccagtggcacagtgtccttgtgcccacactgagccagcaagtcctgctgtccacacccacaagctacctggagggacaggacccacctccatccttcggaaggccttcctggaatcccaccttggcctccgccctcggttccgccccgcccctctccccccgaccttggggcttgtgtcgagcccttgggtggggccaggaggaggtgatggcgtcagaggaggtgtggtcagaggtgacttgttcccacctccagggaggacgcttcgtcttcggccagcgcagacctggtgtttgtttgttgggctcacgcttgcacaatgaaggcttgttcacac

SEQ ID NO: 12776 - DNA, 17661 bp, Homo sapiens
gatggggttatttctgtccattgtgctggtgtggccactgcacatctcccctcaagtccacatcgatgtcatgttggcagccaggagttggccatgacgggaatattcacaccatggacactggcaaacgccccacagcagggcctgcctctgcgccccagagagctggctgttgagcatttaccagaacatcacttgtgcttgtggtggcggtggtggccaggggtcagatgctggctctgtttcaaggtagagctgatgggactggctggtggatggatgtggggcctgtggtccgcctggcagagcaagagccgctgttcctcacagtgtcttcagcctcctgaggaatgctgtctaagtgtagaggcagcgggaggggtgggcaaagctctaggaggggtggccatatgcccagaacaaagcctctctctctcacacacagcaggtgcccagaagattttcattgctgaaagagtttaagcccttcctgactctacaggtcactgggtagggctatatccagtttagtctaataagacactcattttagagaacagggaaaaaccaattaaaaaacagaaaatacaattgttagaggaaagcagaggcaggctttggccccgcttgtggccagcacaggggccctcgctggcagctgccgcctggagggtgtgcacactggctcctgctggccgcagccctgagctcttcccacttccccgtgcccaggcccttcctgcgttcccttccttctgtctcctatacccgggtcttcatggcctctgagagagctggatactcccacagagaaggtatacgaaataggaccaagtgacactacacttcagactggatctcatccctcctggcttaaaaccgcctcgcccccagcctgttctccggaccaacagggtccagatcctcagtagacaccagtggccctttgacaggtggcctcacggacctctccagcttccacgggggcacctccctttgcaccccaccatcccaaaagggccagtgtcctctctggccaggcctgggacccactgctccagcctcagcccggcatgcccctgcctcagtgcctcatcccctgctgtcaggtcctgacccaacaagggcctgggctgctcatggggatgataggtggtttgcttgtcctctctctgcgacccctttgcagtttgaaggccggaagtactgcgaacacgacttccaaatgctgtttgctccgtgctgtggatcctgcggtaaggccggtgacagtacacatcctgggctgcctgggaagtgggcagcagtggcggggggcagggggccgagggggtacacagaactggcccagctctttcctaactccccaccttgcctctctgagcggcagccgtcaggccccctacaggcatcaccatcccacgagggagcccatgggccaggcagagagcaggcggagtgctaggtggacagggcttgggagggtccgaagaggggacaggcacgtgctccccagccagcagggacctgtcttcttccaggtgagttcatcattggccgcgtcatcaaggccatgaacaacaactggcacccgggctgcttccgctgcgagctgtgtgatgtggagctggctgacctgggctttgtgaagaatgccggcaggtgaggtggccgtgttgggccagagaggactgggccacagcccttcctggcacacctgccacctctcctgtgtgctacccacttgctgagggcgcagaagggtcccggtgctgcagcctgcactgatgtagctgccctccctccaggtcaccccggggcggatagtccagctcccagtttacagggccccacgctcagcgagctcctggcagcctctcgggagccatgagaaatcctcacactctgccacccccctggccaccccatctactgaccccacctgtccaccttctcctgcctgtacctgtgcagctcagtgtggctggagggagatgcccacatttactctaaattgagggccacaaacctcatgggtactccagaagttcccaccttctgcgaacccttggtctctcatcctcccttcccaagcactgtccctatagcaggtggccttgtctcccacctcccctggccctagctctgagatcccgtgcagcccggcctctgtctgtgagccctgttcatccccacactttctccagggcttgcttctccacgccactctctcgtcctttctgaaggactgggctggggagctgggttaaaaacactgctgggccttcctccccggcttctcccagcacacccgctgcccctcgcgtgtgctaccctggcctcatctgcccagggacccacacctcctcttgacccctcagcagccctcaccacagctgctgaggtgcagaaacgccccccttctggcacccgggaccctgagttcctgtggttctgcccgcccccacagctgcacctgctcactcccctcctctgagtcacctttctccctgtctctccatggggagtcgtctggggctccgtgcccggccctcatggctgcccttgcagacagaatcctagagccctaaatggcacatgtgtctggagaattccaggctccacttcaggcctctctctcgctgtcctcagctgcccacatgtcacctccacttggtgtccaccaggcatcccaaacgcaatgaggcacaagcagtttgggattctcctccactgaccaccaaggctgcctctgcatgcgtcccctgtatcagtgagaggcagcgccgacccccagaggccccagccatgcttcccctgccacactctctctgtccgggcactctgctccctcccgcagctcctccgagatgcttccccgacactaccgagctcttgtccgtgtgctgcccgtgagagaggcacgtggcctggggcctggcgtccggcccactgtcctcggagctgggcggtgcctggcattgagcagcttgtctaaatgaagggctgaggggcagacggtgcagtgcaggggccgagggacagcaccaggagctcgtgctgaccagcaacgtcgccgacagggtgtgtggagcgagcccaatctccttcctgagccaaggtttgcacagggccactgccccaagggctggttggggaaatctgaaagatgctggaaacgttttggaaagtcaaacatgctacaaaagcatgttgccgtaaggacggtgcagggtggcagctagagtgaggaatgagggcccctacttggccctcccagccccacagtgcagaacctcagaatctgggcagatgtgctgtgagctgccagagccccagcaagagagcccacgaggctgcctctgccactgtaccaccacttcaccattcttgggtcagagaagttctgggaaacgcttcatgttgaccaaacataacaacctgtgtagtcttaaagctacagttatatttatggtccgtacaaacaaatacaaaaaaggacatgttagggaaatatctgcacactagcaagggaaatagctcaggcggagagaggcctctctggaggaagtgggtctgggtcagtgggaggcaggtgcacagcccagccctggcctgagctgagctcccgtgactgcacatgcttgtccaggactgggaggcctgggagcctgtcaaagagctctgggggttgcaggcttgtgcgtggggttacagcaggagagatccagaatccagagctgtgctgagtccctgcaggccgtgagtgctgacgtccgctggcaaccagcctgaaatgtgtggcctgtgtctcttcaactcaggcagtgtgtgtctggcagaggcactacagaggggactcagagtaccttgcactgcaaaggagtattgagactccctccccgtccccaccaggactcccaggtccctcttctgggtcatttgcagcctgccttcagggtctttctgctgagcctcgccgatgagcgattctgtagcgggaaggaggctgggagcctagcgggaaagaaaggcctccattgttcaggggttgttcttccggcctcctctctccctgccacagatgaagtcgttgagtgtctaggagccattgtagccatcacaagcccctgcagaggggtggccgatggatcccctttgtcagttcttcctttttatgggttgagactaggcgatctagagaaatggtgggcatctgctgagatttcaggttgcttgctggggaggtggctggggaaagggcagatgcctcttgctgggtctgctgagtcctaaacagtctgcgctcggcctggacggcgccccccgctcacagctctgacttggcactcagcgagctctcgttggttttcccttcgaagctggggggcgggcccttgagccttttgccacagagcaagttgcacagggcgtggcggaacttctcagccacgaagaaatacatgatggggtcgagtgccccgttgaggctggtgaggcaggaggtgatgcggtttgccagggccaggatgcgctgggtggcgcaggaggccccatggctgcggtagtgcagcacgtagacggagcggttgacgtggtagggcacgaagcagaccaggaagatggccagcactatggcgatcatgcgcactgccttggtcttgaggcgcttctccacacgcaggccctgccgcaggctgcggatgatcagcaggtagcaggtgaccgtggtgatgaacgggaaggtgaaggccactgccagggacaccagggcatggtgggaggccttctcccggtacagctgcaggcagaccaccgtgtggttggtctgcacggtctgtgggctcaccagcagcggggccatggccacagccaccaccacccacaggaaggcacaggccaggtgtgcgtagaggggcctgcggagcttgagggacttgaccgggtgcacaatggccaggaaacggtcggcgctgatgcaggtgaggaagtagatgctggcgtacatgttgaggtagaagaggaagccggtgagacggcatgcgatttccccaaatggccagtggttcccagagaagtggtagaccaggcgggtgggcaggaccagcacgcacgacaagtcggccacggccagatgcatcaggaacacgttggccggggtcccggacttgtggtctcggatgaaaagccacagagccagggtattgccaactaaagccaggataaaatccagaaggtagaaggaggcgaacagcatgttctccagtggcgtctcctggccacattgctctgccgtggccagggagaagttggtgatcagacctgggggagccacttcaaggccattcatgctttggctggagtcagagcctggagggaacaagcaaacagttcacaatgagcttgcgatctaggcagcttcacgctctctgaagtccagaagtcaggcctccaatgccttcagaacctcccactttcaagctcagcaccgcccacggggctgctgaggggacctccttgtccatttggtgtgcgtgagcgtcagaggcattctgaacttcagcacaaggcaaacgcagaaccagggcttggaatttcgccgctatgcagctgcacccctgccacccaggagatctgaggctcctcagagctgggaggaccgggtcagtgccatggcggggaatgggacgtgagccttgcctgggtgaggctctgggttttctgttctgcctctgaggtgtgctgtctgagtgacaggggtggtgaggggcgggggcagtgtgtctccgggattccagctcctcctcagcccaagccttggcaggtgagttctgttcatcctgagtgcctggaccctccctgacccacctgcccacaggtgcagtggccggggtgtcaccgctttctgcttcccctgaccatggcttgcccctggcacttaggagggtgcccccaggatggcagcaagggctgtaccctgggacgtcagaggtctactctttttacccacctgagagtttcagcatctctcttgggggctttctggatccagcccaccaactccgtttggacatcctgacaggtggggagacctgtgtttaggagaagcctgtgcctgggtatcaggccagctgggagtattttctctcccagagtagatccaccaccagggggcagcatctcttccaggaggggaagacccattttacccagcgtcagagacactggccagcgctgttgaggacggatctgcagccccagagaggcctggaggcctcgtggcttgcccacgtttgaaggccaagtgcagagccctgtgacagtcctgggtaacaagtcatgtccgtctggtgaaccctgggtctggatagggtgctccccaccctcagcagagaaacccactcttgttttgattttagtcaactcagaagattgaagaaggagagtgagggtcccaaacactctgcctccccaacccaggcctgcgagtggcagtgtgggcaggcggtggggccagagcagcccgcagcccggaaccagggcaggacagcgcacctggcctgcctttgaattggggtcaccagcgggcttcggccaggtgggtgctgatgatggcacagcttctggggctcctctgggcacctggcttcccagtatccaccatccccaccctgcacagccaggctgaagcagaggctggagagaggtttgcataagagaagctggcatcctgcctgtgcccattgtggcagcaggaggggaggaggcacgggccacagccctggcagggtcctcatcctgggcgagcctggctctgcaccgaacagccggggtcctgcctgcagcaaattcactctgcacatttctccctgcccttccttccttccttccttccttccttccttccttccttccttcctaccttcctctctctctcacttcgctttgcttgtttgcttgcttttctttattttccttttttcttttcttttttctttttttcttttctttttccttccttccttcctttcttcttttctctttctttctttttctttctttcctccctccctccccttcctcccctcccctccctcccctcccctccctcccctccccccctcccctcccctcccctccctctcttttttctttttttctttctctttttcaaggtctccctctgtcacccaggctggagtgcagtggtgcaatcagctcactgcagcctcaacctccagggctcaagtgatcctcccacctcaacctcctgaatagctgggactacaggcgcacaccaccacacccggctaatttttgtattttttggtagagacggttttgccatgttgcccaggctggtctcaaactcctgggctcaagtgatcctctctccttggcctcccaaagtgctccttggcctcccaaagtgctgggattacaggcatgagtcactgcgcccagcccctctcctcttactgattccacagggctgtctcaggatgctggtggcacggggcagagagggcatggtgactgttcatggacacagcagcccctcgaggaggaggctggagccatcctcatatggaggagaagcaggcatggtggtggccctagccctagggaagggtgggccgcacccttccttcaggagagcgagtggccagctgctgtggccctcacatggagggtgagggctggcccgagcacctggccatcaatgtcctcaagcaaaggggagggcaactacctaataatattaccttttagctatttctctaggcaggttcccctacctgaaaagattgcccccggcttcagagtgtttcaagatgcctgaagttctaacaccagagatggtttcctgctgcttccaggaacagggtctgttcttagtccaatgtggagttcctcatggggaccccattccccaggaatccaggttccacagtactctgacttggtctggctggtctcggctggcactttccctaggactgctaaaaccacggtgagggcggagagctgagggccgaagaaggcggggtgagtgatgcttgggagagggagacaggcttggctgaagccctggggaagggctgagggctgtgaagggggctgtggaggagaggtaaaaggagggaggaacacagcccttgacagggcctgtgaggcaggggagaacagggagcaggtaccggtgggacggtggcaggggaggggggcccatgactttgagggtgtcgtgttgcatgtgctgggggtgaggacccggagactggaggaacagggctccagggcagacgcatgggcaagcagagaggacagcccatggtagatgggaggggcacacaggtgtgctgttttcaggttggcaggagaggaggaaggtgtgtgcggggaggccctggagactggaagaggagagggggcccagtgagtgaggggcccttgttagaacctgggggtgggaaggggccaaggtgggtgccctccaccccaggctgtccctcaggcctgtgctgtgccccacagtgcaggcatcacctggccccacgagagagcagctcataggtacgactgaccactctgcctggcatggtgggggcctgcctgtgctggctcaaaccagttttagccccatgttgcaggttagggagtcaaggctgagtgtctgctaacttgtcttaggtcacttgaccaggggacattggccctggagctggaagtgagaccggggaaacggtctcactccctggaagaccgccagggtggggagtgtgactcagtctcagagtttgccatggagttgtctcccaggctcagcaccccctcctggccctggggccactccctcattttaggggcccatgtatgaaatgagaatgtgcagccccttgctcaaaaaggaagagtttcaggacagtgacggcagagtgttactgggctcagggccctgagtgacggcaggggtggcatatctcatggcaccaggtgggcctgtggtgcctcctgcctccagcccgggggcctcagcctgggcactgccctccacttcctgcccgggccgaagggcgtgcccctcgctctctctgggactgagactccattttaaacagctttctggttggtttcaggtttgctgaggtttcttctccctttctgtcccccgtttgaggagttctgatactgattgttgcagtttggtctgagatgggccccgcttcactctctgttgccctttagaaacacaaacttcagtctagactcgctggttcctcacgactcactggtcagacggccaccgagccggtgtccgtaagaggaaagggcgtggcatgggccggggcctgggcagtgttgggtcccgtggctgtgggtgagtcgagcatctaggacaggtcataggcctctgtggaggtggcaggtgggcatgtgtggcctcggggagggcctgtggtggcagcgccatggccaggtggtggcagtttcctttgcattagcgccactccatccctggcccgagccctctcccaggcatctggctcctctatgggtcaaggctgcctaatggttaggggcagcggtgctgtcattgcagcctggactgccggcaagccacttcccctctgcaagcccccatcagagggacgaaacaccgctttgtgggctgctgtgaattcagactgtggtcagccttcgatgcacaggtcagaccatcaccaaagagatgggacgagacaggctgctgcctgtctccctgggcagggctccccgctgagtgtttcctctgcttagccctgggctcccagtccaccccacccagcctgccccttacctctagctgctggtccgggaggaagggacaggggtctgcggggcagcaggtgatctccgcccgtgggtgtcggtggtggcagggggctccttgccgctgtgggtggaacgctggctatttaaggagaggaagggagaccacagcccctctggccctgaaaggctgcttcattcctgaggggtcccttgttgtgtcgggctgctcctctggctgctgctgctgctgccaccggagcgtgaatattctagtgtgtccctagcccatgccccccgcccccagcttggccacatagtctgagtgtgtgactgtctcagagactcagagcaggcgggggctgggtggggggcttgggctggagctgagggacacaacaggacgtttcagaaggggatgatttcctactgatggggggcagggaggggccggctgtcatggcaacaggcggcgctcccaggcctgcgcccgcagacggcggagggggcctgtgaacggagggtgggaggccgaggagtcttgctcacggagtgagaggcgactctttgaggacacttgctgtagggtccttgtgtcctgccctgtataatgaggccccatttgggcacacagaataaatcatggcctttatctggagcgaggaacagctgcaggagcctcataatggggcgctgtcctgtccgtgaggatgcggctcagctcagaggccgggtgctcgccggtgcagctccccttctgcacggaagcccatgaatctgaccgctggcctggggctcctccctggggtggctccgggctggggtgcctttgaatgctgccggcggccgcctctgagactgagtgaacaaagttcatttctctctgtctttctgaaaatgatacatccagcaacatgggaaaccaaatcacccttcctggtttcaaaagactttacattttgttgtttaaacattgaaaactgtatgtatgtggctagcatttaaggggcagtgtcttaaatttgtctcttcacatcaccctgtgcagctgggattattgccccattttacagacaaggaaactgaggctcaggcaaatgaagaaactcacccatcaacaaacagtaggaagcaacagagccaggatttgaacccaagcacatgtcactccagaacttaggctccgtgtgtgtgtgtgttttgtttttctgctgcattttgaatttagaattcttagatttgatcctaattcaacctgaaaaagaattctgaaggccacctttagatctgatgctgtgatctggtctgttgagaagctgtttcccatctggacttccttcaagagagatgggcttcccagtttgtctggcctgagagccagctgggtgtgaggtgtctgagccggggcgcaggtctctttcctgttgtgcccgcaggcggctgtctggaagaactggcccaggctggttggaaaggtggtggcttgaagctaaccaccctgagcagggcatttctgggctcacagaccttctgttattggggtgatcactgtcgatggcttcaagggcattgaccgtggtgatggagttttgaggcgttgagctgattcctgcatctttgagacagaaataattcctcgtgggttgagtgttgtcctgacgctcaggaggagtcaccagaatgtggagtggggtcatggggcctacatgctgagtctgggacagaggcaccgcagggggcatgggctggccgccataggcgccaggtggggcagctcagccccagacctgctgaggaggtggcctggggttggggctggggcacaggtgtctgggcaagggtgggcttcagggattgtggtgatgaagactgaagccacaggccacaactgcttcccgtcgctggggtgtaagagccagggctctggccagtagtcgaggggagatgatgcccaccgaggctcccttcctctcttgtagagtcattcattcaccgaggcattcggtcagctgaccctgagctgttgccccctgctgggcacatagggtcttggggaggcacagagagccagtcggcagcttagccagtgactgctgggcctttgtttgggccccttgccctgcacacagctgatgatgagacaccccagggcagatggagcacagtgctgtgcaggatggagtccagacacccagcagtagcaggtcctggggtccagggagggatgctgaatgggtggccctggcatctggggtctgcccaccataacctgggtggggatcttgggtctgcgattggatctcttccgtatcctccctgaccagcctgtcagaggggccaacactgggcgtcgggcagccgtggaggctcgtgaggagtggagagggcccctggggctggggggcctgggaagggaggcctggatgcagcaggagcaccagagagagattcgggtggcaggtggagacgggggccagggaggttggattggggcctttgtgtatctttgcctggggactctgaatctagattcctgccacctttgaggtccaaggaaacagaaaccatgttgatttgtctctccgttgagaacacagctgtcgtccaacacagcgagtagcatcagaaattattctgaggtcttcacaaaaagactctgtagtgacagttcctgggtttgggggcctccatctgacatagcagtgcttgtctttggagacagaaatcgcctgtacgtgtttgggcccttcttcatctggcaaaccccgaaggaagggggtgagtgggcctcccgggacactcactggccactctgctgggcacagtgacactcattataactcgtgtgtgttaaatacattgggaaaataatgctttcagcagatatcaattaaatgtctactgtattctgcagcatgccccaggcttagagaaagtagaaagaggaaaataccatccagagacagtaacctcgagcattctggcatctttcctgctgagcatgcgtcccattcccaggacacacttgtgaccttctgggccttgtgacagggcagtctgctttcccataccctgggctgagcccctttgaagcccccagctgctcagtgaagttgcaggggtctggcctctcttctcctggaggtggccaggctgtgtgggagtgggggctctgcccctaatgcccccgcctcccgcaggcatctctgccggccttgccacaaccgtgagaaggccaagggcctgggcaagtacatctgccagcggtgccacctggtcatcgacgagcagcccctcatgttcaggagcgacgcctaccaccctgaccacttcaactgcacccactgtgggtaggtgcgcagcccggccctgcagttgtgggggcggggagccagggctggcccagggtaagggcggtggggcctccacctggggaagtgttgaggagggagaggggagcagggtgggcagacagaggggtcccgagagcaaggctgcagggcagaggtgggctgggggctgggaagcagccatggcaggaagcttctctctccagggctctgtttggggggcacttgagactcaggaggcgggtgggctggacccctagactgcagacgagggttgagatggagcagtggaagggacctgagggggcagggcaagagaccgggagtgggcttggtgctggtgttggagagaggagttgcataggcagcccctcagcccccgtcctcgcccacccccaccgtcccctccagtcctctccgtgcctatccagacaccccctctggtttggaggaggaggggggcccaagaacagacctgcttctcagaggcctgggtgcagaacacagcccactcttctgggctgtgcaggaagtctgtgctccagggcctgtctggggcacaggaagtcttcaaagtgcccagagatcagaaggcgctgccgcctcggctctgcagggacagaatgggcccctcggggagccgtgccctggggtggaggcgctgctggcatgaccctgcagaagggcaggggtggcacctgggggctgcacgctgtcttccaggaaggagctgacagccgaggcccgcgagctgaagggtgagctctactgcctgccctgccatgacaagatgggcgtccccatctgcggggcctgccgccggcccatcgagggccgagtggtcaacgcgctgggcaagcagtggcacgtggaggtgagccaggctggtggacacgtggcctcaggttggggggtgccccagctcagggtcatggtaagagccctaaagctcctccacactcccagcccagggcgggtggctggctcccaacgaggcccttcctcaggggtactgcccctccctgtgctcagccagggaccccagcctgcccacgggagccaggagacccgagtgcacacacacggttgggtagctgtgcccacctctcctcttccccctgctggcattctaagagactccaaggtcaggagaaaaccttgggggcagtctgtccagagtgcctgggggttgtggatgacagaacccgctgcatggacagccctgtgcagacacggagctgaagagttcctcaggtgtgagcactgggtcacctggagtgcccccaccgggtggtgggctctcatgttctcatgggtacactgggaacagtgagcccaccacctcccctgatgacctggccagcgctgtgtccggaagctgtgccttgggtggcggcttgggtgggaggccatgcggtcctgccctgatgcaggccccagcccccagccctcatcctcacatgcagatccctgggggaatgcaaggtgctgctcagtgatcccaggcttgcagggggtgcctgcaggaggccccacgtggacaggcagggccgcctctgcctatgagggcccaccatgccgcagcaccaggctggcacctgactcctggggctgaggctgccgagggggaggccagactgggaggggatggtgactcacaaggttaccatcagtgccttagaggaggggtagggtctgctgaccccagggcattcacagaggtgtcagtcccctctgcccagtgtgaatcctgaaaggcctgcacctgcccagactctgctttctgtccccttctgtcactgctgcctcctggggccactgtggtcccctggagtcactggctcctggggtcactgttgtccccgggtcaccactgtccctcggggtcaccgctctagccctgatgccacccggcccgccctttgtccttgcagcactttgtctgtgccaagtgtgagaagccattcctggggcaccggcactatgagaagaagggcctggcctactgcgagactcactacaaccaggtgagcccggtgcagaaccttcagggatgcgggtctggaggggtggccaggagagctgccgtgagcaagggaggctgtgggcaccccctcaggagctctgccaggtgctgagcccaggcctgcaccctcagccctggctcctggcctggggtctcgagacctgggcagctctcttcagtctcagtgtcttcctttgaagaatgttctggggctggtgtgaggtcccgggcacatggggctgacagtgccagcaaccccctccctcccttgctctggtacagaaggcagggggcgctggtgggatgcagtcaccacctgggcccacctccttgcaggacagcagtggccagagcagaggggccttctggggagcaacgccccagcctgttgtccttcccggaagggtggttctcatgggttgccgtgccctcaacccagccttgcagctgggccctgggaggcagggcctgggagatgcctgagaggggccgtgttggagggccaggctggctgcatgatggccctgggctggggtgtgactgcctgcagctactctgacagcctgctcggcccacagctcttcggggacgtctgctacaactgcagccatgtgattgaaggcgatggtgaggccctgtgttccctcccccaccccacctgctctcctggggcctgggtgctgcagctgtgagcccagccgggcctgcggcagcctagccaggcctgctgagtcccacgcttccctcacagtggtgtcggccctcaacaaggcctggtgtgtgagctgcttctcctgctccacctgcaacagcaagctcaccctgaagtgagtccctgtgatcgtgggatggggctcagggtggagggggctcctgcaggtccttcctctcagcagccctcctgcacaccagctgagtctggcctggggatatggtggggacaaggggcagcccggccttataccacccagggagatgggggcaggttcagggggtctaggggatccagggaccccagggaccccaggcacagtgagaggaggaggaacactcatgcctccaacacacctgccagaaccctgggctctggggagggaagggcattccagctcagggaacagcatatgcaaaagcagcagtgtcagctgctcatccaggaagcctcgaggggtgtgggatggctggagctgggagaggagagatggcgtccaggtttccaagggctgtggggaggcatagagggttctggggtttcagaacctgagagaagcctctgggaggcaagggaagcctcaaggcccttctcatccctatgctctctggccatctcaccctagggcctggcctgctggctaggagaggctggtgtggggaggctgggggctgagggaagcccactccacagtcacctgtctggggttaaaggggtgggcgtggggctctgctgacagctcagcttcctcctcaggaacaagtttgtggagttcgacatgaagcccgtgtgtaagaggtgctacgagaagttcccgctggagctgaagaagcggctgaagaagctgtcggagctgacctcccgcaaggcccagcccaaggccacagacctcaactctgcctgaaggccctcttgcgcagctgcctctcggcccctccgccttctcccctcctgctgtccatgcttggccccctcgtccccatccacctgtgccctccgcatcttaccctccctttctctttcctcattgccttctcccttcctgttccctcatctctgccttccccatgtctctcctctccttggccgtggcttctgtctgtgaggaggcaggagctggggagtgggagcctatgaccccacgtctgacagccatgtccacctgtgcccacagcttccgcccacagacctccagggacaggagcaaattgcaccacagctccccgcctggcctggccctccccaggcggctcagtggctcatgctgtcctgtgagagcccctgccccagagcggccccactaagcgcatgtggctcctgggctacccacagccagggcagcctgctggagccacagggccagggccatgcagatggaggcctctgggagccacctccaatccctcaccactcactcaaccagtggcacagtgtccttgtgcccacactgagccagcaagtcctgctgtccacacccacaagctacctggagggacaggacccacctccatccttcggaaggccttcctggaatcccaccttggcctccgccctcggttccgccccgcccctctccccccgaccttggggcttgtgtcgagcccttgggtggggccaggaggaggtgatggcgtcagaggaggtgtggtcagaggtgacttgttcccacctccagggaggacgcttcgtcttcggccagcgcagacctggtgtttgtttgttgggctcacgcttgcacaatgaaggcttgttcacacaac

SEQ ID NO: 12777 - DNA, 4807 bp, Homo sapiens
gatggggttatttctgtccattgtgctggtgtggccactgcacatctcccctcaagtccacatcgatgtcatgttggcagccaggagttggccatgacgggaatattcacaccatggacactggcaaacgccccacagcagggcctgcctctgcgccccagagagctggctgttgagcatttaccagaacatcacttgtgcttgtggtggcggtggtggccaggggtcagatgctggctctgtttcaaggtagagctgatgggactggctggtggatggatgtggggcctgtggtccgcctggcagagcaagagccgctgttcctcacagtgtcttcagcctcctgaggaatgctgtctaagtgtagaggcagcgggaggggtgggcaaagctctaggaggggtggccatatgcccagaacaaagcctctctctctcacacacagcaggtgcccagaagattttcattgctgaaagagtttaagcccttcctgactctacaggtcactgggtagggctatatccagtttagtctaataagacactcattttagagaacagggaaaaaccaattaaaaaacagaaaatacaattgttagaggaaagcagaggcaggctttggccccgcttgtggccagcacaggggccctcgctggcagctgccgcctggagggtgtgcacactggctcctgctggccgcagccctgagctcttcccacttccccgtgcccaggcccttcctgcgttcccttccttctgtctcctatacccgggtcttcatggcctctgagagagctggatactcccacagagaaggtatacgaaataggaccaagtgacactacacttcagactggatctcatccctcctggcttaaaaccgcctcgcccccagcctgttctccggaccaacagggtccagatcctcagtagacaccagtggccctttgacaggtggcctcacggacctctccagcttccacgggggcacctccctttgcaccccaccatcccaaaagggccagtgtcctctctggccaggcctgggacccactgctccagcctcagcccggcatgcccctgcctcagtgcctcatcccctgctgtcaggtcctgacccaacaagggcctgggctgctcatggggatgataggtggtttgcttgtcctctctctgcgacccctttgcagtttgaaggccggaagtactgcgaacacgacttccaaatgctgtttgctccgtgctgtggatcctgcggtgagttcatcattggccgcgtcatcaaggccatgaacaacaactggcacccgggctgcttccgctgcgagctgtgtgatgtggagctggctgacctgggctttgtgaagaatgccggcaggcatctctgccggccttgccacaaccgtgagaaggccaagggcctgggcaagtacatctgccagcggtgccacctggtcatcgacgagcagcccctcatgttcaggagcgacgcctaccaccctgaccacttcaactgcacccactgtgggtaggtgcgcagcccggccctgcagttgtgggggcggggagccagggctggcccagggtaagggcggtggggcctccacctggggaagtgttgaggagggagaggggagcagggtgggcagacagaggggtcccgagagcaaggctgcagggcagaggtgggctgggggctgggaagcagccatggcaggaagcttctctctccagggctctgtttggggggcacttgagactcaggaggcgggtgggctggacccctagactgcagacgagggttgagatggagcagtggaagggacctgagggggcagggcaagagaccgggagtgggcttggtgctggtgttggagagaggagttgcataggcagcccctcagcccccgtcctcgcccacccccaccgtcccctccagtcctctccgtgcctatccagacaccccctctggtttggaggaggaggggggcccaagaacagacctgcttctcagaggcctgggtgcagaacacagcccactcttctgggctgtgcaggaagtctgtgctccagggcctgtctggggcacaggaagtcttcaaagtgcccagagatcagaaggcgctgccgcctcggctctgcagggacagaatgggcccctcggggagccgtgccctggggtggaggcgctgctggcatgaccctgcagaagggcaggggtggcacctgggggctgcacgctgtcttccaggaaggagctgacagccgaggcccgcgagctgaagggtgagctctactgcctgccctgccatgacaagatgggcgtccccatctgcggggcctgccgccggcccatcgagggccgagtggtcaacgcgctgggcaagcagtggcacgtggaggtgagccaggctggtggacacgtggcctcaggttggggggtgccccagctcagggtcatggtaagagccctaaagctcctccacactcccagcccagggcgggtggctggctcccaacgaggcccttcctcaggggtactgcccctccctgtgctcagccagggaccccagcctgcccacgggagccaggagacccgagtgcacacacacggttgggtagctgtgcccacctctcctcttccccctgctggcattctaagagactccaaggtcaggagaaaaccttgggggcagtctgtccagagtgcctgggggttgtggatgacagaacccgctgcatggacagccctgtgcagacacggagctgaagagttcctcaggtgtgagcactgggtcacctggagtgcccccaccgggtggtgggctctcatgttctcatgggtacactgggaacagtgagcccaccacctcccctgatgacctggccagcgctgtgtccggaagctgtgccttgggtggcggcttgggtgggaggccatgcggtcctgccctgatgcaggccccagcccccagccctcatcctcacatgcagatccctgggggaatgcaaggtgctgctcagtgatcccaggcttgcagggggtgcctgcaggaggccccacgtggacaggcagggccgcctctgcctatgagggcccaccatgccgcagcaccaggctggcacctgactcctggggctgaggctgccgagggggaggccagactgggaggggatggtgactcacaaggttaccatcagtgccttagaggaggggtagggtctgctgaccccagggcattcacagaggtgtcagtcccctctgcccagtgtgaatcctgaaaggcctgcacctgcccagactctgctttctgtccccttctgtcactgctgcctcctggggccactgtggtcccctggagtcactggctcctggggtcactgttgtccccgggtcaccactgtccctcggggtcaccgctctagccctgatgccacccggcccgccctttgtccttgcagcactttgtctgtgccaagtgtgagaagccattcctggggcaccggcactatgagaagaagggcctggcctactgcgagactcactacaaccagctcttcggggacgtctgctacaactgcagccatgtgattgaaggcgatggtgaggccctgtgttccctcccccaccccacctgctctcctggggcctgggtgctgcagctgtgagcccagccgggcctgcggcagcctagccaggcctgctgagtcccacgcttccctcacagtggtgtcggccctcaacaaggcctggtgtgtgagctgcttctcctgctccacctgcaacagcaagctcaccctgaagaacaagtttgtggagttcgacatgaagcccgtgtgtaagaggtgctacgagaagttcccgctggagctgaagaagcggctgaagaagctgtcggagctgacctcccgcaaggcccagcccaaggccacagacctcaactctgcctgaaggccctcttgcgcagctgcctctcggcccctccgccttctcccctcctgctgtccatgcttggccccctcgtccccatccacctgtgccctccgcatcttaccctccctttctctttcctcattgccttctcccttcctgttccctcatctctgccttccccatgtctctcctctccttggccgtggcttctgtctgtgaggaggcaggagctggggagtgggagcctatgaccccacgtctgacagccatgtccacctgtgcccacagcttccgcccacagacctccagggacaggagcaaattgcaccacagctccccgcctggcctggccctccccaggcggctcagtggctcatgctgtcctgtgagagcccctgccccagagcggccccactaagcgcatgtggctcctgggctacccacagccagggcagcctgctggagccacagggccagggccatgcagatggaggcctctgggagccacctccaatccctcaccactcactcaaccagtggcacagtgtccttgtgcccacactgagccagcaagtcctgctgtccacacccacaagctacctggagggacaggacccacctccatccttcggaaggccttcctggaatcccaccttggcctccgccctcggttccgccccgcccctctccccccgaccttggggcttgtgtcgagcccttgggtggggccaggaggaggtgatggcgtcagaggaggtgtggtcagaggtgacttgttcccacctccagggaggacgcttcgtcttcggccagcgcagacctggtgtttgtttgttgggctcacgcttgcacaatgaaggcttgttcacacaac

SEQ ID NO: 12778 - DNA, 25994 bp, Homo sapiens
gcccgcgacctcaaggcggctgccccgcgccatggcggcccggctgggtgcgctggccgcgtcggggctgtaccggcggcgccagcaccggcagagcccgccgccagccacggggtaggtggccaggggcggggcgggtggcggggacaatggccggaaagctgcggcggcagggcaggccttccctcggaaacccgaccggggccctccgacgccgtgggctctgccccggcgtcggatgggccctgggttggcgacagggtgggcgcgtgcgactttatctaacagggttggatgtcacctgtgatcagctctcctggcagggtgcgcccagggacctatgttagagacgagggagcctgtgtagcccccagcactgctttcagacgggggtgatcatgctgcactttatagatgagcagacaggttctgagcagagcagacacctgctggactcacccaccccaaacatggctatgctgtgatttgaacccaggttagactgactccagcagtggggttcaggatggtcctcagggcatctcagagaatgagttggctctggatggggaggttgggaggggcacggggatggtggtggagccacctcccctcactcttggggtcaggggcatgaggaggagctcctgaaaatgttgcctttgcagtgccgaggggccagcggggaagagagagcaatagggctgtgaccttggggtccttggcatcaaggtgacagatagggaccctggggaggaggccaaggctgggcagaagggctggggcgggggggcagggagggagccaggaacataagtcgcagaggtaggggagggcctggaggacccaggagcagaggaaggccagtgccacccagggcaagcatagcccactctcagctccttgtgtgtggtcagggaaggctcccagagtggcaattagaggactgagccatcaaagatatcttttgctgagaacagaagaggaaggagggcaccgagtggagggcgggaactgcaggccggcagcacggccatctgtggagtccctgctgcatgctgggctcccgcttgtgctggcatggcaggtctggggcagcctgctgttcaggtggggacccccagactcaggaggccaagtcactcacctgagtgtggcagagctggagcaggcaccctccctggtcaacctctggacagccctggatgcgtgtggcataactgtggtaccaggctgcgagtggccagggcactgatggccccaaggctgttctggagtgattttcacagtactgataccacagctgagatgcaggcaggacaggcacgatgatgacaggcctggggcagccctgagcatgcatgcgcatgtgactattcacactgtttttctttgaacttctggttcatgtcctttgtcagttctttgttgttagtgtaacatgtttcagttgtacctgcttaaaagaaaagccactagagcaaagagatatggcaagggcttcaaaaaagctctaatttcagacaggtttcatactgatttggagtctgtttctgatggtgtcaatgcatcttgtgtatagcagcccaggcagcatgttaattttttcttttttattttattattattagactttaagttttagggtacatgtgcacaacctgcaggtttgttccatatgtatacatgtgccatgttggtttgctgcacccattaactcgtcatttagcattaggtatatctcctaatgctatccctccccccaccccccaccccccaccccccaccccacaagagcctctggtgtgtgatgttccccttcctgtgtccatgtgttctcaatgttcaattcccacctacgagtgagaacaggcagcatgttaattttctagcgtccccatggtgggctggctttttgtacatttttgttgacctcatgtggccaggtgacccgacactggcctctggctggcttcatggaggcggggcagggaggaagcccaggcagtgctgagggactggagctgctccctgggctgtgctgcagtagggtccctccccgaaaccctctgcatctggaatagtgcctatcagtgcaggtgctcagtgaggacttcgttggaaggaggacagaagcatgggctgtgcttgcaggaatggcctcactgaaccctcccaacagtccctggaggtagctattcctggcccattttataaacgaggaagttgaggttcagagtcctgtgctgcaggtcacacagacagggggcgtcggggccagggttgcagcctggtgtgcctggctataggggacacacccttggtctgactgctgctcaggccgacgtggcctcagcaacacttgctcatcttgggtgtgaccagacttcttgtggctggcccccaactcttcccagatccttacacacacttccttgactcagatatcaggaaggctgggatggaggaaggtctggggttgttgaagaaacagaatccggaatgggggatgccaagaggagatgggaggaacatgagtccaatcctctgtgaccctcagctggttactgactctctctgtgcttcaatctccttatctggaaccagcctcctccccttatacaaaggcctggaacagagcaggctcctctgatcccacctcagactcagggacatcttgcaacaaattggcttgtattggctgtcaaaactgagagccttctggggtgctggagagggctgaggaagggcatgagatggtgtgctctcccccacctctggggtttggcttccaggctgggtgtgccctgggcagtatgttctacgtagtccagctgggggtgggtagtggtgtctcctgggggataactggacagactctgtgctctctatcttgaaggaatgtgcaaaggaggacatggaatgtccacgtctctgaccctctgacctctcgcagggaccgcaggcagcctgcaggccttcccctaggctgagccatgcagagggactctggaaggctcccagagttgctggaaaacaacagttctccttatccagcgctttgccctgcctggcctggtgctctgtgctggacacgtgggtgccattcattcactttggctcctcgatgtggctgtttctctggtgcacctctttacaaaagagaacgtgaggcctacagaagcgagcatctctctccaggtcccaggctggtggctggggctatcacgtgtagagctgagcggctgggcccaggcctctgccggcctctctgtgtcacactgcctctcttcctcccctgcaggagtcaggaagcgtgttctctcatggtgctgtgtctccgttgtctctgcatgcttctgtctgtcccgtctttgctcttggagcagaatgttccctcacagagctgctgttaggggctctctgtgacttgggctggggcagcccctgggcacaggaaggaggtggccacccccacatccgccccccccacccccacctatgccacgctttgtgcgatactgtcggccacaggcagcaatgatctccctggatgcattcagggaccagccgaggaactgcttacagactggctatcaggtctaactggaagatgagccggaaggtagaggagagtgtgtgtggccaggctgctgtcaggttgaccaggtgtgtccagcattggctccttttggtgggttcttggtctcgctgacttcaacaataaagccatggaccctcacggtgagtgttacagttcttcaagactgtatgtctggagtttgatccttcagacgttcagatatgtccggagtttcttccttccggtggggttgtggtcttactgacttcagaagtgaaggctcagaccctcccactgagtgttacagttcttaaaggtggcacatccggaattatctgttcctcgaaacgattcctccccgtcggttcatggtctcgctggcttcaggattgaaactgcagaccttcgctgtgaacattacagctcataaaggtggcgcagacccaaagaacgtgcagcagcaaaagctactacaaagagcaaaagaacaaactttccacaccaagcaaaggaaccccaactggttgctgctgtgggttcgagtggcctggttttattcccttatttggcccctcccacatcctgctgattggtccattttacagagtgctaattggtctattttatagagtgctgattggtcagtttttaccaagtgctgattggtgtgtttacaaacctttagctagacacagagcactgattggtgcatttacaatcctttggctagacagaaaagttctccaagtccccaccccaaccagaagcccagccagcttcccctttcagtgggaagcaaggtaactggggagtgctagttgagggtgtgtttatgaaacggcgagggaggaagggtggtgaagcagctgggctagcagggcaggagtgcccataaccacaaggaaagtcacaggtcccagcagcacctggcccgtgggagtagggtcagcacagctggaagccagagggggcaggcgtgtgggtgcaggccctaaacagcagttcctggaggcagagaacaggagcctggaagggggtgcgagggatgtgtgctcactcactggggtctagaggtctggctttaaggcggaatctgaaaggctggggctgggtggaagtccttaatttggcttcgttttctgggtccttggagtgaggaattccaggcccagagccatgggatttcctgttgatttccgacttctctaagactcccaaggtctcgctcatgggcaggcactggaatgtcctccctgccaccttgggtgtgtgtttcagaagaggaggttcacagtgttctcccggaaggaaaccaagcctgtcctagtgaagccctgcccagccctcgagggtggcttggggcggccaggctccaccttggtggcctgcctggctcgccccgtggagaccagcagggagctgggagcactgaggaccagccgctgggtgccgaggcctcctttcttcttggtttcttcccaactcctgttgccaccatctttgcttccttgcccctctggcctaaatgtgggctcgcatggtggctttggtctcctaagcaccccagagggcaggccaaggtggacagaagcccagcatgcccagaaagcctggttgaatggccttccagacagcctctgccacatgggtccctaagcagagaagaaaggacagcctgggtgcccctttcaagtttccagtccatctccatttcgcagcagcctcctgtgagaccctccgcccacagcccatgcccagaccctaagcgcagccctgtcgtccacccctggactcatcctaaggcccctcttctctgtggttgacactcttcagactggccctgcccagattgcaggccgcagaacagcccgacaggagcctcactcaccaagcatttccctcatgatgtcgcggcagtgactgctgggtgggattcatcctgggaggcagagcaggcggagaggtattcccaaaggcactgcactcgagtcctgccaccacccggctgcaaccaggcagacgttaccagctggttgcgtcactccccagcgagcctgatgctccctctctgcccagtcttccaggaatccactggagttgacacttgagacagaacccacgttctcccttcctagcaaaaggtgtggggtatccggttctttgaaggtcgtagaggcagttggggtgtttaggactacatcctgaccctgtttttgagtctaaaaggcccctcctggctgtgccgaagggccctggggctggactgattgcgggcctggctcactgtgggcttttcccctgtagttcgcatttcacccctcccagaaggaaacccaccactgactctggggacaggcagtgcccagtatggatgagatttgctccccctcaccacactcccgtctcgtctcaaagattcatactcttgtcttttttatttattttttattttgagacagggtcttgctctgttgcccaggcctgagtgcagtggcactcagcctcggcctcccaggctcaagccatcctcccacttcagcctccagagtagctgagactacaggcttgcaccaccacacctggctaatttttttgttttcttgtatttttattagagatggattcttgccatattgcccaggctggtctcgaactcctgggctcaagggatccgcccaccttggcctcccacagtgctctggatgacaggcttgagccattctgcacacgcacccagctaccctcttgcctgctctgtgtttgggtggttatgtgtttattggaggcagtcagtttgaaactaactcatggtgcagaggatggaaccatggaagactgagcagtctggattcaagtgtggaccccgctctgctgtgtgagcttgggcaagttactcaacctctttgaggcttaggtcccttttctggaagaggccataataatagtagctgcagtattgccctggggattaaatgagagtgtgaatacagagccgctcacctgtgctgggtggtgttctgtgtgcgagactctctggtccctgaagaaggggtaataggggcccaagtgggagttgactgggcccctgacaccccaaggggtgggcactacaagcactgagcagcctggaccctgggttagagcgattttcctgatcctgcagagcgtcttcactttttaatacgaggtgtgtctgtcgggcgcaggcccccgcgtgtgccccatctgcacccctgaccagctctgactcactcctcctgtctcctgcccccagcaatatgtcggacgccttggccaacgccgtgtgccagcgctgccaggcccgcttctcccccgccgagcgcattgtcaacagcaatggggagctgtaccatgagcactgcttcgtgtgtgcccagtgcttccggcccttccccgaggggctcttctatgaggtgaggacactactgagggctttctcagacccagctcggagtctgccctctatgagcgggtgggccgggctccatgcagtggtcccgactggtgacagggccaggtctggagccagcccagaaccaggcttgagctcctgcacgggcccatccttcacctgtgagatgtgaacagcaccccaggtgccctgggtgctaacagagagccacctttcaccagcctcctctgggcagatgctgggcaggccctgggggcaggaagagcctgccctggtggtgcttgccctccctggggactagacagtgagcacagcaaccgcatggcccaccagctggtgctgatgccctgggggtcagggttcccggggtggggtgcggtggtgctcagggaaggtgaggtttgggcacacctgaggggagggagacatactgggcagagggcaccgcatatgcacataccctgtggtgggagaacatggggtgtatggagagcagtaggaagactggtgtgatggaagccgagggcatgagagggagaaggccaggagctgaggaaagggaggtggatctcgcttggccccacgggcctctacggagccataggcttcccctctgcaagaggcaggagccacctcggggtgtggagcagaggagtcacactatctgctgacatttgaaaaggtgacctggccgggcgcggcggctcacgcctgtaatcccagcactttgggaggcggaggcagatggatcacctgaggtcaggagttcaagaccagcctggccaacatggtgaaaccctgtctgtactaaaaatacaaaaaatgagcctggcatggtggcaggtgcctgtaatcccagctactcgggaggctgaggcaggagaatcacttgaacctgggaggcagaggttgcagtgagccgagatcgcgccattgcactccagcctgtgggacagagcaagactccatctaaaaaaaaaaaaaaaaagaaagaaaaaaaaaaggaggcttgtggccgctgtgctgaggagaggatgtaaggcggggcaggaacagaggctgggccaggaggctggggggaccaggagctgaattagtgcaatcacccagatgaaagtgaaggggcccccaccagctcacaggagcagtcgttaaatcatcaacaatcttgggagctggttgggcaacagagttattgtttaaaaattaaattatatcagcgtacaatgggatacaattttattaaaaacaaaggtaacaaatactcaaagcataccacttgctaattattttgttccactttactatcgtctatgctgatggggttatttctgtccattgtgctggtgtggccactgcacatctcccctcaagtccacatcgatgtcatgttggcagccaggagttggccatgacgggaatattcacaccatggacactggcaaacgccccacagcagggcctgcctctgcgccccagagagctggctgttgagcatttaccagaacatcacttgtgcttgtggtggcggtggtggccaggggtcagatgctggctctgtttcaaggtagagctgatgggactggctggtggatggatgtggggcctgtggtccgcctggcagagcaagagccgctgttcctcacagtgtcttcagcctcctgaggaatgctgtctaagtgtagaggcagcgggaggggtgggcaaagctctaggaggggtggccatatgcccagaacaaagcctctctctctcacacacagcaggtgcccagaagattttcattgctgaaagagtttaagcccttcctgactctacaggtcactgggtagggctatatccagtttagtctaataagacactcattttagagaacagggaaaaaccaattaaaaaacagaaaatacaattgttagaggaaagcagaggcaggctttggccccgcttgtggccagcacaggggccctcgctggcagctgccgcctggagggtgtgcacactggctcctgctggccgcagccctgagctcttcccacttccccgtgcccaggcccttcctgcgttcccttccttctgtctcctatacccgggtcttcatggcctctgagagagctggatactcccacagagaaggtatacgaaataggaccaagtgacactacacttcagactggatctcatccctcctggcttaaaaccgcctcgcccccagcctgttctccggaccaacagggtccagatcctcagtagacaccagtggccctttgacaggtggcctcacggacctctccagcttccacgggggcacctccctttgcaccccaccatcccaaaagggccagtgtcctctctggccaggcctgggacccactgctccagcctcagcccggcatgcccctgcctcagtgcctcatcccctgctgtcaggtcctgacccaacaagggcctgggctgctcatggggatgataggtggtttgcttgtcctctctctgcgacccctttgcagtttgaaggccggaagtactgcgaacacgacttccaaatgctgtttgctccgtgctgtggatcctgcggtaaggccggtgacagtacacatcctgggctgcctgggaagtgggcagcagtggcggggggcagggggccgagggggtacacagaactggcccagctctttcctaactccccaccttgcctctctgagcggcagccgtcaggccccctacaggcatcaccatcccacgagggagcccatgggccaggcagagagcaggcggagtgctaggtggacagggcttgggagggtccgaagaggggacaggcacgtgctccccagccagcagggacctgtcttcttccaggtgagttcatcattggccgcgtcatcaaggccatgaacaacaactggcacccgggctgcttccgctgcgagctgtgtgatgtggagctggctgacctgggctttgtgaagaatgccggcaggtgaggtggccgtgttgggccagagaggactgggccacagcccttcctggcacacctgccacctctcctgtgtgctacccacttgctgagggcgcagaagggtcccggtgctgcagcctgcactgatgtagctgccctccctccaggtcaccccggggcggatagtccagctcccagtttacagggccccacgctcagcgagctcctggcagcctctcgggagccatgagaaatcctcacactctgccacccccctggccaccccatctactgaccccacctgtccaccttctcctgcctgtacctgtgcagctcagtgtggctggagggagatgcccacatttactctaaattgagggccacaaacctcatgggtactccagaagttcccaccttctgcgaacccttggtctctcatcctcccttcccaagcactgtccctatagcaggtggccttgtctcccacctcccctggccctagctctgagatcccgtgcagcccggcctctgtctgtgagccctgttcatccccacactttctccagggcttgcttctccacgccactctctcgtcctttctgaaggactgggctggggagctgggttaaaaacactgctgggccttcctccccggcttctcccagcacacccgctgcccctcgcgtgtgctaccctggcctcatctgcccagggacccacacctcctcttgacccctcagcagccctcaccacagctgctgaggtgcagaaacgccccccttctggcacccgggaccctgagttcctgtggttctgcccgcccccacagctgcacctgctcactcccctcctctgagtcacctttctccctgtctctccatggggagtcgtctggggctccgtgcccggccctcatggctgcccttgcagacagaatcctagagccctaaatggcacatgtgtctggagaattccaggctccacttcaggcctctctctcgctgtcctcagctgcccacatgtcacctccacttggtgtccaccaggcatcccaaacgcaatgaggcacaagcagtttgggattctcctccactgaccaccaaggctgcctctgcatgcgtcccctgtatcagtgagaggcagcgccgacccccagaggccccagccatgcttcccctgccacactctctctgtccgggcactctgctccctcccgcagctcctccgagatgcttccccgacactaccgagctcttgtccgtgtgctgcccgtgagagaggcacgtggcctggggcctggcgtccggcccactgtcctcggagctgggcggtgcctggcattgagcagcttgtctaaatgaagggctgaggggcagacggtgcagtgcaggggccgagggacagcaccaggagctcgtgctgaccagcaacgtcgccgacagggtgtgtggagcgagcccaatctccttcctgagccaaggtttgcacagggccactgccccaagggctggttggggaaatctgaaagatgctggaaacgttttggaaagtcaaacatgctacaaaagcatgttgccgtaaggacggtgcagggtggcagctagagtgaggaatgagggcccctacttggccctcccagccccacagtgcagaacctcagaatctgggcagatgtgctgtgagctgccagagccccagcaagagagcccacgaggctgcctctgccactgtaccaccacttcaccattcttgggtcagagaagttctgggaaacgcttcatgttgaccaaacataacaacctgtgtagtcttaaagctacagttatatttatggtccgtacaaacaaatacaaaaaaggacatgttagggaaatatctgcacactagcaagggaaatagctcaggcggagagaggcctctctggaggaagtgggtctgggtcagtgggaggcaggtgcacagcccagccctggcctgagctgagctcccgtgactgcacatgcttgtccaggactgggaggcctgggagcctgtcaaagagctctgggggttgcaggcttgtgcgtggggttacagcaggagagatccagaatccagagctgtgctgagtccctgcaggccgtgagtgctgacgtccgctggcaaccagcctgaaatgtgtggcctgtgtctcttcaactcaggcagtgtgtgtctggcagaggcactacagaggggactcagagtaccttgcactgcaaaggagtattgagactccctccccgtccccaccaggactcccaggtccctcttctgggtcatttgcagcctgccttcagggtctttctgctgagcctcgccgatgagcgattctgtagcgggaaggaggctgggagcctagcgggaaagaaaggcctccattgttcaggggttgttcttccggcctcctctctccctgccacagatgaagtcgttgagtgtctaggagccattgtagccatcacaagcccctgcagaggggtggccgatggatcccctttgtcagttcttcctttttatgggttgagactaggcgatctagagaaatggtgggcatctgctgagatttcaggttgcttgctggggaggtggctggggaaagggcagatgcctcttgctgggtctgctgagtcctaaacagtctgcgctcggcctggacggcgccccccgctcacagctctgacttggcactcagcgagctctcgttggttttcccttcgaagctggggggcgggcccttgagccttttgccacagagcaagttgcacagggcgtggcggaacttctcagccacgaagaaatacatgatggggtcgagtgccccgttgaggctggtgaggcaggaggtgatgcggtttgccagggccaggatgcgctgggtggcgcaggaggccccatggctgcggtagtgcagcacgtagacggagcggttgacgtggtagggcacgaagcagaccaggaagatggccagcactatggcgatcatgcgcactgccttggtcttgaggcgcttctccacacgcaggccctgccgcaggctgcggatgatcagcaggtagcaggtgaccgtggtgatgaacgggaaggtgaaggccactgccagggacaccagggcatggtgggaggccttctcccggtacagctgcaggcagaccaccgtgtggttggtctgcacggtctgtgggctcaccagcagcggggccatggccacagccaccaccacccacaggaaggcacaggccaggtgtgcgtagaggggcctgcggagcttgagggacttgaccgggtgcacaatggccaggaaacggtcggcgctgatgcaggtgaggaagtagatgctggcgtacatgttgaggtagaagaggaagccggtgagacggcatgcgatttccccaaatggccagtggttcccagagaagtggtagaccaggcgggtgggcaggaccagcacgcacgacaagtcggccacggccagatgcatcaggaacacgttggccggggtcccggacttgtggtctcggatgaaaagccacagagccagggtattgccaactaaagccaggataaaatccagaaggtagaaggaggcgaacagcatgttctccagtggcgtctcctggccacattgctctgccgtggccagggagaagttggtgatcagacctgggggagccacttcaaggccattcatgctttggctggagtcagagcctggagggaacaagcaaacagttcacaatgagcttgcgatctaggcagcttcacgctctctgaagtccagaagtcaggcctccaatgccttcagaacctcccactttcaagctcagcaccgcccacggggctgctgaggggacctccttgtccatttggtgtgcgtgagcgtcagaggcattctgaacttcagcacaaggcaaacgcagaaccagggcttggaatttcgccgctatgcagctgcacccctgccacccaggagatctgaggctcctcagagctgggaggaccgggtcagtgccatggcggggaatgggacgtgagccttgcctgggtgaggctctgggttttctgttctgcctctgaggtgtgctgtctgagtgacaggggtggtgaggggcgggggcagtgtgtctccgggattccagctcctcctcagcccaagccttggcaggtgagttctgttcatcctgagtgcctggaccctccctgacccacctgcccacaggtgcagtggccggggtgtcaccgctttctgcttcccctgaccatggcttgcccctggcacttaggagggtgcccccaggatggcagcaagggctgtaccctgggacgtcagaggtctactctttttacccacctgagagtttcagcatctctcttgggggctttctggatccagcccaccaactccgtttggacatcctgacaggtggggagacctgtgtttaggagaagcctgtgcctgggtatcaggccagctgggagtattttctctcccagagtagatccaccaccagggggcagcatctcttccaggaggggaagacccattttacccagcgtcagagacactggccagcgctgttgaggacggatctgcagccccagagaggcctggaggcctcgtggcttgcccacgtttgaaggccaagtgcagagccctgtgacagtcctgggtaacaagtcatgtccgtctggtgaaccctgggtctggatagggtgctccccaccctcagcagagaaacccactcttgttttgattttagtcaactcagaagattgaagaaggagagtgagggtcccaaacactctgcctccccaacccaggcctgcgagtggcagtgtgggcaggcggtggggccagagcagcccgcagcccggaaccagggcaggacagcgcacctggcctgcctttgaattggggtcaccagcgggcttcggccaggtgggtgctgatgatggcacagcttctggggctcctctgggcacctggcttcccagtatccaccatccccaccctgcacagccaggctgaagcagaggctggagagaggtttgcataagagaagctggcatcctgcctgtgcccattgtggcagcaggaggggaggaggcacgggccacagccctggcagggtcctcatcctgggcgagcctggctctgcaccgaacagccggggtcctgcctgcagcaaattcactctgcacatttctccctgcccttccttccttccttccttccttccttccttccttccttccttcctaccttcctctctctctcacttcgctttgcttgtttgcttgcttttctttattttccttttttcttttcttttttctttttttcttttctttttccttccttccttcctttcttcttttctctttctttctttttctttctttcctccctccctccccttcctcccctcccctccctcccctcccctccctcccctccccccctcccctcccctcccctccctctcttttttctttttttctttctctttttcaaggtctccctctgtcacccaggctggagtgcagtggtgcaatcagctcactgcagcctcaacctccagggctcaagtgatcctcccacctcaacctcctgaatagctgggactacaggcgcacaccaccacacccggctaatttttgtattttttggtagagacggttttgccatgttgcccaggctggtctcaaactcctgggctcaagtgatcctctctccttggcctcccaaagtgctccttggcctcccaaagtgctgggattacaggcatgagtcactgcgcccagcccctctcctcttactgattccacagggctgtctcaggatgctggtggcacggggcagagagggcatggtgactgttcatggacacagcagcccctcgaggaggaggctggagccatcctcatatggaggagaagcaggcatggtggtggccctagccctagggaagggtgggccgcacccttccttcaggagagcgagtggccagctgctgtggccctcacatggagggtgagggctggcccgagcacctggccatcaatgtcctcaagcaaaggggagggcaactacctaataatattaccttttagctatttctctaggcaggttcccctacctgaaaagattgcccccggcttcagagtgtttcaagatgcctgaagttctaacaccagagatggtttcctgctgcttccaggaacagggtctgttcttagtccaatgtggagttcctcatggggaccccattccccaggaatccaggttccacagtactctgacttggtctggctggtctcggctggcactttccctaggactgctaaaaccacggtgagggcggagagctgagggccgaagaaggcggggtgagtgatgcttgggagagggagacaggcttggctgaagccctggggaagggctgagggctgtgaagggggctgtggaggagaggtaaaaggagggaggaacacagcccttgacagggcctgtgaggcaggggagaacagggagcaggtaccggtgggacggtggcaggggaggggggcccatgactttgagggtgtcgtgttgcatgtgctgggggtgaggacccggagactggaggaacagggctccagggcagacgcatgggcaagcagagaggacagcccatggtagatgggaggggcacacaggtgtgctgttttcaggttggcaggagaggaggaaggtgtgtgcggggaggccctggagactggaagaggagagggggcccagtgagtgaggggcccttgttagaacctgggggtgggaaggggccaaggtgggtgccctccaccccaggctgtccctcaggcctgtgctgtgccccacagtgcaggcatcacctggccccacgagagagcagctcataggtacgactgaccactctgcctggcatggtgggggcctgcctgtgctggctcaaaccagttttagccccatgttgcaggttagggagtcaaggctgagtgtctgctaacttgtcttaggtcacttgaccaggggacattggccctggagctggaagtgagaccggggaaacggtctcactccctggaagaccgccagggtggggagtgtgactcagtctcagagtttgccatggagttgtctcccaggctcagcaccccctcctggccctggggccactccctcattttaggggcccatgtatgaaatgagaatgtgcagccccttgctcaaaaaggaagagtttcaggacagtgacggcagagtgttactgggctcagggccctgagtgacggcaggggtggcatatctcatggcaccaggtgggcctgtggtgcctcctgcctccagcccgggggcctcagcctgggcactgccctccacttcctgcccgggccgaagggcgtgcccctcgctctctctgggactgagactccattttaaacagctttctggttggtttcaggtttgctgaggtttcttctccctttctgtcccccgtttgaggagttctgatactgattgttgcagtttggtctgagatgggccccgcttcactctctgttgccctttagaaacacaaacttcagtctagactcgctggttcctcacgactcactggtcagacggccaccgagccggtgtccgtaagaggaaagggcgtggcatgggccggggcctgggcagtgttgggtcccgtggctgtgggtgagtcgagcatctaggacaggtcataggcctctgtggaggtggcaggtgggcatgtgtggcctcggggagggcctgtggtggcagcgccatggccaggtggtggcagtttcctttgcattagcgccactccatccctggcccgagccctctcccaggcatctggctcctctatgggtcaaggctgcctaatggttaggggcagcggtgctgtcattgcagcctggactgccggcaagccacttcccctctgcaagcccccatcagagggacgaaacaccgctttgtgggctgctgtgaattcagactgtggtcagccttcgatgcacaggtcagaccatcaccaaagagatgggacgagacaggctgctgcctgtctccctgggcagggctccccgctgagtgtttcctctgcttagccctgggctcccagtccaccccacccagcctgccccttacctctagctgctggtccgggaggaagggacaggggtctgcggggcagcaggtgatctccgcccgtgggtgtcggtggtggcagggggctccttgccgctgtgggtggaacgctggctatttaaggagaggaagggagaccacagcccctctggccctgaaaggctgcttcattcctgaggggtcccttgttgtgtcgggctgctcctctggctgctgctgctgctgccaccggagcgtgaatattctagtgtgtccctagcccatgccccccgcccccagcttggccacatagtctgagtgtgtgactgtctcagagactcagagcaggcgggggctgggtggggggcttgggctggagctgagggacacaacaggacgtttcagaaggggatgatttcctactgatggggggcagggaggggccggctgtcatggcaacaggcggcgctcccaggcctgcgcccgcagacggcggagggggcctgtgaacggagggtgggaggccgaggagtcttgctcacggagtgagaggcgactctttgaggacacttgctgtagggtccttgtgtcctgccctgtataatgaggccccatttgggcacacagaataaatcatggcctttatctggagcgaggaacagctgcaggagcctcataatggggcgctgtcctgtccgtgaggatgcggctcagctcagaggccgggtgctcgccggtgcagctccccttctgcacggaagcccatgaatctgaccgctggcctggggctcctccctggggtggctccgggctggggtgcctttgaatgctgccggcggccgcctctgagactgagtgaacaaagttcatttctctctgtctttctgaaaatgatacatccagcaacatgggaaaccaaatcacccttcctggtttcaaaagactttacattttgttgtttaaacattgaaaactgtatgtatgtggctagcatttaaggggcagtgtcttaaatttgtctcttcacatcaccctgtgcagctgggattattgccccattttacagacaaggaaactgaggctcaggcaaatgaagaaactcacccatcaacaaacagtaggaagcaacagagccaggatttgaacccaagcacatgtcactccagaacttaggctccgtgtgtgtgtgtgttttgtttttctgctgcattttgaatttagaattcttagatttgatcctaattcaacctgaaaaagaattctgaaggccacctttagatctgatgctgtgatctggtctgttgagaagctgtttcccatctggacttccttcaagagagatgggcttcccagtttgtctggcctgagagccagctgggtgtgaggtgtctgagccggggcgcaggtctctttcctgttgtgcccgcaggcggctgtctggaagaactggcccaggctggttggaaaggtggtggcttgaagctaaccaccctgagcagggcatttctgggctcacagaccttctgttattggggtgatcactgtcgatggcttcaagggcattgaccgtggtgatggagttttgaggcgttgagctgattcctgcatctttgagacagaaataattcctcgtgggttgagtgttgtcctgacgctcaggaggagtcaccagaatgtggagtggggtcatggggcctacatgctgagtctgggacagaggcaccgcagggggcatgggctggccgccataggcgccaggtggggcagctcagccccagacctgctgaggaggtggcctggggttggggctggggcacaggtgtctgggcaagggtgggcttcagggattgtggtgatgaagactgaagccacaggccacaactgcttcccgtcgctggggtgtaagagccagggctctggccagtagtcgaggggagatgatgcccaccgaggctcccttcctctcttgtagagtcattcattcaccgaggcattcggtcagctgaccctgagctgttgccccctgctgggcacatagggtcttggggaggcacagagagccagtcggcagcttagccagtgactgctgggcctttgtttgggccccttgccctgcacacagctgatgatgagacaccccagggcagatggagcacagtgctgtgcaggatggagtccagacacccagcagtagcaggtcctggggtccagggagggatgctgaatgggtggccctggcatctggggtctgcccaccataacctgggtggggatcttgggtctgcgattggatctcttccgtatcctccctgaccagcctgtcagaggggccaacactgggcgtcgggcagccgtggaggctcgtgaggagtggagagggcccctggggctggggggcctgggaagggaggcctggatgcagcaggagcaccagagagagattcgggtggcaggtggagacgggggccagggaggttggattggggcctttgtgtatctttgcctggggactctgaatctagattcctgccacctttgaggtccaaggaaacagaaaccatgttgatttgtctctccgttgagaacacagctgtcgtccaacacagcgagtagcatcagaaattattctgaggtcttcacaaaaagactctgtagtgacagttcctgggtttgggggcctccatctgacatagcagtgcttgtctttggagacagaaatcgcctgtacgtgtttgggcccttcttcatctggcaaaccccgaaggaagggggtgagtgggcctcccgggacactcactggccactctgctgggcacagtgacactcattataactcgtgtgtgttaaatacattgggaaaataatgctttcagcagatatcaattaaatgtctactgtattctgcagcatgccccaggcttagagaaagtagaaagaggaaaataccatccagagacagtaacctcgagcattctggcatctttcctgctgagcatgcgtcccattcccaggacacacttgtgaccttctgggccttgtgacagggcagtctgctttcccataccctgggctgagcccctttgaagcccccagctgctcagtgaagttgcaggggtctggcctctcttctcctggaggtggccaggctgtgtgggagtgggggctctgcccctaatgcccccgcctcccgcaggcatctctgccggccttgccacaaccgtgagaaggccaagggcctgggcaagtacatctgccagcggtgccacctggtcatcgacgagcagcccctcatgttcaggagcgacgcctaccaccctgaccacttcaactgcacccactgtgggtaggtgcgcagcccggccctgcagttgtgggggcggggagccagggctggcccagggtaagggcggtggggcctccacctggggaagtgttgaggagggagaggggagcagggtgggcagacagaggggtcccgagagcaaggctgcagggcagaggtgggctgggggctgggaagcagccatggcaggaagcttctctctccagggctctgtttggggggcacttgagactcaggaggcgggtgggctggacccctagactgcagacgagggttgagatggagcagtggaagggacctgagggggcagggcaagagaccgggagtgggcttggtgctggtgttggagagaggagttgcataggcagcccctcagcccccgtcctcgcccacccccaccgtcccctccagtcctctccgtgcctatccagacaccccctctggtttggaggaggaggggggcccaagaacagacctgcttctcagaggcctgggtgcagaacacagcccactcttctgggctgtgcaggaagtctgtgctccagggcctgtctggggcacaggaagtcttcaaagtgcccagagatcagaaggcgctgccgcctcggctctgcagggacagaatgggcccctcggggagccgtgccctggggtggaggcgctgctggcatgaccctgcagaagggcaggggtggcacctgggggctgcacgctgtcttccaggaaggagctgacagccgaggcccgcgagctgaagggtgagctctactgcctgccctgccatgacaagatgggcgtccccatctgcggggcctgccgccggcccatcgagggccgagtggtcaacgcgctgggcaagcagtggcacgtggaggtgagccaggctggtggacacgtggcctcaggttggggggtgccccagctcagggtcatggtaagagccctaaagctcctccacactcccagcccagggcgggtggctggctcccaacgaggcccttcctcaggggtactgcccctccctgtgctcagccagggaccccagcctgcccacgggagccaggagacccgagtgcacacacacggttgggtagctgtgcccacctctcctcttccccctgctggcattctaagagactccaaggtcaggagaaaaccttgggggcagtctgtccagagtgcctgggggttgtggatgacagaacccgctgcatggacagccctgtgcagacacggagctgaagagttcctcaggtgtgagcactgggtcacctggagtgcccccaccgggtggtgggctctcatgttctcatgggtacactgggaacagtgagcccaccacctcccctgatgacctggccagcgctgtgtccggaagctgtgccttgggtggcggcttgggtgggaggccatgcggtcctgccctgatgcaggccccagcccccagccctcatcctcacatgcagatccctgggggaatgcaaggtgctgctcagtgatcccaggcttgcagggggtgcctgcaggaggccccacgtggacaggcagggccgcctctgcctatgagggcccaccatgccgcagcaccaggctggcacctgactcctggggctgaggctgccgagggggaggccagactgggaggggatggtgactcacaaggttaccatcagtgccttagaggaggggtagggtctgctgaccccagggcattcacagaggtgtcagtcccctctgcccagtgtgaatcctgaaaggcctgcacctgcccagactctgctttctgtccccttctgtcactgctgcctcctggggccactgtggtcccctggagtcactggctcctggggtcactgttgtccccgggtcaccactgtccctcggggtcaccgctctagccctgatgccacccggcccgccctttgtccttgcagcactttgtctgtgccaagtgtgagaagccattcctggggcaccggcactatgagaagaagggcctggcctactgcgagactcactacaaccaggtgagcccggtgcagaaccttcagggatgcgggtctggaggggtggccaggagagctgccgtgagcaagggaggctgtgggcaccccctcaggagctctgccaggtgctgagcccaggcctgcaccctcagccctggctcctggcctggggtctcgagacctgggcagctctcttcagtctcagtgtcttcctttgaagaatgttctggggctggtgtgaggtcccgggcacatggggctgacagtgccagcaaccccctccctcccttgctctggtacagaaggcagggggcgctggtgggatgcagtcaccacctgggcccacctccttgcaggacagcagtggccagagcagaggggccttctggggagcaacgccccagcctgttgtccttcccggaagggtggttctcatgggttgccgtgccctcaacccagccttgcagctgggccctgggaggcagggcctgggagatgcctgagaggggccgtgttggagggccaggctggctgcatgatggccctgggctggggtgtgactgcctgcagctactctgacagcctgctcggcccacagctcttcggggacgtctgctacaactgcagccatgtgattgaaggcgatggtgaggccctgtgttccctcccccaccccacctgctctcctggggcctgggtgctgcagctgtgagcccagccgggcctgcggcagcctagccaggcctgctgagtcccacgcttccctcacagtggtgtcggccctcaacaaggcctggtgtgtgagctgcttctcctgctccacctgcaacagcaagctcaccctgaagtgagtccctgtgatcgtgggatggggctcagggtggagggggctcctgcaggtccttcctctcagcagccctcctgcacaccagctgagtctggcctggggatatggtggggacaaggggcagcccggccttataccacccagggagatgggggcaggttcagggggtctaggggatccagggaccccagggaccccaggcacagtgagaggaggaggaacactcatgcctccaacacacctgccagaaccctgggctctggggagggaagggcattccagctcagggaacagcatatgcaaaagcagcagtgtcagctgctcatccaggaagcctcgaggggtgtgggatggctggagctgggagaggagagatggcgtccaggtttccaagggctgtggggaggcatagagggttctggggtttcagaacctgagagaagcctctgggaggcaagggaagcctcaaggcccttctcatccctatgctctctggccatctcaccctagggcctggcctgctggctaggagaggctggtgtggggaggctgggggctgagggaagcccactccacagtcacctgtctggggttaaaggggtgggcgtggggctctgctgacagctcagcttcctcctcaggaacaagtttgtggagttcgacatgaagcccgtgtgtaagaggtgctacgagaagttcccgctggagctgaagaagcggctgaagaagctgtcggagctgacctcccgcaaggcccagcccaaggccacagacctcaactctgcctgaaggccctcttgcgcagctgcctctcggcccctccgccttctcccctcctgctgtccatgcttggccccctcgtccccatccacctgtgccctccgcatcttaccctccctttctctttcctcattgccttctcccttcctgttccctcatctctgccttccccatgtctctcctctccttggccgtggcttctgtctgtgaggaggcaggagctggggagtgggagcctatgaccccacgtctgacagccatgtccacctgtgcccacagcttccgcccacagacctccagggacaggagcaaattgcaccacagctccccgcctggcctggccctccccaggcggctcagtggctcatgctgtcctgtgagagcccctgccccagagcggccccactaagcgcatgtggctcctgggctacccacagccagggcagcctgctggagccacagggccagggccatgcagatggaggcctctgggagccacctccaatccctcaccactcactcaaccagtggcacagtgtccttgtgcccacactgagccagcaagtcctgctgtccacacccacaagctacctggagggacaggacccacctccatccttcggaaggccttcctggaatcccaccttggcctccgccctcggttccgccccgcccctctccccccgaccttggggcttgtgtcgagcccttgggtggggccaggaggaggtgatggcgtcagaggaggtgtggtcagaggtgacttgttcccacctccagggaggacgcttcgtcttcggccagcgcagacctggtgtttgtttgttgggctcacgcttgcacaatgaaggcttgttcacacaa

SEQ ID NO: 12779 - DNA, 2269 bp, Homo sapiens
gcccgcgacctcaaggcggctgccccgcgccatggcggcccggctgggtgcgctggccgcgtcggggctgtaccggcggcgccagcaccggcagagcccgccgccagccacgggcaatatgtcggacgccttggccaacgccgtgtgccagcgctgccaggcccgcttctcccccgccgagcgcattgtcaacagcaatggggagctgtaccatgagcactgcttcgtgtgtgcccagtgcttccggcccttccccgaggggctcttctatgagtttgaaggccggaagtactgcgaacacgacttccaaatgctgtttgctccgtgctgtggatcctgcggtaaggccggtgacagtacacatcctgggctgcctgggaagtgggcagcagtggcggggggcagggggccgagggggtacacagaactggcccagctctttcctaactccccaccttgcctctctgagcggcagccgtcaggccccctacaggcatcaccatcccacgagggagcccatgggccaggcagagagcaggcggagtgctaggtggacagggcttgggagggtccgaagaggggacaggcacgtgctccccagccagcagggacctgtcttcttccaggtgagttcatcattggccgcgtcatcaaggccatgaacaacaactggcacccgggctgcttccgctgcgagctgtgtgatgtggagctggctgacctgggctttgtgaagaatgccggcaggcatctctgccggccttgccacaaccgtgagaaggccaagggcctgggcaagtacatctgccagcggtgccacctggtcatcgacgagcagcccctcatgttcaggagcgacgcctaccaccctgaccacttcaactgcacccactgtgggaaggagctgacagccgaggcccgcgagctgaagggtgagctctactgcctgccctgccatgacaagatgggcgtccccatctgcggggcctgccgccggcccatcgagggccgagtggtcaacgcgctgggcaagcagtggcacgtggagcactttgtctgtgccaagtgtgagaagccattcctggggcaccggcactatgagaagaagggcctggcctactgcgagactcactacaaccagctcttcggggacgtctgctacaactgcagccatgtgattgaaggcgatgtggtgtcggccctcaacaaggcctggtgtgtgagctgcttctcctgctccacctgcaacagcaagctcaccctgaagaacaagtttgtggagttcgacatgaagcccgtgtgtaagaggtgctacgagaagttcccgctggagctgaagaagcggctgaagaagctgtcggagctgacctcccgcaaggcccagcccaaggccacagacctcaactctgcctgaaggccctcttgcgcagctgcctctcggcccctccgccttctcccctcctgctgtccatgcttggccccctcgtccccatccacctgtgccctccgcatcttaccctccctttctctttcctcattgccttctcccttcctgttccctcatctctgccttccccatgtctctcctctccttggccgtggcttctgtctgtgaggaggcaggagctggggagtgggagcctatgaccccacgtctgacagccatgtccacctgtgcccacagcttccgcccacagacctccagggacaggagcaaattgcaccacagctccccgcctggcctggccctccccaggcggctcagtggctcatgctgtcctgtgagagcccctgccccagagcggccccactaagcgcatgtggctcctgggctacccacagccagggcagcctgctggagccacagggccagggccatgcagatggaggcctctgggagccacctccaatccctcaccactcactcaaccagtggcacagtgtccttgtgcccacactgagccagcaagtcctgctgtccacacccacaagctacctggagggacaggacccacctccatccttcggaaggccttcctggaatcccaccttggcctccgccctcggttccgccccgcccctctccccccgaccttggggcttgtgtcgagcccttgggtggggccaggaggaggtgatggcgtcagaggaggtgtggtcagaggtgacttgttcccacctccagggaggacgcttcgtcttcggccagcgcagacctggtgtttgtttgttgggctcacgcttgcacaatgaaggcttgttcacacaa

SEQ ID NO: 12780 - DNA, 3924 bp, Homo sapiens
caaagtgcccagagatcagaaggcgctgccgcctcggctctgcagggacagaatgggcccctcggggagccgtgccctggggtggaggcgctgctggcatgaccctgcagaagggcaggggtggcacctgggggctgcacgctgtcttccaggaaggagctgacagccgaggcccgcgagctgaagggtgagctctactgcctgccctgccatgacaagatgggcgtccccatctgcggggcctgccgccggcccatcgagggccgagtggtcaacgcgctgggcaagcagtggcacgtggaggtgagccaggctggtggacacgtggcctcaggttggggggtgccccagctcagggtcatggtaagagccctaaagctcctccacactcccagcccagggcgggtggctggctcccaacgaggcccttcctcaggggtactgcccctccctgtgctcagccagggaccccagcctgcccacgggagccaggagacccgagtgcacacacacggttgggtagctgtgcccacctctcctcttccccctgctggcattctaagagactccaaggtcaggagaaaaccttgggggcagtctgtccagagtgcctgggggttgtggatgacagaacccgctgcatggacagccctgtgcagacacggagctgaagagttcctcaggtgtgagcactgggtcacctggagtgcccccaccgggtggtgggctctcatgttctcatgggtacactgggaacagtgagcccaccacctcccctgatgacctggccagcgctgtgtccggaagctgtgccttgggtggcggcttgggtgggaggccatgcggtcctgccctgatgcaggccccagcccccagccctcatcctcacatgcagatccctgggggaatgcaaggtgctgctcagtgatcccaggcttgcagggggtgcctgcaggaggccccacgtggacaggcagggccgcctctgcctatgagggcccaccatgccgcagcaccaggctggcacctgactcctggggctgaggctgccgagggggaggccagactgggaggggatggtgactcacaaggttaccatcagtgccttagaggaggggtagggtctgctgaccccagggcattcacagaggtgtcagtcccctctgcccagtgtgaatcctgaaaggcctgcacctgcccagactctgctttctgtccccttctgtcactgctgcctcctggggccactgtggtcccctggagtcactggctcctggggtcactgttgtccccgggtcaccactgtccctcggggtcaccgctctagccctgatgccacccggcccgccctttgtccttgcagcactttgtctgtgccaagtgtgagaagccattcctggggcaccggcactatgagaagaagggcctggcctactgcgagactcactacaaccaggtgagcccggtgcagaaccttcagggatgcgggtctggaggggtggccaggagagctgccgtgagcaagggaggctgtgggcaccccctcaggagctctgccaggtgctgagcccaggcctgcaccctcagccctggctcctggcctggggtctcgagacctgggcagctctcttcagtctcagtgtcttcctttgaagaatgttctggggctggtgtgaggtcccgggcacatggggctgacagtgccagcaaccccctccctcccttgctctggtacagaaggcagggggcgctggtgggatgcagtcaccacctgggcccacctccttgcaggacagcagtggccagagcagaggggccttctggggagcaacgccccagcctgttgtccttcccggaagggtggttctcatgggttgccgtgccctcaacccagccttgcagctgggccctgggaggcagggcctgggagatgcctgagaggggccgtgttggagggccaggctggctgcatgatggccctgggctggggtgtgactgcctgcagctactctgacagcctgctcggcccacagctcttcggggacgtctgctacaactgcagccatgtgattgaaggcgatggtgaggccctgtgttccctcccccaccccacctgctctcctggggcctgggtgctgcagctgtgagcccagccgggcctgcggcagcctagccaggcctgctgagtcccacgcttccctcacagtggtgtcggccctcaacaaggcctggtgtgtgagctgcttctcctgctccacctgcaacagcaagctcaccctgaagtgagtccctgtgatcgtgggatggggctcagggtggagggggctcctgcaggtccttcctctcagcagccctcctgcacaccagctgagtctggcctggggatatggtggggacaaggggcagcccggccttataccacccagggagatgggggcaggttcagggggtctaggggatccagggaccccagggaccccaggcacagtgagaggaggaggaacactcatgcctccaacacacctgccagaaccctgggctctggggagggaagggcattccagctcagggaacagcatatgcaaaagcagcagtgtcagctgctcatccaggaagcctcgaggggtgtgggatggctggagctgggagaggagagatggcgtccaggtttccaagggctgtggggaggcatagagggttctggggtttcagaacctgagagaagcctctgggaggcaagggaagcctcaaggcccttctcatccctatgctctctggccatctcaccctagggcctggcctgctggctaggagaggctggtgtggggaggctgggggctgagggaagcccactccacagtcacctgtctggggttaaaggggtgggcgtggggctctgctgacagctcagcttcctcctcaggaacaagtttgtggagttcgacatgaagcccgtgtgtaagaggtgctacgagaagttcccgctggagctgaagaagcggctgaagaagctgtcggagctgacctcccgcaaggcccagcccaaggccacagacctcaactctgcctgaaggccctcttgcgcagctgcctctcggcccctccgccttctcccctcctgctgtccatgcttggccccctcgtccccatccacctgtgccctccgcatcttaccctccctttctctttcctcattgccttctcccttcctgttccctcatctctgccttccccatgtctctcctctccttggccgtggcttctgtctgtgaggaggcaggagctggggagtgggagcctatgaccccacgtctgacagccatgtccacctgtgcccacagcttccgcccacagacctccagggacaggagcaaattgcaccacagctccccgcctggcctggccctccccaggcggctcagtggctcatgctgtcctgtgagagcccctgccccagagcggccccactaagcgcatgtggctcctgggctacccacagccagggcagcctgctggagccacagggccagggccatgcagatggaggcctctgggagccacctccaatccctcaccactcactcaaccagtggcacagtgtccttgtgcccacactgagccagcaagtcctgctgtccacacccacaagctacctggagggacaggacccacctccatccttcggaaggccttcctggaatcccaccttggcctccgccctcggttccgccccgcccctctccccccgaccttggggcttgtgtcgagcccttgggtggggccaggaggaggtgatggcgtcagaggaggtgtggtcagaggtgacttgttcccacctccagggaggacgcttcgtcttcggccagcgcagacctggtgtttgtttgttgggctcacgcttgcacaatgaaggcttgttcacac

SEQ ID NO: 12781 - DNA, 2099 bp, Homo sapiens
caaagtgcccagagatcagaaggcgctgccgcctcggctctgcagggacagaatgggcccctcggggagccgtgccctggggtggaggcgctgctggcatgaccctgcagaagggcaggggtggcacctgggggctgcacgctgtcttccaggaaggagctgacagccgaggcccgcgagctgaagggtgagctctactgcctgccctgccatgacaagatgggcgtccccatctgcggggcctgccgccggcccatcgagggccgagtggtcaacgcgctgggcaagcagtggcacgtggagcactttgtctgtgccaagtgtgagaagccattcctggggcaccggcactatgagaagaagggcctggcctactgcgagactcactacaaccaggtgagcccggtgcagaaccttcagggatgcgggtctggaggggtggccaggagagctgccgtgagcaagggaggctgtgggcaccccctcaggagctctgccaggtgctgagcccaggcctgcaccctcagccctggctcctggcctggggtctcgagacctgggcagctctcttcagtctcagtgtcttcctttgaagaatgttctggggctggtgtgaggtcccgggcacatggggctgacagtgccagcaaccccctccctcccttgctctggtacagaaggcagggggcgctggtgggatgcagtcaccacctgggcccacctccttgcaggacagcagtggccagagcagaggggccttctggggagcaacgccccagcctgttgtccttcccggaagggtggttctcatgggttgccgtgccctcaacccagccttgcagctgggccctgggaggcagggcctgggagatgcctgagaggggccgtgttggagggccaggctggctgcatgatggccctgggctggggtgtgactgcctgcagctactctgacagcctgctcggcccacagctcttcggggacgtctgctacaactgcagccatgtgattgaaggcgatgtggtgtcggccctcaacaaggcctggtgtgtgagctgcttctcctgctccacctgcaacagcaagctcaccctgaagaacaagtttgtggagttcgacatgaagcccgtgtgtaagaggtgctacgagaagttcccgctggagctgaagaagcggctgaagaagctgtcggagctgacctcccgcaaggcccagcccaaggccacagacctcaactctgcctgaaggccctcttgcgcagctgcctctcggcccctccgccttctcccctcctgctgtccatgcttggccccctcgtccccatccacctgtgccctccgcatcttaccctccctttctctttcctcattgccttctcccttcctgttccctcatctctgccttccccatgtctctcctctccttggccgtggcttctgtctgtgaggaggcaggagctggggagtgggagcctatgaccccacgtctgacagccatgtccacctgtgcccacagcttccgcccacagacctccagggacaggagcaaattgcaccacagctccccgcctggcctggccctccccaggcggctcagtggctcatgctgtcctgtgagagcccctgccccagagcggccccactaagcgcatgtggctcctgggctacccacagccagggcagcctgctggagccacagggccagggccatgcagatggaggcctctgggagccacctccaatccctcaccactcactcaaccagtggcacagtgtccttgtgcccacactgagccagcaagtcctgctgtccacacccacaagctacctggagggacaggacccacctccatccttcggaaggccttcctggaatcccaccttggcctccgccctcggttccgccccgcccctctccccccgaccttggggcttgtgtcgagcccttgggtggggccaggaggaggtgatggcgtcagaggaggtgtggtcagaggtgacttgttcccacctccagggaggacgcttcgtcttcggccagcgcagacctggtgtttgtttgttgggctcacgcttgcacaatgaaggcttgttcacac

SEQ ID NO: 12782 - DNA, 1978 bp, Homo sapiens
gttggagggccaggctggctgcatgatggccctgggctggggtgtgactgcctgcagctactctgacagcctgctcggcccacagctcttcggggacgtctgctacaactgcagccatgtgattgaaggcgatggtgaggccctgtgttccctcccccaccccacctgctctcctggggcctgggtgctgcagctgtgagcccagccgggcctgcggcagcctagccaggcctgctgagtcccacgcttccctcacagtggtgtcggccctcaacaaggcctggtgtgtgagctgcttctcctgctccacctgcaacagcaagctcaccctgaagtgagtccctgtgatcgtgggatggggctcagggtggagggggctcctgcaggtccttcctctcagcagccctcctgcacaccagctgagtctggcctggggatatggtggggacaaggggcagcccggccttataccacccagggagatgggggcaggttcagggggtctaggggatccagggaccccagggaccccaggcacagtgagaggaggaggaacactcatgcctccaacacacctgccagaaccctgggctctggggagggaagggcattccagctcagggaacagcatatgcaaaagcagcagtgtcagctgctcatccaggaagcctcgaggggtgtgggatggctggagctgggagaggagagatggcgtccaggtttccaagggctgtggggaggcatagagggttctggggtttcagaacctgagagaagcctctgggaggcaagggaagcctcaaggcccttctcatccctatgctctctggccatctcaccctagggcctggcctgctggctaggagaggctggtgtggggaggctgggggctgagggaagcccactccacagtcacctgtctggggttaaaggggtgggcgtggggctctgctgacagctcagcttcctcctcaggaacaagtttgtggagttcgacatgaagcccgtgtgtaagaggtgctacgagaagttcccgctggagctgaagaagcggctgaagaagctgtcggagctgacctcccgcaaggcccagcccaaggccacagacctcaactctgcctgaaggccctcttgcgcagctgcctctcggcccctccgccttctcccctcctgctgtccatgcttggccccctcgtccccatccacctgtgccctccgcatcttaccctccctttctctttcctcattgccttctcccttcctgttccctcatctctgccttccccatgtctctcctctccttggccgtggcttctgtctgtgaggaggcaggagctggggagtgggagcctatgaccccacgtctgacagccatgtccacctgtgcccacagcttccgcccacagacctccagggacaggagcaaattgcaccacagctccccgcctggcctggccctccccaggcggctcagtggctcatgctgtcctgtgagagcccctgccccagagcggccccactaagcgcatgtggctcctgggctacccacagccagggcagcctgctggagccacagggccagggccatgcagatggaggcctctgggagccacctccaatccctcaccactcactcaaccagtggcacagtgtccttgtgcccacactgagccagcaagtcctgctgtccacacccacaagctacctggagggacaggacccacctccatccttcggaaggccttcctggaatcccaccttggcctccgccctcggttccgccccgcccctctccccccgaccttggggcttgtgtcgagcccttgggtggggccaggaggaggtgatggcgtcagaggaggtgtggtcagaggtgacttgttcccacctccagggaggacgcttcgtcttcggccagcgcagacctggtgtttgtttgttgggctcacgcttgcacaatgaaggcttgttcacacaa

SEQ ID NO: 12783 - DNA, 1137 bp, Homo sapiens
gttggagggccaggctggctgcatgatggccctgggctggggtgtgactgcctgcagctactctgacagcctgctcggcccacagctcttcggggacgtctgctacaactgcagccatgtgattgaaggcgatggaacaagtttgtggagttcgacatgaagcccgtgtgtaagaggtgctacgagaagttcccgctggagctgaagaagcggctgaagaagctgtcggagctgacctcccgcaaggcccagcccaaggccacagacctcaactctgcctgaaggccctcttgcgcagctgcctctcggcccctccgccttctcccctcctgctgtccatgcttggccccctcgtccccatccacctgtgccctccgcatcttaccctccctttctctttcctcattgccttctcccttcctgttccctcatctctgccttccccatgtctctcctctccttggccgtggcttctgtctgtgaggaggcaggagctggggagtgggagcctatgaccccacgtctgacagccatgtccacctgtgcccacagcttccgcccacagacctccagggacaggagcaaattgcaccacagctccccgcctggcctggccctccccaggcggctcagtggctcatgctgtcctgtgagagcccctgccccagagcggccccactaagcgcatgtggctcctgggctacccacagccagggcagcctgctggagccacagggccagggccatgcagatggaggcctctgggagccacctccaatccctcaccactcactcaaccagtggcacagtgtccttgtgcccacactgagccagcaagtcctgctgtccacacccacaagctacctggagggacaggacccacctccatccttcggaaggccttcctggaatcccaccttggcctccgccctcggttccgccccgcccctctccccccgaccttggggcttgtgtcgagcccttgggtggggccaggaggaggtgatggcgtcagaggaggtgtggtcagaggtgacttgttcccacctccagggaggacgcttcgtcttcggccagcgcagacctggtgtttgtttgttgggctcacgcttgcacaatgaaggcttgttcacacaa

SEQ ID NO: 12784 - DNA, 1730 bp, Homo sapiens
gcgctcggctggcggctgcagcagcagagggagacccgcggcaaccccggcaacccagggctcggcgtcgctgccaccatgacgggaaggaaaagaaagtggggagagacaggaacagggtccggagcagccccagcagcagcattgaggtggagcaatatgtcggacgccttggccaacgccgtgtgccagcgctgccaggcccgcttctcccccgccgagcgcattgtcaacagcaatggggagctgtaccatgagcactgcttcgtgtgtgcccagtgcttccggcccttccccgaggggctcttctatgagtttgaaggccggaagtactgcgaacacgacttccaaatgctgtttgctccgtgctgtggatcctgcggtgagttcatcattggccgcgtcatcaaggccatgaacaacaactggcacccgggctgcttccgctgcgagctgtgtgatgtggagctggctgacctgggctttgtgaagaatgccggcaggcatctctgccggccttgccacaaccgtgagaaggccaagggcctgggcaagtacatctgccagcggtgccacctggtcatcgacgagcagcccctcatgttcaggagcgacgcctaccaccctgaccacttcaactgcacccactgtgggaaggagctgacagccgaggcccgcgagctgaagggtgagctctactgcctgccctgccatgacaagatgggcgtccccatctgcggggcctgccgccggcccatcgagggccgagtggtcaacgcgctgggcaagcagtggcacgtggagcactttgtctgtgccaagtgtgagaagccattcctggggcaccggcactatgagaagaagggcctggcctactgcgagactcactacaaccagctcttcggggacgtctgctacaactgcagccatgtgattgaaggcgatgtggtgtcggccctcaacaaggcctggtgtgtgagctgcttctcctgctccacctgcaacagcaagctcaccctgaagaacaagtttgtggagttcgacatgaagcccgtgtgtaagaggtgctacgagaagttcccgctggagctgaagaagcggctgaagaagctgtcggagctgacctcccgcaaggcccagcccaaggccacagacctcaactctgcctgaaggccctcttgcgcagctgcctctcggcccctccgccttctcccctcctgctgtccatgcttggccccctcgtccccatccacctgtgccctccgcatcttaccctccctttctctttcctcattgccttctcccttcctgttccctcatctctgccttccccatgtctctcctctccttggccgtggcttctgtctgtgaggaggcaggagctggggagtgggagcctatgaccccacgtctgacagccatgtccacctgtgcccacagcttccgcccacagacctccagggacaggagcaaattgcaccacagctccccgcctggcctggccctccccaggcggctcagtggctcatgctgtcctgtgagagcccctgccccagagcggccccactaagcgcatgtggctcctgggctacccacagccagggcagcctgctggagccacagggccagggccatgcagatggaggcctctgggagccacctccaatccctcaccactcactcaaccagtggcacagtgtccttgtgcccacactgagccagcaagtcct

SEQ ID NO: 12785 - DNA, 4554 bp, Homo sapiens
ataggcctctgtggaggtggcaggtgggcatgtgtggcctcggggagggcctgtggtggcagcgccatggccaggtggtggcagtttcctttgcattagcgccactccatccctggcccgagccctctcccaggcatctggctcctctatgggtcaaggctgcctaatggttaggggcagcggtgctgtcattgcagcctggactgccggcaagccacttcccctctgcaagcccccatcagagggacgaaacaccgctttgtgggctgctgtgaattcagactgtggtcagccttcgatgcacaggtcagaccatcaccaaagagatgggacgagacaggctgctgcctgtctccctgggcagggctccccgctgagtgtttcctctgcttagccctgggctcccagtccaccccacccagcctgccccttacctctagctgctggtccgggaggaagggacaggggtctgcggggcagcaggtgatctccgcccgtgggtgtcggtggtggcagggggctccttgccgctgtgggtggaacgctggctatttaaggagaggaagggagaccacagcccctctggccctgaaaggctgcttcattcctgaggggtcccttgttgtgtcgggctgctcctctggctgctgctgctgctgccaccggagcgtgaatattctagtgtgtccctagcccatgccccccgcccccagcttggccacatagtctgagtgtgtgactgtctcagagactcagagcaggcgggggctgggtggggggcttgggctggagctgagggacacaacaggacgtttcagaaggggatgatttcctactgatggggggcagggaggggccggctgtcatggcaacaggcggcgctcccaggcctgcgcccgcagacggcggagggggcctgtgaacggagggtgggaggccgaggagtcttgctcacggagtgagaggcgactctttgaggacacttgctgtagggtccttgtgtcctgccctgtataatgaggccccatttgggcacacagaataaatcatggcctttatctggagcgaggaacagctgcaggagcctcataatggggcgctgtcctgtccgtgaggatgcggctcagctcagaggccgggtgctcgccggtgcagctccccttctgcacggaagcccatgaatctgaccgctggcctggggctcctccctggggtggctccgggctggggtgcctttgaatgctgccggcggccgcctctgagactgagtgaacaaagttcatttctctctgtctttctgaaaatgatacatccagcaacatgggaaaccaaatcacccttcctggtttcaaaagactttacattttgttgtttaaacattgaaaactgtatgtatgtggctagcatttaaggggcagtgtcttaaatttgtctcttcacatcaccctgtgcagctgggattattgccccattttacagacaaggaaactgaggctcaggcaaatgaagaaactcacccatcaacaaacagtaggaagcaacagagccaggatttgaacccaagcacatgtcactccagaacttaggctccgtgtgtgtgtgtgttttgtttttctgctgcattttgaatttagaattcttagatttgatcctaattcaacctgaaaaagaattctgaaggccacctttagatctgatgctgtgatctggtctgttgagaagctgtttcccatctggacttccttcaagagagatgggcttcccagtttgtctggcctgagagccagctgggtgtgaggtgtctgagccggggcgcaggtctctttcctgttgtgcccgcaggcggctgtctggaagaactggcccaggctggttggaaaggtggtggcttgaagctaaccaccctgagcagggcatttctgggctcacagaccttctgttattggggtgatcactgtcgatggcttcaagggcattgaccgtggtgatggagttttgaggcgttgagctgattcctgcatctttgagacagaaataattcctcgtgggttgagtgttgtcctgacgctcaggaggagtcaccagaatgtggagtggggtcatggggcctacatgctgagtctgggacagaggcaccgcagggggcatgggctggccgccataggcgccaggtggggcagctcagccccagacctgctgaggaggtggcctggggttggggctggggcacaggtgtctgggcaagggtgggcttcagggattgtggtgatgaagactgaagccacaggccacaactgcttcccgtcgctggggtgtaagagccagggctctggccagtagtcgaggggagatgatgcccaccgaggctcccttcctctcttgtagagtcattcattcaccgaggcattcggtcagctgaccctgagctgttgccccctgctgggcacatagggtcttggggaggcacagagagccagtcggcagcttagccagtgactgctgggcctttgtttgggccccttgccctgcacacagctgatgatgagacaccccagggcagatggagcacagtgctgtgcaggatggagtccagacacccagcagtagcaggtcctggggtccagggagggatgctgaatgggtggccctggcatctggggtctgcccaccataacctgggtggggatcttgggtctgcgattggatctcttccgtatcctccctgaccagcctgtcagaggggccaacactgggcgtcgggcagccgtggaggctcgtgaggagtggagagggcccctggggctggggggcctgggaagggaggcctggatgcagcaggagcaccagagagagattcgggtggcaggtggagacgggggccagggaggttggattggggcctttgtgtatctttgcctggggactctgaatctagattcctgccacctttgaggtccaaggaaacagaaaccatgttgatttgtctctccgttgagaacacagctgtcgtccaacacagcgagtagcatcagaaattattctgaggtcttcacaaaaagactctgtagtgacagttcctgggtttgggggcctccatctgacatagcagtgcttgtctttggagacagaaatcgcctgtacgtgtttgggcccttcttcatctggcaaaccccgaaggaagggggtgagtgggcctcccgggacactcactggccactctgctgggcacagtgacactcattataactcgtgtgtgttaaatacattgggaaaataatgctttcagcagatatcaattaaatgtctactgtattctgcagcatgccccaggcttagagaaagtagaaagaggaaaataccatccagagacagtaacctcgagcattctggcatctttcctgctgagcatgcgtcccattcccaggacacacttgtgaccttctgggccttgtgacagggcagtctgctttcccataccctgggctgagcccctttgaagcccccagctgctcagtgaagttgcaggggtctggcctctcttctcctggaggtggccaggctgtgtgggagtgggggctctgcccctaatgcccccgcctcccgcaggcatctctgccggccttgccacaaccgtgagaaggccaagggcctgggcaagtacatctgccagcggtgccacctggtcatcgacgagcagcccctcatgttcaggagcgacgcctaccaccctgaccacttcaactgcacccactgtgggtaggtgcgcagcccggccctgcagttgtgggggcggggagccagggctggcccagggtaagggcggtggggcctccacctggggaagtgttgaggagggagaggggagcagggtgggcagacagaggggtcccgagagcaaggctgcagggcagaggtgggctgggggctgggaagcagccatggcaggaagcttctctctccagggctctgtttggggggcacttgagactcaggaggcgggtgggctggacccctagactgcagacgagggttgagatggagcagtggaagggacctgagggggcagggcaagagaccgggagtgggcttggtgctggtgttggagagaggagttgcataggcagcccctcagcccccgtcctcgcccacccccaccgtcccctccagtcctctccgtgcctatccagacaccccctctggtttggaggaggaggggggcccaagaacagacctgcttctcagaggcctgggtgcagaacacagcccactcttctgggctgtgcaggaagtctgtgctccagggcctgtctggggcacaggaagtcttcaaagtgcccagagatcagaaggcgctgccgcctcggctctgcagggacagaatgggcccctcggggagccgtgccctggggtggaggcgctgctggcatgaccctgcagaagggcaggggtggcacctgggggctgcacgctgtcttccaggaaggagctgacagccgaggcccgcgagctgaagggtgagctctactgcctgccctgccatgacaagatgggcgt

SEQ ID NO: 12786 - DNA, 531 bp, Homo sapiens
ataggcctctgtggaggtggcaggtgggcatgtgtggcctcggggagggcctgtggtggcagcgccatggccaggtggtggcagtttcctttgcattagcgccactccatccctggcccgagccctctcccaggcatctggctcctctatgggtcaaggctgcctaatggttaggggcagcggtgctgtcattgcagcctggactgccggcaagccacttcccctctgcaagcccccatcagagggacgaaacaccgctttgtgggctgctgtgaattcagactgtggtcagccttcgatgcacaggcatctctgccggccttgccacaaccgtgagaaggccaagggcctgggcaagtacatctgccagcggtgccacctggtcatcgacgagcagcccctcatgttcaggagcgacgcctaccaccctgaccacttcaactgcacccactgtgggaaggagctgacagccgaggcccgcgagctgaagggtgagctctactgcctgccctgccatgacaagatgggcgt

SEQ ID NO: 12787 - DNA, 2866 bp, Homo sapiens
gttcttccgcccctgcctccgcggctcggaggcgagcggaaggtgccccggggccgaggcccgtgacggggcgggcgggagccccggcagtccggggtcgccggcgagggccatgtcgctgttgggggacccgctacaggccctgccgccctcggccgcccccacggggccgctgctcgcccctccggccggcgcgaccctcaaccgcctgcgggagccgctgctgcggaggctcagcgagctcctggatcaggcgcccgagggccggggctggaggagactggcggagctggcggggagtcgcgggcgcctccgcctcagttgcctagacctggagcagtgttctcttaaggtactggagcctgaaggaagccccagcctgtgtctgctgaagttaatgggtgaaaaaggttgcacagtcacagaattgagtgatttcctgcaggctatggaacacactgaagttcttcagcttctcagccccccaggaataaagattactgtaaacccagagtcaaaggcagtcttggctggacagtttgtgaaactgtgttgccgggcaactggacatccttttgttcaatatcagtggttcaaaatgaataaagagattccaaatggaaatacatcagagcttatttttaatgcagtgcatgtaaaagatgcaggcttttatgtctgtcgagttaataacaatttcacctttgaattcagccagtggtcacagctggatgtttgcgacatcccagagagcttccagagaagtgttgatggcgtctctgaatccaagttgcaaatctgtgttgaaccaacttcccaaaagctgatgccaggcagcacattggttttacagtgtgttgctgttggaagccctattcctcactaccagtggttcaaaaatgaattaccattaacacatgagaccaaaaagctatacatggtgccttatgtggatttggaacaccaaggaacctactggtgtcatgtatataatgatcgagacagtcaagatagcaagaaggtagaaatcatcatagatgaattaaataatcttggtcatcctgataataaagagcaaacaactgaccagcctttggcgaaggacaaggttgcccttttgataggaaatatgaattaccgggagcaccccaagctcaaagctcctttggtggatgtgtacgaattgactaacttactgagacagctggacttcaaagtggtttcactgttggatcttactgaatatgagatgcgtaatgctgtggatgagtttttactccttttagacaagggagtatatgggttattatattatgcaggacatggttatgaaaattttgggaacagcttcatggtccccgttgatgctccaaatccatataggtctgaaaattgtctgtgtgtacaaaatatactgaaattgatgcaagaaaaagaaactggacttaatgtgttcttattggatatgtgtaggaaaagaaatgactacgatgataccattccaatcttggatgcactaaaagtcaccgccaatattgtgtttggatatgccacgtgtcaaggagcagaagcttttgaaatccagcattctggattggcaaatggaatctttatgaaatttttaaaagacagattattagaagataagaaaatcactgtgttactggatgaagttgcagaagatatgggtaagtgtcaccttaccaaaggcaaacaggctctagagattcgaagtagtttatctgagaagagagcacttactgatccaatacagggaacagaatattctgctgaatctcttgtgcggaatctacagtgggccaaggctcatgaacttccagaaagtatgtgtcttaagtttgactgtggtgttcagattcaattaggatttgcagctgagttttccaatgtcatgatcatctatacaagtatagtttacaaaccaccggagataataatgtgtgatgcctacgttactgattttccacttgatctagatattgatccaaaagatgcaaataaaggcacacctgaagaaactggcagctacttggtatcaaaggatcttcccaagcattgcctctataccagactcagttcactgcaaaaattaaaggaacatctagtcttcacagtatgtttatcatatcagtactcaggattggaagatactgtagaggacaagcaggaagtgaatgttgggaaacctctcattgctaaattagacatgcatcgaggtttgggaaggaagacttgctttcaaacttgtcttatgtctaatggtccttaccagagttctgcagccacctcaggaggagcagggcattatcactcattgcaagacccattccatggtgtttaccattcacatcctggtaatccaagtaatgttacaccagcagatagctgtcattgcagccggactccagatgcatttatttcaagtttcgctcaccatgcttcatgtcattttagtagaagtaatgtgccagtagagacaactgatgaaataccatttagtttctctgacaggctcagaatttctgaaaaatgacctccttgtttttgaaagttagcataattttagatgcctgtgaaatagtactgcacttacataaagtgagacattgtgaaaaggcaaatttgtatatgtagagaaagaatagtagtaactgtttcatagcaaacttcaggactttgagatgttgaaattacattatttaattacagacttcctctttctaagattttgtgaattggttgaatagttctatacaaatgaagtatggaggtgtgtatgtttatatgtatataacaaaatattttcattgtgaccactctgaagtaagagcaatgggaatggcat

SEQ ID NO: 12788 - DNA, 4362 bp, Homo sapiens
tatataattttgtctctttttttaaaaaaaagaaccttactattgttaatttataacatagtagacagaagtaggataaactataacttaaataatatacttctaaatttaaattgatgtgtatccatatacattagtctatctaaaacatgttgaatgaaaatggtacattacaaagacatacatagaacatttttgttgaattcaaaaacctaaaacattggcatatactatttatgaacacttacacacatgagtaaaaattaaaacatgcctgatatgtctggcacataataggtgctcaggaaatatttgttgagtgaataaatgatactgagaatataacctgataatgtaggatagttcttagcctaaatatttaaaacataagaattggtggtcttaaaaataatatttattttcatatcttttagatatgggtaagtgtcaccttaccaaaggcaaacaggctctagagattcgaagtagtttatctgagaagagagcacttactgatccaatacagggaacagaatattctgctgaatctcttgtgcggaatctacagtgggccaaggctcatggtacggtaaagcccattttttgttagatctacaatatacttaacgttaaatcataaagtttcttctgaataaataactttcctcccagttttacagtgaaaatattttggcctactaggcaaatctcaaaccaaacaaatatttcaattatggatattacactggcttatttgatttagaaatatcaaattatttagcccattattgtcactattggtaaaatttaaatgaccatttaaaaatttttctatttttaaaataggttaagtttccatttgtctaatacacaatcctttagattctcctatattgtgacctgtcgaaaatcatggattgggttctgatccagtctctaccactctatgaacatgttatctataacatgtaaataagaaatggtacctgcttcaggctgggtgtggtcgctcacgcctgtaatcctagcactttgggaggccaaggcaggtggatcacctgaggtcaggagttagacaccagcctggacaacatggcaaaacctcgtctctactaaaaatacaaaaagttagcggggtgtggtggcacgtgcctgtaatcccaactactagggtggctgaggcaagagaatctcttgaacctgagaggtggaggttgcagtgcagtgagcagagattgtcccactgcactccagtctgggcgacagagcgagactctgtctcgaaaagaaaaagaaatagtacctgcctcataggttattgggattgaatgagtgcataggtagaaatgagcatggcactcgacaagtcctctgtacttttgattattcgtataactgagcatcctctcttggacacttgatcagtaagttgagtgatcagcagagaagatgacgtgaaaatcaatctgtagcttaattaccttttggtaattgtgtatggtttaatgaaaaaataagtttaaattaccaattgaaataattttggattttctgagtccaagtatctagtctgtgagtctcttatagataattgaaaaataattgtatttaatgaacttctataaaatatctttattttcataaataataatttttgttcttggccaggtgtggtggctcacacctgtaatcccagcactttgggaggccaaggtgggtagatcacctgaggtcaggggttcaagaccagcctggccaacatggtgaaactccatctctactaaaaatacaaaaaattagctggtcatggtggcaggtgcctgtaatcccagctactctggaggctgagccaggagaatcacttgaacctgggagtcggagtttgcagtaagctgaggtcacgccattgcactccagcctgggcaacaagagcaaaactcagtctcaaaaaaagaatttattctctaatacatatttttagtaaattaacatattaaagcacattaaaatgtaaaatgctataaatatctcaccattccagataactggataagtaattgaatgtcttttctctaaaaaagatctaaacaacaaatagcaaaattacggtggtaaagatcaacaataaacgaaacttcataaaacaaaatgaaaaggtcatatagaaaatatttgtaacaaataagagaaaaaaaattaagaccctcctcagtaaacaagcaaatgatacaaattcaacaatccacactgctggaagtatagagaaaaattttttaaatggctaatgtaagtaattaaggaataattaaaactgatggtatctttctgctttttaataccatcaagtagacaaatgttttaaaaattaatactctgttttggacatgttatgctgaaactttatattccatgcaaattgaaaataatttgtcccatatgtaaaggaacaatcacatagctttatctatcttaaagcattacgtatatataaatattaactatgatagaaaaacaataaaacccagaggtattataaatattcaagagttaacagaatggttaaaggtaacaaactataatgtggctgttcagtgacattgtgctttattaaaaattctggtcatataaattgaggcaacagtgaaaatttatctacaattgtatgcatatttttgattgccacaataaaaattatatatacagttggataagaactataaacaaatggtaaatgaaagactttgtttggccagcagaatagtgagcattattttttaaattgtatgtgtttaaacaatgtaaatcatgtttttaagcaaaagaaatgctaactatattctcctccataaatatttgcctcttatcatcagaaaacctaccaaagttgttcttattgttctttttcagaacttccagaaagtatgtgtcttaagtttgactgtggtgttcagattcaattaggatttgcagctgagttttccaatgtcatgatcatctatacaagtatagtttacaaaccaccggagataataatgtgtgatgcctacgttactgattttccacttgtgagtctcttcttttatttaaaatacagtgatatattctcacttattaaagactaaattttttaaaacttaaagttgatggtaaatataaaggaaatatatatatttatatatgtgtatatatttatagtttagtaacactgatcataatatttactaattgccaaaataccttaagtttatgagatttagaaatgtctaaagttcactcaggaaggatgcctctaatttcttatatcctaaacacgagagccaatgtgaaggaataaaatgtgctataaatatgtcaagaataatttccttttaaacagttataacttatattggaaacagtagtttttaagtcttgttaaggtatggtcatatgctggaataatagaaatctagttctgctcttttcaaacatttaggtttgatagttattttacgttggtctaaagaagccagtaaatagtacccctctttcctacatgagtgtgacaaactgagaagcaagcaaggagtaagacaagcagaaacccaaaatatcactttgattactgatagaggctttgtggaggatattgcttcatgtcagagtaaatggtctagcaccaaaccccagaattgagtggccaccccacacctccagtctcagcagtacggagcccagataggcttcctgaggtactgagcaagctgggggcctgtgggcttctcactggagcagcagaacccttactcttggccattgggttggctctaaaagaagaaaaaggaaaaggctgtttatttatccttcttaaatattctaatcatataaatttccctgcaccttcccaaaagtgatgattaagaggagagaatccaggagtcaaacactaatggggctctctctgcttaagaggaaacttgagtagctcaagaagcatttctaggaatcatttgaaaggaagctctttcagagctcactttactttttagatggcttagtacagaattgagaattcctattataaccatagattgttgttttcattgtttagtcctggataattttgggattaccaaaattcacgagaggccagaattcacgagaggatagtatcagttaagatgtcttatgtactagattatattgtggctttcattgatttcattattaacagtccctaatttttttttttacaggatctagatattgatccaaaagatgcaaataaaggcacacctgaagaaactggcagctacttggtatcaaaggatcttcccaagcattgcctctataccagactcagttcactgcaaaaattaaagg

SEQ ID NO: 12789 - DNA, 869 bp, Homo sapiens
tatataattttgtctctttttttaaaaaaaagaaccttactattgttaatttataacatagtagacagaagtaggataaactataacttaaataatatacttctaaatttaaattgatgtgtatccatatacattagtctatctaaaacatgttgaatgaaaatggtacattacaaagacatacatagaacatttttgttgaattcaaaaacctaaaacattggcatatactatttatgaacacttacacacatgagtaaaaattaaaacatgcctgatatgtctggcacataataggtgctcaggaaatatttgttgagtgaataaatgatactgagaatataacctgataatgtaggatagttcttagcctaaatatttaaaacataagaattggtggtcttaaaaataatatttattttcatatcttttagatatgggtaagtgtcaccttaccaaaggcaaacaggctctagagattcgaagtagtttatctgagaagagagcacttactgatccaatacagggaacagaatattctgctgaatctcttgtgcggaatctacagtgggccaaggctcatgaacttccagaaagtatgtgtcttaagtttgactgtggtgttcagattcaattaggatttgcagctgagttttccaatgtcatgatcatctatacaagtatagtttacaaaccaccggagataataatgtgtgatgcctacgttactgattttccacttgatctagatattgatccaaaagatgcaaataaaggcacacctgaagaaactggcagctacttggtatcaaaggatcttcccaagcattgcctctataccagactcagttcactgcaaaaattaaagg

SEQ ID NO: 12790 - DNA, 14522 bp, Homo sapiens
ctgaaattgatgcaagaaaaagaaactggacttaatgtgttcttattggatatgtgtaggaaaaggtaagttttctaatctttattaaagaattgttggagttaaatatcgaccatgacaaactagagaaacctgtgaaatgctaaaagccatttgcgtttgtgaattttagtttatacattgaaactggaagaacaaaactagaggaaaatacatttactccatgtatatctaattattttaactcttcatatttgctatagaacacaaatgaagaactaaagggcatgggcatttactcacactacaggggattcaactctccagaatgcctttagatgactttaataatcactatagttattccctcaggaattaacaaaaccaacacccatggagttgggatctctgctcactagtcagtcctggtcttccagacatggaatgagtagccgaagcagatgtttggaggtttggatcccatttgtctgccattgcctttctaaggagtagaaccaatgactgttcctctagatttactatttttttgcttgctcagcatttaccaatcaaaatccaatgccagagttcaaatgcaactctagttttaaagctaacaaggagttagtgggttattttgggtagatatgtagctacctagatgaaaaattttgaatctataattttaaattatgtattctaaaaaactgttgtattttctcattatttatacccttttaagaatgctctttaacttttcatatttctatctgccctcctccgcctcccttaaatagaaatgactacgatgataccattccaatcttggatgcactaaaagtcaccgccaatattgtgtttggatatgccacgtaagaacatttgatgtttacgttgaagtttcctttattgtttgatgtctttttgtttttgctttttaggagcaggggtcttaactctgtcacccaggctggagtgcagaggcgccatcatagctcactgctcctgggctcaagcgatcctcctgcctcagccttctgagtcgctgggattacaggcatgtgccactgtgcctggcccctgagggttttttgattatagattagaggcctagaaaatacctatagacatgtaggcataaatttacctccttgatattctgcgtagaaaattttaaatgatcgactttagcattccatatcatggtatcttaattattaagcccaaattgggcatgtaattcctgcttaaagattaactctttaattatcaatgtcatgtgagaggcagaagagaaaatgaagcttattggtgtatacagaagtcccatgtggcaagtgtttgcttttctaacattttctttttaaaaaattatttttattggatattgacaagttataattgtatgtatttatgggatacaaagatatgctatgatgtacgtattcaatgtggaatgattgaatcaagataattcacatatcacctcaaatacttatcttttttcctaactgaaacattgtaccctgtgactaacagtccccacgctgtccccacccccccccagcctctggtaaccaccattctgctgggtgcttctctgagttcatttttattagcatccacatataagtgagaacatacagtatttgcctttctgtgcctggcttaacttctttttctatttttaaggtgtcaaggagcagaagcttttgaaatccagcattctggattggcaaatggaatctttatgaaatttttaaaagacagattattagaagataagaaaatcactgtgttactggatgaagttgcagaaggtaaaataaaaaataaagagaaaagtactcagaaaaaggagagcaggggagacacacctattcagggttccctctctggtgattgttttattcttattatgtgggtttggaattagtacctactttataaaacaatttttatattaatataacgttcagcaacacttctgctatttaatgtcatctttccttcccttttgacctagctctccaccatctgtgcagcattactcagactacaaggctaagcctcggcacagtcattaataaagttgaattctcagagctctactttgcttctatgcccagtgccttggtactggcaaatctccctatttgagggtgggtgggtggcatggaggggtggtggggaattgtccagtgagcagtctctcccaggatgggagagagaaaactttacagaaatttttagacactgctgggaaaagctgagttcatttttttccctgatgaacttagtagtttttaaatcctgatttaaggatgtgatcctagggggtctaatgccacatcttccatttctatctgttctccctgcctgctggtataatgctgtgcatatgtcagatgctgaacaagtacctattatttcagtagattgcactgtgttttttgaaaaaacattttataagccatagcaaaaagaaggtaacttggccaggtatggtggctcaagcctgtaatcccagcactttgggaagctgaggcaggaggatcacttaaggccaagagttcaagaccagcctaggcaacatagcgagaccctgtcttcaaaataaaaaataaaaataaaaaagaagaaattattttacaaactagcaccactagaaaatggagtttcatggatgttccagtgatggcagtttgggtataaggtgtttgaccaactgtcagccatatttattttcatgtttttatctgtgtagctattttagatcacttgacttagccacttttccatttaacataaccagccagggctttggacttcctgccaccctcccgcttcatccagagaagttccacttttatttgttttctacattaggcttcttctgaagcttacatttgaaggaaaggctctgctgctttaaaaaaaaaaaaagaaagaaagaaaacctttggattatgtcagttatattcaaactgagatccagtaaggtgctccagaaactctacagtgttttatttcaatttcgtttttaagtccattttaactattttaaaacttaataaaaagcaccatgctcactcacatatgatatttaccaaattgtcatagcaatgaatggcatcccgatatgtgctgtgaggatatttgaacttcttataaacatcttagacagttttgcttttcgctgatctttttcagtcctaccatgtctgcttaaccagaattgcccaggcaggaagaccctgtagtgtacatggagcacactcagctcagtgccgtgcacattgtgcccttcgtgggtaacggcccactcattgtacaaaataagtaaaggcctaatagtatcatgataaataatacagttaaatctagcccttattttgagttttggatgctttgtgtctgacccctgtcttagtagtaaagagcaaaagtagttgtatgaaatttttcacaagtcatccaattttgaaacaaaactttgctgtttctccctttggatcttccagattacttaattgaaactcattccatggctgggcatggtggctcacacctgtaatcccagcactttgggaggctgaggtaggaggattgcttgagcccaggaattcaagaccagtctgggcaacacagcaagaccccatctcaatttaaaaaaaaaattatttggggccaggtacagtggctcatgcctgtaatcccagcatttggggaggctgaggcaggagaatcacttgaacacagaagtttgagaccaacctaggcaacattgtcagaccccccatctctataaaaatttaaaaaattagccaggcattatggtgtgcacctgcagtgccagctactcgcgagacttaggtgggaggattgctcgagcctggcagtttgagactgtagtaagtatgaccacaccactgctctccagcatgtgtgacagagcaagccccatctcaaaaaaaaaaaaaaagaaaattccagagggagaaaagtattcacagattataagccaagcagttgaaggggaaaataaacatgttaccaatttctttttttaattttttggtttctttgtgtgagactacagagtctctgtcgcgcaggctagagtgcagtggcatgatcttggcttactgcaacgtccacctcccaggttcaagtgatcctcttgccgcagcctcccaagtagctgggactaaaggcacacaccaccacgtccggctaatttttgtatttttggtagagatagggtttcgccatgttggccaggcctgtctcgaactcctggcctcaagtgatccaccggcctcagcctcccaaagttctgggattacagacgtgagccaccacgcccggcccaccttaccaatttcaactgtgtgcaaggaaaacaaaatatgaggtaaattggttgttataatgctacagccatcaatctgtaacgtgacttttatttttgtactattcaggacagcattattattagaagtgttgaacatactactgaaggttttcattgtgagtagatgttcgatatgaatataggaccttgaagtaacctacatctaattataggacccctcttctcccttcccccactccatgataactaccattctaaacttattcctttttcgttttacatagttttattgagtttatatatacccaaaaaagtatgcgtagttttgtttttaacttcataaaaaggtattatgctctatgtagtcttttgggactagatttttttggttaatattatgttgctaagattgatccctattgttgcatgactgtagtttttaactgctacgtaatattctgttatgcaaacatactacagtttttttcaactactctcctgtgttggtgagcatttgagttagttgtaggtttttgctatgttaacagtgctatcattaacagtcttgtgtatgtctcctggaatatgtatgcatgaatttctttgcagtataattctacaacttggaattgctgggtcatagggtgtgacagtattccattttgagagagaatgccagacagttttgtaaagtggttgccgagtctacacttaaccctactccccacggccagcaagggataatgtgaatctgtactctctccatcacttgatagtcagacttttttatttttgccaaatgttaaatagtatctcatgtgatattgaacattgttcatatttttaatagctatatgtatatcttatgtgaaacatctttttatgtcatttgtgcattcttctgtgtgtgtgtgtgtgtgtgtgttttggcttattgatttagaggaatgttgtatgtgttcttgatataatactagcgaggaccgctaagacacaattgaataggtagttgtgggcatccttgtcttgtttctgactttaaaggaaatactgctaatgtcttcacatttagaataatattgtaagtttttttattaacactttatcaggttaaggaagttctcttaatttttttgaaaatttttattatgaataaatgaacaagattaaatggtttttctgcagctatgaagaagaaaataggatgtttcttttctttcaatttcttaatatggtgagttaaatttatagatagtctaacattaatccaacttgagataaatcactttcattgggatgtatatttttaatacactactagatttaatttgccatcattctgtttagaattttcatatctatattcatatgggaaatgggcctgtaattttactttcttatagtatttggtttaattttatgagaaaataaaattagtatttagtggtatcagtgttatcagtatcagtggcatacagagtatcagtgttatctgatagaatgtagcgtaggccttgtggaatgagatggaggacaaccaagatggttgattttatgtcaacttttgccaggcctcagtgccaagatatttagtccagcattattcaagatgtttctaggtgatggatccaacattattctggataagattaaagtttaaattgatggactttcagtaaagtagattgctctccataatgtgaatgggcctcattcagttagctgaaggccttaatggagcaaagactgacctcccacaagcatggagtttgctagcagcccgcctctggggctcaaactacaactctcctctgcatccccagcctgcctgcctgcaggtttcagacttgcaccgccacaattcataaaccaataccttaagtcagtcccttcttctcactgtccctctatgtacacacatacacacacacacacacacacacgtgtacgtgtacacatgcgcccatcttgttggtactgcttctctggagaactctaatacagaagaagtacaccctgttgtttactgggaacttttgtataaattatgatctgttccctaatgtttatggtagaacttgcctataaaccaacctgggattggtatttttttggtagaagatttttaaccactggttcagtatcttgaatatttcttgtaccatataggcttttcatttcttgagtcaattttgataagttatattttcctaggaatttgggcagttttcaaattcgttgtcatttagttgctcatatttctaatagtattctttaatctctgccttatccatagttatatatccgttttcatcagtattacttgtacttactttccttttttatttattgccagcttttgccaattgtgctatttcattttgaagaaccaatctttgactctgttgatttcttctactttttcattgttttctacatcattaacttctgctgtttatttatgtcttgccttgcatttattatttctttttctaacatcatcgtagttattcacttttagcctattttttccaatttaagtttctaaggctttacatttctcttaaaacatcactttcatcacacatcctataagtttagggattttttttagttgactttttttttctttgacctttaagttatataatattatctttaattttcaaatatggcaggaattttcatttcactttttgctttttatttctaccttaattgctttgtgatcgaataatagtctgtctaattgctatgctttgaaatttgtggaggttttcattatggccaagtaaaagatgaaattttgtaaattttgcatgtgtacttgagaaaaatggatatttttgtagtaactggttgcagaactctatgtatgcccattaggtttggcgtattaatttttattgttttgttcagttctatatttctgctgattgtctctttgatcaataattgagatgttgaaatctctcaatttaccaaattttcttgtagttctagcactttttacttcatatatagtgactattttcgtgttttaaatgtttatattttcttattgaacctttatcattatgtagtgatgcctccatttcaaatgcttcttctctttttgtatcatactaacagagccacaccaacttcctttttgttgacctaatatgctattttttacacttttactttcctactcttaacccctaggctagcctgcttctctacacttttactttcaaacatttcatgtcattctgctttgctgtagcttttggaggcaccatataacagattgtttaaaatccaatctgataatcttggtcttttaatgagaaaatttagttaatttacatttgttattttttgtacctgttttaaccatctaattttttgatttggctcattttcttatcttttttaaaaaaattgtatttatatcttttcttctctaacaaataataattttaatgtactcctacaatacttggtatctccttttaactcccaacatgttgatttaacttagacttagttctggatcactatataattttgtctctttttttaaaaaaaagaaccttactattgttaatttataacatagtagacagaagtaggataaactataacttaaataatatacttctaaatttaaattgatgtgtatccatatacattagtctatctaaaacatgttgaatgaaaatggtacattacaaagacatacatagaacatttttgttgaattcaaaaacctaaaacattggcatatactatttatgaacacttacacacatgagtaaaaattaaaacatgcctgatatgtctggcacataataggtgctcaggaaatatttgttgagtgaataaatgatactgagaatataacctgataatgtaggatagttcttagcctaaatatttaaaacataagaattggtggtcttaaaaataatatttattttcatatcttttagatatgggtaagtgtcaccttaccaaaggcaaacaggctctagagattcgaagtagtttatctgagaagagagcacttactgatccaatacagggaacagaatattctgctgaatctcttgtgcggaatctacagtgggccaaggctcatggtacggtaaagcccattttttgttagatctacaatatacttaacgttaaatcataaagtttcttctgaataaataactttcctcccagttttacagtgaaaatattttggcctactaggcaaatctcaaaccaaacaaatatttcaattatggatattacactggcttatttgatttagaaatatcaaattatttagcccattattgtcactattggtaaaatttaaatgaccatttaaaaatttttctatttttaaaataggttaagtttccatttgtctaatacacaatcctttagattctcctatattgtgacctgtcgaaaatcatggattgggttctgatccagtctctaccactctatgaacatgttatctataacatgtaaataagaaatggtacctgcttcaggctgggtgtggtcgctcacgcctgtaatcctagcactttgggaggccaaggcaggtggatcacctgaggtcaggagttagacaccagcctggacaacatggcaaaacctcgtctctactaaaaatacaaaaagttagcggggtgtggtggcacgtgcctgtaatcccaactactagggtggctgaggcaagagaatctcttgaacctgagaggtggaggttgcagtgcagtgagcagagattgtcccactgcactccagtctgggcgacagagcgagactctgtctcgaaaagaaaaagaaatagtacctgcctcataggttattgggattgaatgagtgcataggtagaaatgagcatggcactcgacaagtcctctgtacttttgattattcgtataactgagcatcctctcttggacacttgatcagtaagttgagtgatcagcagagaagatgacgtgaaaatcaatctgtagcttaattaccttttggtaattgtgtatggtttaatgaaaaaataagtttaaattaccaattgaaataattttggattttctgagtccaagtatctagtctgtgagtctcttatagataattgaaaaataattgtatttaatgaacttctataaaatatctttattttcataaataataatttttgttcttggccaggtgtggtggctcacacctgtaatcccagcactttgggaggccaaggtgggtagatcacctgaggtcaggggttcaagaccagcctggccaacatggtgaaactccatctctactaaaaatacaaaaaattagctggtcatggtggcaggtgcctgtaatcccagctactctggaggctgagccaggagaatcacttgaacctgggagtcggagtttgcagtaagctgaggtcacgccattgcactccagcctgggcaacaagagcaaaactcagtctcaaaaaaagaatttattctctaatacatatttttagtaaattaacatattaaagcacattaaaatgtaaaatgctataaatatctcaccattccagataactggataagtaattgaatgtcttttctctaaaaaagatctaaacaacaaatagcaaaattacggtggtaaagatcaacaataaacgaaacttcataaaacaaaatgaaaaggtcatatagaaaatatttgtaacaaataagagaaaaaaaattaagaccctcctcagtaaacaagcaaatgatacaaattcaacaatccacactgctggaagtatagagaaaaattttttaaatggctaatgtaagtaattaaggaataattaaaactgatggtatctttctgctttttaataccatcaagtagacaaatgttttaaaaattaatactctgttttggacatgttatgctgaaactttatattccatgcaaattgaaaataatttgtcccatatgtaaaggaacaatcacatagctttatctatcttaaagcattacgtatatataaatattaactatgatagaaaaacaataaaacccagaggtattataaatattcaagagttaacagaatggttaaaggtaacaaactataatgtggctgttcagtgacattgtgctttattaaaaattctggtcatataaattgaggcaacagtgaaaatttatctacaattgtatgcatatttttgattgccacaataaaaattatatatacagttggataagaactataaacaaatggtaaatgaaagactttgtttggccagcagaatagtgagcattattttttaaattgtatgtgtttaaacaatgtaaatcatgtttttaagcaaaagaaatgctaactatattctcctccataaatatttgcctcttatcatcagaaaacctaccaaagttgttcttattgttctttttcagaacttccagaaagtatgtgtcttaagtttgactgtggtgttcagattcaattaggatttgcagctgagttttccaatgtcatgatcatctatacaagtatagtttacaaaccaccggagataataatgtgtgatgcctacgttactgattttccacttgtgagtctcttcttttatttaaaatacagtgatatattctcacttattaaagactaaattttttaaaacttaaagttgatggtaaatataaaggaaatatatatatttatatatgtgtatatatttatagtttagtaacactgatcataatatttactaattgccaaaataccttaagtttatgagatttagaaatgtctaaagttcactcaggaaggatgcctctaatttcttatatcctaaacacgagagccaatgtgaaggaataaaatgtgctataaatatgtcaagaataatttccttttaaacagttataacttatattggaaacagtagtttttaagtcttgttaaggtatggtcatatgctggaataatagaaatctagttctgctcttttcaaacatttaggtttgatagttattttacgttggtctaaagaagccagtaaatagtacccctctttcctacatgagtgtgacaaactgagaagcaagcaaggagtaagacaagcagaaacccaaaatatcactttgattactgatagaggctttgtggaggatattgcttcatgtcagagtaaatggtctagcaccaaaccccagaattgagtggccaccccacacctccagtctcagcagtacggagcccagataggcttcctgaggtactgagcaagctgggggcctgtgggcttctcactggagcagcagaacccttactcttggccattgggttggctctaaaagaagaaaaaggaaaaggctgtttatttatccttcttaaatattctaatcatataaatttccctgcaccttcccaaaagtgatgattaagaggagagaatccaggagtcaaacactaatggggctctctctgcttaagaggaaacttgagtagctcaagaagcatttctaggaatcatttgaaaggaagctctttcagagctcactttactttttagatggcttagtacagaattgagaattcctattataaccatagattgttgttttcattgtttagtcctggataattttgggattaccaaaattcacgagaggccagaattcacgagaggatagtatcagttaagatgtcttatgtactagattatattgtggctttcattgatttcattattaacagtccctaatttttttttttacaggatctagatattgatccaaaagatgcaaataaaggcacacctgaagaaactggcagctacttggtatcaaaggatcttcccaagcattgcctctataccagactcagttcactgcaaaaattaaaggttactaccttttctgtttatagctactaatggaaaactttatgaaactggaaacttattttggcatagaccatagatatgctgccttattattaaagtagagataaccagtctacagaaggtcctatcagtgaccctttttatattctgtttccgatggtgaccagaggactttatgtgtgcttaccctccagaatgctaaaaaattagtaacattagagtatattcttttttctttttttagagacagagtcttaactctgtcacccaggctggagtgcagtggcatgaacatgacctactataacctcaaactcctcagtgcatatgatcctgccacctcagcttcccaagtatctgagtctacaggcacatgccactacacccagctaattttttaaaactttttgtggagaagggatctcactatattgcccaggccaatctcaaactcctggcctcaagaatcctcccttcttggtctcccaaagcactcggagtacaggtgtgagcttccactcccagctccatattctacttttaaatatgttcagattttcaagtaatcatttcctagttctatgactagacatatagcaaattagaattttttttccatttttttatttctagttgacttacaaatgagaagctagttctgcacattgagtgttctaatgaaagcttttaatttgttcacaactacatgaccatagaatgtatcagctaaaactcagggaatggaatgggcatgattgagaattacacacataaacctgttgtcatcctgttcggagctcatctacttaaaatcctttcttctcttaaaaagttagcccattatctgattcagttatattttccacctacgattatggattactataatattttaaaaacagcttaagctttttttataaaactggtataaaaccaggtttttttttttgttttgagatggtgtctctctctgtcgcctaggttggaatgcagtggcgcgatctcagctcactgcaacctccacctcccagactcaagtgattcttgtgcctcagcctcccgagtagccaggactacaggcgcacaccaccatgcccagttaattttttgtatttttagtagagacaggtttcaccacgttggccagactggtcttgaactcctaacttcaagtgatccatctgcgtcatcctcccaaagtgctgggattataggcgtgagccaccacgccgggcccagatcattttttaattaaaagttaataccccatctctaataatagggaagggtaagtttcctaagctgcactgcttggaaaatgttttccctgttcatctagagtgtaagaaagatctctttgactttgactactaacagtagtaagaactagaaattctaaatgggttgtaagtattgcatgaaggaaaaggaagataatgatagctggcgtttctcagtttcagggagatataaaggatgccttgaggatttggaacctgggaaaggagagtgagtggatttttgggggtgggggtgtgtatgtgtgaatattttcagattgatatatattcactgttgatgccaataataaaccagatttttttccttttcaggaacatctagtcttcacagtatgtttatcatatcagtactcaggattggaagatactgtagaggacaagcaggaagtgaatgttgggaaacctctcattgctaaattagacatgcatcgaggtttgggaaggaagacttgctttcaaacttgtcttatgtctaatggtccttaccagagttctgcagccacctcaggaggagcagggcattatcactcattgcaagacccattccatggtgtttaccattcacatcctggtaatccaagtaatgttacaccagcagatagctgtcattgcagccggactccagatgcatttatttcaagtttcgctcaccatgcttcatgtcattttagtagaagtaatgtgccagtagagacaactgatgaaataccatttagtttctctgacaggctcagaatttctgaaaaatgacctccttgtttttgaaagttagcataattttagatgcctgtgaaatagtactgcacttacataaagtgagacattgtgaaaaggcaaatttgtatatgtagagaaagaatagtagtaactgtttcatagcaaacttcaggactttgagatgttgaaattacattatttaattacagacttcctctttct

SEQ ID NO: 12791 - DNA, 2246 bp, Homo sapiens
ctgaaattgatgcaagaaaaagaaactggacttaatgtgttcttattggatatgtgtaggaaaaggtaagttttctaatctttattaaagaattgttggagttaaatatcgaccatgacaaactagagaaacctgtgaaatgctaaaagccatttgcgtttgtgaattttagtttatacattgaaactggaagaacaaaactagaggaaaatacatttactccatgtatatctaattattttaactcttcatatttgctatagaacacaaatgaagaactaaagggcatgggcatttactcacactacaggggattcaactctccagaatgcctttagatgactttaataatcactatagttattccctcaggaattaacaaaaccaacacccatggagttgggatctctgctcactagtcagtcctggtcttccagacatggaatgagtagccgaagcagatgtttggaggtttggatcccatttgtctgccattgcctttctaaggagtagaaccaatgactgttcctctagatttactatttttttgcttgctcagcatttaccaatcaaaatccaatgccagagttcaaatgcaactctagttttaaagctaacaaggagttagtgggttattttgggtagatatgtagctacctagatgaaaaattttgaatctataattttaaattatgtattctaaaaaactgttgtattttctcattatttatacccttttaagaatgctctttaacttttcatatttctatctgccctcctccgcctcccttaaatagaaatgactacgatgataccattccaatcttggatgcactaaaagtcaccgccaatattgtgtttggatatgccacgtaagaacatttgatgtttacgttgaagtttcctttattgtttgatgtctttttgtttttgctttttaggagcaggggtcttaactctgtcacccaggctggagtgcagaggcgccatcatagctcactgctcctgggctcaagcgatcctcctgcctcagccttctgagtcgctgggattacaggtgtcaaggagcagaagcttttgaaatccagcattctggattggcaaatggaatctttatgaaatttttaaaagacagattattagaagataagaaaatcactgtgttactggatgaagttgcagaagatatgggtaagtgtcaccttaccaaaggcaaacaggctctagagattcgaagtagtttatctgagaagagagcacttactgatccaatacagggaacagaatattctgctgaatctcttgtgcggaatctacagtgggccaaggctcatgaacttccagaaagtatgtgtcttaagtttgactgtggtgttcagattcaattaggatttgcagctgagttttccaatgtcatgatcatctatacaagtatagtttacaaaccaccggagataataatgtgtgatgcctacgttactgattttccacttgatctagatattgatccaaaagatgcaaataaaggcacacctgaagaaactggcagctacttggtatcaaaggatcttcccaagcattgcctctataccagactcagttcactgcaaaaattaaaggaacatctagtcttcacagtatgtttatcatatcagtactcaggattggaagatactgtagaggacaagcaggaagtgaatgttgggaaacctctcattgctaaattagacatgcatcgaggtttgggaaggaagacttgctttcaaacttgtcttatgtctaatggtccttaccagagttctgcagccacctcaggaggagcagggcattatcactcattgcaagacccattccatggtgtttaccattcacatcctggtaatccaagtaatgttacaccagcagatagctgtcattgcagccggactccagatgcatttatttcaagtttcgctcaccatgcttcatgtcattttagtagaagtaatgtgccagtagagacaactgatgaaataccatttagtttctctgacaggctcagaatttctgaaaaatgacctccttgtttttgaaagttagcataattttagatgcctgtgaaatagtactgcacttacataaagtgagacattgtgaaaaggcaaatttgtatatgtagagaaagaatagtagtaactgtttcatagcaaacttcaggactttgagatgttgaaattacattatttaattacagacttcctctttct

SEQ ID NO: 12792 - DNA, 28380 bp, Homo sapiens
agaggacttaaaatgcaaaagaaagggatgtggacactgctctgggagacctaaggaaggctgggaagaagcgcaggcgaggtgatgaatgcagagggtggggtgcaggaattcatgaacattttgcaaggtattgggaaagactgacgccgaactcatcatctccctccatcaaaccaggttaccacgttctcttcttgacttcaccatgaacatgaaactcgaagtaaaactattttccttgttaggtttggaatggctgtattagggttcctgaagttttggtctcgagactcctttaccctcttaagaattattgaggaccccagagagctcttatgtgggttagagataatacatacatgtaatacatactgatatttaccacctttgaaattaaagctaagacatttaaaaaatattaatttatttaaaaagaataacccattatatggtaacagaaataatactttcgtggaaaaacaaattttccaaaacaaaaaagtctattagagaagtggcattggttttcattttgaagatctctttaatgtcttggcttaatcacagagctggattcgtttatgtgcttctgcattcagtctgtcgcactattacaggtcacagaacgctggaaactgcagtgtccactcctgaaagaatgaatgaaaaagctaaataaagtcttaatattgttatgaaaaatctttatgaccttgtggaccccgcgaaagggtctcaggaactgcactaggggttcccagaccccacttagaaccattactttataccattgttgtaactttggcctgcctttgaaccccttagcagttttttgaacttctcaaatgacaaagatttgtcttacagtataattatttgtacacatctttataaatgccttaagaacaaaaactgtctcttaatattctgttatgtatagaggttagtaaatacttgatgagaggaaagtcattcattcaaaatggtatttattaagtgcttattatttgctagaaattttagaagataaaaaactaacaaatattcaattcctaatcataagggtttatccaggaatggactattatttggggacctttacaataacatattaaatgctgtgttgggtatgaatgataatggatttttatcttttattgaggacatggtatgtaccacaaaatatactaaatgtttacatgctgctgctgctgcttcattcttctttattcttcttatttttgcattatcttttttttttccgagatggagtcttgctctttcgcccaggctggagtgcagtggtgtgatcgtggctcactacaacctccgcctcccaggttcaagcaattctcctgcctcagcctcctgagtagctgggattacaggcgtgcgccactacagcccgctaatttttttgtatttttagtaaagacggggttttgctgtgttagccaggctggtcttgacctaaggtgatccagccgcctcagtcttccaaagtactgggattacaggcatgagctaccctgcctggccacattattttcttaaaccctcctgacaactcttgtttcagagtttgggattgaggcaaaggataatagtgacttgggattattgcttgtgcaaaggagtaatgatgtgaggagggaataactagcaaggcctagcagagaagtggcataatttttttctgttctaggaaaaacacgttgggcttttggatatgcaaaaaaaacaaatacaaaatattgttatgctaggtacataaaattttgaatttctggacttaccataatgtaaaaaattgtctttgggggcagatctccagagtattacggtgctaacgagtactctggttagggaaggttctgggcttcctgaagaaagccaggtatggaggactcctacatggccatgaaggagagagaagaaagtcagcaaggccctgccagggaagaagcgtggctgctggaatccaaaagcagcggatacttgatgttgggtgttgtgttttcctcgcctgccttcagtcagtttttgttaaaggctacaaaatggtcttagctttgtttgggggaactaaaggaaatatttgaggccacttttctgtggagtcacacagagagaaggggacagttgcctaacaagaggtggcaagcacaaagggcatgcagttgtggaatctgagaatttggggtgggaagtctgatgagaggcagatgagtttcacctgtctttcaagatggtaaagattagttttgaggaggttggctggggtgagaagggttggagaatttgggaacgttaagctcatccctatggagatcagaagaattaaacggactttttttcaaaaaacagcactgggagcttgggggctggacagtgaagcaaggtcagctggggatgcttactctatttaagacaaaaaagttattgtaaagtgatttcatgctgttgggagaagatctgtgatactagaaggtcctaaaggtattttttctctggtgccaaagacaggaattatagtgtgagtgtctagtccgtgtgggtgacaagtcccacgaggctgtgaagtgctttcttcagtcactggatctgcagccctagaatctcgaaatgttgcccattctgtttctttttcttctcttcacttttttttctgacactttacatctttcctcaaactgggtgaaaatttaataatacaaataagtaaaccacaagaaaagagcccgttcaaactgtctacaagagattagaaataattgtaaatgttttcattgctgatgactcagagtaaatccttgttgatagcttagttccccacaaccatgtacatttgggaatgtgctatagtcagacccggccctgattccattcaagactgacctggacaccctttgctgttagtgtagatagacacagactctgagggtcttgcccaagctatgtaaattctttggtggcatggaacatctgagccctaaggatggcagaccttccaggaggttctaaatgctgcctaaaattctgttaagtagggagcttagaaatggggctgtggaacctggaccatggaaaaacagtcattgcatacctgctgagtagaaggtgcacttttagctgcagaaatcctgctttcatgcagtttattataggaatgagaacgtgtaaaaggctctaacagaaggtttcctcccagcctgggaaacatactgagaccctgtttctacaaaaaaacaaaaaattagccaggcatagtggcacaggcctgtagtcccagctactctgcaggctgaggtgggattgcttgagcccaggagttcgaggctgcagtgagcctcaacaattattattgaaattcattcagtaatcattcatttatgaataattaatatggacaagacagaattttattgatttaggtattgtcaacctccagcatggtcgacagagaagaccttgtctctaaaacaaataaactaaaaaaggtttccttctcgccctcttggtcttatccttcagtcccatgactttacatttatttgggttgattactcctaatttctatttccagcccatttctctgctttgaactcctagattcacgtatgtaaacacttgtttgccatcttctcttgaatgactaagacacgtcttaaatataacatgtccaaaatttaacacgtcttcccttataaacctctttctttcagtttctgcaccctctggttgttcagtccaaaaacttcgaattcattcctgactccacttttacacacaaatcgtttttgtcagcccatccttcctgctgtaccttcactatatatatgtagaatccaatgtccactgctggcacgctgggccaagccacgttgtctctcaactagattattccagtagccacttaacttctccctgttttgctttgctcccaccccagtctgttaccaatatagcagtaagaattattcttttaaaacatcacatcaggtcttattcctcctctgctcaaaactctcctattgtggccaggcgtggtagcctcacacctgtaatcccagcactttgggaggccagggtgggaggattacttatgcctaggacttcaaaaccagcctgagcaacatagatagaccccattaaaaaaaaatgccaactctcctattgtttttccatctcagagtaaaaacaccattagctaccagttcactcttcaacctgatatcttcttgtctccatccctctctactctggtcacatgtgctttcttgccttcctttggacacagtagtctttgtacttgctgcctactcaggctgagatggtctccacaggtaaccacatgacttgttcacctcactgagctcttctctgatcataatatttaaaattaccctctacatctgctcagtgttacctgtctacttgcgttacctccacaacacttaagaccattggttagttggatacatacacaaaaagatatctctgtgtttatttaaatttatgtctgtacttctctagaatgaaagatccaggaagatacagaattttgttttgtttgctgctgtatcctcaacacctagaaaaaacagtggcctattttaggtgatggagaaatagatcaaattaatgaataaagattccaaatagtaaatgtaccaagaggagaagcagaagaacctaaaaacagcattatggtttgtcccctaaagggtgtataatacattctatttgattatatatttttttaaagataaaaatagagatatttttaaaaagtaaagtacatttgtttcagtcataaagcagtttttaaattaaatcaaaaattctaaattaggactttcagaaactacttcaaagcacactcttacaggaatgtaacttaaaaaggaaagaaagaaaagttaggtatgtataagcatcatcttagctgaaagccagtgcccatacggaaaatcagtaaaaacaaaaagagatacagagtcttctttttctcctgtgcctcttgtaatggaagagaaatcatctgtacttcaatttgatctttgttcttttgggggggaaggaaagccaagtgtttttaattttctctatatcaatatagacattaattaaagcatcacttggttgcatttgatgagatggcttcttaatttcatttatcagatcctggtaaacttctgaatcataaaaattatatttagcatacagcatccctatttttacaaatctcattctaattatttacaaaattagtaatccttgtattgtttctaatacaggttctttcacttgggtatttcagaaactagtaaaataaaatttcacaaaataagagcactaacaggcagcttcacctttttatgttttctgtcatcatagtcaccattgtttcttaaaagaaagaacactttaacacctaaaaatggaaaagacaattttagaataaaagacagctttattgtccttatttttatcattttaccttggactgcagattgtgctgccactggtctacagtccagaatttgagactggttgacttgtgatatgatgattcacatttaacaagaatggcatattgaatataataaaattgaactaggatgcttagaaaagaatacctagtaaatatagtgatcacaggaggccttagaggacattttcaggttaccaaaataatagttactcaaaaaaatgtttaaggaaaagctaaaattgtttcagaaataagcatagttaagaagttagctttaatattcttttaatatccccatattcttattgcataataagagctaacctttattgaatgtctgttacttgccaagcactgtgttaagcacttcttacatggattagctatttaattctaacaaccctatgaggtagataatattactaatgaaattaatttgatcgtatacattttttccatatgaaataatcaacattatcactgaattttaaatcttgggtaacagtataaatgctatgacagcatcttcataagactactcaaaatgaatgaggattaatatttcaagcaataaaatagtttgctaaccttgattctgtcacaccctggcactattatgtttcacctcttgcatctgttcaggctttcagccttgacaattatgattgaaattcattcagtaatcattcattaatgcataattaatatggacaagacagaattttaggtattgagggattttatgtctgcgtgtgtgtgtgtatacacacacatatatgtttaatatgatggggtttctgttttcaaggagtttactataatctagttggataaggcagcttttcttcatgctcatgaagaaaagctcaccgttctaaggtgaaattatgtgagataaaacatgaaacaagtctgcacatgactgcttaaggcccaaatccaggctgctacccgtttcatatagcccatgatctaagactggtttttgtattttacgaattgtaaaacaaaaaacaacaaagaagaatgtgtgatagagactctatggcccagaatatctaaaatatatccttgctggccacttagaaaaacagttgtctataaaataagtgcagttaggagactgtgtctataaagtgtgtttggtggactggtgtggtctaggaggaccttgtagagaagctagagttaatatgggactgtaattcaaattggcaggaaaaggagcaggatctgcaaagatggatgaggtgtgaattctacagtatatcatgcagattatctaaacactttggttggctgttgttggttatgtttctttgggaaagtttttctgtcgttgattgctcggttttttcttgattcttttgtctccccttgaatgtttaatacttgtactttccccttctataaaatgattacaattcatatcattgttccattcttcatggccttctatgatctgatcttaacctgtctttctaatctggtataccactactgcacacaataacatggaaaaggaaattgtatatgtatgttaaatactggtatttttaaaagaatagttttaataaaaggacaataagacattctttaaaggaagggttagcaaactatttccatagagggcccaatggtaaatatttttggctttgcagccaggtattcagctctgcagttgtatcaggagagctgccatagacatttgtgaatatgtgaatgaatgagtgtagctgtgctccagtgaaactttatttacagaaatcaggtagctgaacacatttggcccacaggccatggtccctgcaataggatatttctaggtacttagaagtactttggtttttttctttcttttttttaagaccgagtctcgatctgtcgcccaagctggagtgcagtggcatgatctcagctcactgcaatctccgcctcctgggttcaagcgattcttgtgcctcctgagtagctgggactacaggcgtgcaccaccacacaccggctaacttttgtatttttagtagagatggggcttcaccatgttggccaggctggtctcaaactcctggcttgatgagatccgcgtgccttggcctcccacagtgctgggattacgggtgtgagccaccgtgcccagcctaagtactttgaatgtcaatagtactggttctctttctaaatatactttttaaaaattatcaaaagagccaggagtggtggctccagctctttgggaggcagaggcaggattattgcttgagcccaggagtttgaaaccagcctgggcaacatagcaagacagcatctctattaaaaaaaaattatcaaaaaataaatgcacataaaaaaatcaacagtacaaaaggggttatagtgaaaagtagatcatccagccatgagctctactgtcttaccctctgtgaggcaactatggctacgagtttcttagataccttttcagagtttactctccatgtataagaacacacacaaatgatcttggtaataacaaacgctgttctgtatcttccttttttcatatgaatacacacatagacatactaccttgttaatacaaatagtagtgtattatacacagttttttatgttaattccttcatttctcagtatgtcttaaagacctatgcctttacctcaggctcagtttttttaatgaattaacagtatttcatttgatatacatgccataatttatttaaactagtaattaaggatatttttagtatttttcaattgctaaccttgtaacactgattgttctatccgcttcatttggggtcattttgtatttcatcatctttgaagaaggagtaaggaaatttttctggccttcctattccccattcctaaattaaaggcaaaaaaacctttgtcagtatcaaggctcaatttctctcacatcctgtttctgggtttctcattctcctgatttaataatcatgggacacttggggaggccgaggcaggtggatcatgaggtcaggagatcgagaccatcctggctaacaaggtgaaaccccgtctctactaaaaatacaaaaaattagccgggcgcggtggcgggcgcctgtagtcccagctactcgggaggctgaggcaggagaatggcgtgaacccgggaagcggagcttgcagtgagccgagattgcgccactgcagtccgcagtccggcctgggcgacagagcgagactccgtctcaaaaaaaaaaaaaaaaaaaaaaaaaataatcatgggagctgagtgggagaagggaataaagaggaattccccgtgatgaaagaggaggaaaggatactcgcattcattatgtgaatagtttgtcaccacccacccactcacttgtgatttattccatacagcaccaccgtggtccagatatatagcaggtgtatcatgtggaagaaagctgttgacttgaattctttctgttgctttcagttgcctagacctggagcagtgttctcttaaggtactggagcctgaaggaagccccagcctgtgtctgctgaagttaatgggtgaaaaaggttgcacagtcacagaattgagtgatttcctgcaggctatggaacacactgaagttcttcagcttctcagccccccaggtaggttttgttcttaggattattctccaggagttcatggagccaaacttagaagaaattatctcttttgaccaggtgaactgtgttaagtatttttggaaaatgtaaatgtgtagtgccttgtttgctttcccaggttgaagcaaatgcaatgcatgaatattggttggattgtggttgaagaaaccagctacatgagacatttttgagatagttggaaaaatttgaatgtaactacatatttgatatattaagtaattatcatatgataatgatactataggagaatgtcctttttttaaaaggagatgcattttaaagtatttagggagaagattcctatgacatacattggaatagtgcagccaaaaaaatgaacatatatttattcctatgtatttatatagatgaagtaaagcaagtatgacaaatgtttaagtttttttttgccgcagtgaggcttttgaatgttgattaactcaaccttgtactcttatgagtttttcctgaattaccgatattggatgaggctttgtacttcccacatcaggcgaggcttaggaaacagtccctcttctccattcagctgctctcctctcagctgcagatagagttggtctacagcagtggtggagggcaggagggacatgccattgaagttgcctggttgtggcagcactgcagacctccttctttacctggggatccagtgggccattatttgtcccacaggaagcaaagaggctggttgagcttggaaaggcaggttgagcttggaaagacaaaggacctgatgcactctattttacgtggttttgatgtataccatttcaatatataaccagcttggttatgatatatttttaagttaacatgaggaacttaaaaccataaatgagatgttattttttattgttagttgtgggatagggaattaggaacacatggtatagtggtatgctgtcagttacatgtaccagaaaccccaacccaaataggcataataaagagaatacatttctccttctaattgaaaagcttagagcaggtttggcttcaagagaatcaaggaacaatcctgttctcaacgcattggttggtttttgtctttgctcttcctttcttggcattggcttccttccatgactgactctccacatagcgcaagacgtctgctggctttttctgggctccttcattcttgccccagcaaaacccagagggttcatctagttaactagcttcggtcaaatgcctagctcttaacctgtcactgtgccaaggagatggaatgtgctgactcgcctggcttgaagccaggagtggagttgggttgagtctgctttcctggaaccacatggatcaccaaacaaaattgaaactattagaaggaaaaaggaagtagcagatactggggaggtaaccaaaaagtttactacaaatggaaagggccctggattataaataaggagacttggactcccaatcatcccctgctttacaaggccctctgtagatggtaaaataggcctctgataaatgccctatgaatttgatacacactgtattggatgcttgctttctatttcccagcgcctcttcctaccaacagggctggggtgggaataactagctgctaatgccaccctcccaaatgcaactgttgtttggcaccaaacagtaaactttcttttttaaacctggcccattactgatagaaacagtagagttcctaaagtggtatttattaatttttatattgctggtgcttgaagtagcacccaagagttgtgacatttgaaatctactagtctaggtttcatactgttaaagtccaagttctcatacctagtaaagtctcatacctagtaaagtctacttttgcttactttactaagttctcatactttattgaataccagggcctctgaaagcttaggaaacctttctgggaagtaaatataacatgtatttcattctctttttcaataattatgcttaattactctaaccgttatttgccaagtctataatatgaacataagtattctctacctcacagagttataggagctgcatgagataatgttgtgttgaatttcatctatacaatgacaggggcctcatatctcttttgatttgtgttgtgatcactggcctgagagctagggtttcggaatttttaagtttcccatatgtgaaaccgggcttgactgaaattgagtcatatatttacttaggtgtaacaatttgcctgaattttaaaaataacacaatattttatatttttatttttgacaggccagcaactaataaagtgccaccctaataaacattagtaatcttcctttgaaaaatccatttttgctctttgtgtttttctccaaataggattagcacttttctatcagtgttccccagtgaagattatcctgatgatatttggcttacagactttctcaagattatctcatagggcttttttgcatttgaggagagaataggaaaggaaagcagtttatttttttctttttgtttttaattttctcttcagtacatttgtgagctgtagggaaatattatttgttttattttgttttttaaattttttgtgataaagggtcttgctctgtctcccaggctggaatgcagtgatatgatctcggctcactgcaacttctgcctccggagcctcaagcaatcctcccgcctcagcctcctgagtagctgggactacaagcacgcaccaccatacccagctaatttttgtatttttggtagatacggggttttgccatgttgcccaggctggtcttgaactcctgggctctaagcagtccacctgccctggcctcccaaagtgctgggattacaggcgggagccaccgccctgtttctgtgttaccacttgtgcactgtttctgtgaagttttatgtcatgttagccgtataatatccttaggaattggttgttgcttgaatgttagttattgatttaacagcaaacattttgagatctaataaagctcagtaattttaggaagaagtaattaatttgttagcttactatctgcatctaatatgcataatctaagatttactcttttttttttttttttttttttttgagatggagttttgctcttcttgcccaggctggagtgcaatgtcatgattttggctcaccgcaacctctgcctcccaggttcaagcgattctcctgcctcagcctcccgagtatctgggattacaggcatgtgccaccacgcccagctaattttgtatttttagtagagatggggtttctccatgttgatcaggctggttttgaacttccgacctcaggtcatccacccacctcggcctcccaaagtgctgggattacaggcgtgagccactgcgcccagccaacttactctatttatagatagtagaataaagaaatataagaattacagagaagaattttaatattttaataaagatattgagaataaaaactattttaattatattaagaagataagctctgatagaatcaacttaattggtggtttgcctcgtgtattcaataaagtttactgtattgcaatgcccttgctgtgctaggcattatgctaggtactgtgagtttagagatgaataaaacaatcgtttccacctgctgataggtcatagtttagtaggggagacaaacatataaaagatcatatccaagacagttgtaaaaaatatatatatatagtaagtttatctgatctccagttttctctctttgctatattcttgagtcttagtgaaaatacaaaatagaaatattctaatgttttctctcttttttgcattggtactatttcataggaggacattacttcttattccacaggaagtctgatgattttcctctgtccttacagagagaagcctggtttgggttatgctgtgaactggcctttgaggtctaaatgcagggagatggggaaactttagatttattttgattaaacgagaaactatagtcttacgttgccatattctgttccaagtgacggtggaacaacagtcagaggtagctctgaaaggtaactgtaactgtcatgtggagtttctctgtcttttgagaaactgaccaagtttcttttctggatttgttttggtgcccagaaatagctagagcagtatccatgcatctctaactagagcagtttctgtgatgaggacccagcttcagcagtcactcagcatgtagtctgagtgtaaactcactctggaattataattttatatattttgtgaaggagcctcagaggatcgaggtttttactctctgttgctttctttcttgtcgagcatttccactgcacatgggttggccaacttgcccctcagtgtggtcttacttgaattatatgatagagaaatcgcttctagtttttatttgtggatggtgttcatcccattttccagcgctagtaaattgtttccctacttttattcctttgctcatctcagtgggaattgtagaagggggttaaatggatgtgttgaaagggttttgaaccaaaggtctgtaatgatttttttttttagatcttatttaagtttcaaagactgattccaaagcaaccaatattgacatctgtatagatagacttagatgtgtagttcaaggtgcttttgtttcttttgttgttgttgttgtttgtttgctttttgagtctcactctgtcacccaggctggagtgcagtggcgcgatcttggctcactgcaacctcatctcccaggttcaagcgattcttctgcctcagtctcctgagtagctgggattacaggcacgcgccaccacacccagctaatttttatatttttagtagcgacgaggtttcaccatgttggccaggctggtctgaaactcctgacctcaggtaatccgtccgcctcggcctcccaaagtactgggattgcaggcatgagccaccacacacagcctatttgtttcttttgttttaagtgaaaacattgtgagtgtagaattataggcttcatcagtcctagttacatacatcacgaaatggttgcctggagaagtgatgcccttaacctggaatgggcagagcagaggctgaacgatgggagctgtttagagagaactagcattgttgatgtggatctcattaagatgaatcccaagttgcttttcagctccagtgctgcaatattgccattttatttcactcttcatatgaaaggtgcctcactgagggtacctatgagatgtctgtggcagggtcatgtgccatcttttcagtggcaccttttccatttgcctctactccttttttatttcatacctttttttctcagatccgttgtaacatacgcattgttatgttttggctatttttattactttatctctaaaataagtgcaaaggttgtttaatgttattctttagtttctaaaatacctttacttcacattttatcttcacaattctgtgaagcgacagaacagtgctattgtgaacatttaaattttaaccaacaaacatttacatggaaaatgagatttccaaaagtgatcatttggccaaagtcacaattattgacaaaggtaggattaaaaaccaggtctgctgaccctgacctgaactcaataccatttccataatgctaggaaatttctgaattaagaaacttagttctgtattattacctcagttgcctctttgacccatggacttcaatttttttcttcttgccaacttaaaaagtgctcaaagactggatcttatttgtaagggacttttcttatttcatgaatatgaggaaattggcaattattcctaaaagaaaaatatcaagaagtgaaaagagaaaaagatggtatggatgtgcatgaggataaggaataagtagagggagagaaagggctggtgagcaaggcctgaaggaatgtctttctggatgtggagtgtggaggggagtctcaggcaatgtaacagaataagggatgtgatgtgggaaactagatttagctataatctatacagatttcaattgacatgtaagagaaacatatgtggacatactttgtgtaatgccgtaggagggacacacatggacctactttggttatatactgggggaaattgttagaggaagaggaatgatatttatttgggcacactgtagggcatgtgggtactcttctgtgatagcatagaagattgcagagtaactttgaggacaagttttagatggaagttgataaaaatctttttttgtttcatggcctctgaaagtagatggacttcagtgtatggaatagatctgtttttggaaaaagtatttattgataaactacatcaacatttaaatgcgtcgtgagagagaataacttcaagggaagctatgtgtccttttgtcaaaaattatcctaatttatctttcttataatttcagcagggttttaaatttttgttttattgcttaatagcatgtacttgtttatcggcatatgtgtgtgtagttgaaagcacgatccttggttccatcgtacctagtcacattctcccaggcttacaggaaatcaagtaacttctctgacttctttgtagatgttatctgaaaaatatgcttgtttaccaggaagctgtgtgttcaccgtttaaaatagaactttcatttgtatgccttcgtacagcctacgtagcactataccatattctttttttacctttgttcagcaccttctcactagtgggtgctgcattggggtggctaagggttgaccatgggtccctgtcgcacaaggctttgtgggaggaaggaaatttgtgtggttaaaacatgggaggtattgcaactcattttcttgactattcaccaggggtggtttccaaatcacattttgcctttcaattctcagtctttgaagcaataaattgtatatatatgttacacacacacacacacacacacacacacgcttattaataaagttgttggtgcaggacaggcttataaactgttaatttagatgtacattaaaagctactttgtcttggccaggcacagtggctcacacgtgtaatcccaacactttgggaggctaatgtaggaggatctcttgaggccagcagttccaggcaacatatgaggccaacctgggcaacataatgaggccctgtttctacaaaaaaaaaaaaaaaaaaaaaaaaaaatactaattttaaaaatcacttagtcttgtgtcccatacaaaggaaggataacttttagaacctggccatatgatccctttccagtagtcacctgcttctttgtaagatactctagaggaaaaaccctttccatccttcttgtctcttatctccttgtataatggcagagaatatttgccatggtatattcatgagccgtgtcctggtgtgggattgctctttgtgtgatacactttctcagtaaggtaggctcactgtggcagaaagcgggattaccgtgggagatatattgagaatcaccaagaggccggtcatggtggctcactcctataatcccagtgctttgggaagctgaggtgaggtggattgcttgagcccaggagctcaagaccagcctgggcaacatggcaaaaccctgcctctacaaaaaatgcaaaaattagccgggtatggtgatgcacacccgtagacccagctattgggggtgctgaggtgggaggatggcttcagcccaggaggttgacactgcagtgagccctgatcatgccactgcactccagcctgggtgacagagtgagaccctgtctcaaaaaaacaaaaagacagaatcactgagaaagcaaaacataaggtttaaaacctttaaaaggcaagaaaacctaggtttgcatcctggttctgccattttacaatgtaaaaaaaaaaaaaaagtctcagagagtttaatttaccccaggtaatttgggtgaccttctgcaaattacgtacctttttttcattgtaacatagatgtaattagtatctaccttgtgtggttatttcaaaggttagtgataaaaatgcctggtgcatgtaaagcagtcagtaacttgctgctgtagtaatttctgttattattatatatattcaacaaacacgtgttgaacacccactaacacccactgcagtgccatatgtgggcacaattctaggtgctgaatgaactggtgactaagaccatcaaggtccttggccttgccctcatggagcttctattttaatacctaagacggacagtaagaaacagggattttagagagtgaaggacactgaactgggtgaatgtaatagataactggggggtgggagggtacctaatttagagacatttcccagagaagctggtgatattttagtaagaaacctggatgatgaggaaagagcctgccatgaaacagtagaatagtggaagccagtggggtggcggttgcgggggatggcaaagcggagcttgtggggagaacccagcagaggactggtaagtggaaaggcagaaaagagcttggcttatagaaggaaggaggcccagtatggctggagcttggtgagcctggagaagagcggaggggccaaaggagcagttcgtggaggactttgtagccatggtaaggaatctggattttttattctaagtacaggcacactttgttttattatgcttcactttattgcactttgcagatacttcactttctgcaagttgaaagcttgcggcacccatgtgtctagcaagtctgtcagtgccatttttccaatagcatgtgcctacttcatatctctgtgtcacaccttggtaactcttacaatatttcgaactttttcattatatctgtcgtggtgatctgtgatcggtgatctttggtgttactactgtgattgttggtgcctggtaagatggtggcatccaggtggcggtcttaagaccagatcagtatggtgttggtggtcttaagaccagatcagtatggtgttggcagatcagtatggtgccgctaggcaggcactgactagctccaggcagctcaaccttgggagcttcggggccccgagaggtggagcctgtgagtggggcatgcactccatgtggaagccagagcctcctcccctggatggagtgtacgagatccctggaccggagcccatcccctctgtgagagagatgtacttcacgcccgggctgccaccgctgatcttcctgccctgggaccctgggtagaaacacccaaaattctgttcaccccgttcacgaccctgggaccctggctcgaagcacccaaagttctgctgctcaagctccattcacgagcagccaccatacaaagaccaggcctgctatgtctttcaccagcgttgccgccttctcaggggtgtcaagcaggccctctggcttaccgaggccaagttaataaaatgccttcctgagaaagtacttggccttgttgatgatacaaggaaccacatagagaaccaagatgagcgtcttctgaatttgatctctcatgcctgtctctggcactgtactgagtacggccccaggagagaggcctgctgtctggtcattgtggacagtctgataaagttgtgtaagtctcagattctcaggcatccttctctggccaggcagatttgtgcccaaaactccacgttatccaccacctggaattgtgtctgttcttcagggtcatggttctagtggagccggctgagtgccaaggatcctctgcccccgccatctcctccagagaagaggttgaagctactaaaaatcatgttctcgaggccttctgtcccctctccccactactgatcttcaggaatgcaatgtttctgatgtgaaagatgacacaggattctgggagggctatccttacccctatctccatatcctgcacttcctggagaaagccgatttgcaaccacatagccttcaaccagatcagctgtgggccaagatgatcctgtttgcttttggcattgccctggctcaggcccagctcctctgtggcaatgacaccaagatctcggagcagcccgtggttgtgcagagtacatgcacagacggacgtgcattccatttcctggtgttacagtagaacaccacagacctggcctcttaacaagtgtggcaagagtttggtctgggtggaatcatgccagctactctctcagcatttttggtgtctcccagtgataaaaaagaaggtgggaccgggcccagtggctcgcacctgtaatcccaacactgggagtctgaggtgggtggatcacgaggtcaggagatcgagaccatcctggctaacgtggtgaaaccccgtctttactaaaaatacaaaaaattagctgggcgtagtggcgggcgcctgtagtcccagctactctactcaggaggctgaggcaggagaatggcatgaacccgggaggcggagcttgccgtgagccgagattgcgccactgcactccagcctgggtgacagagcgagactccgtctcaaaaaaaaaaaacaacaaaaaattagccaggcatggtggcacgtgcctgtaatcccagctactcaggagatggaggcaggagaattgcttgaacctgggagatagaggttgcagtgagccaagatcgcgccactgcactccagtctgggcgacggagcgagactccgtctcaaaaaaaaaaaaaaaaaaaaaaaaagagggtggttgtggaatgcgttgggctgactggtttccagtgggagacatccaggaagtttttagctctgtatttacatggtgctacgtgagccaaggaccattctgaggcccgaaacccacctttgccttctcccactgaagagggcctggggtccccctggagcctcagtgctcatctagcctggtggtctcactgacaataaagagcccttgcattgcaaaggaaaaaaaaactattataattgttttggggtgccacaaattatgccactataagaagttgagcttaattgataaatgtcatgtgtattccaactgctccaccgactggccattcctctctctctctctctctctctctctctcactctctccctccctccctccctccctccctgtccctcttcctctcccacctccccactccctctttgggcctccctattccctgagacacaacaatattgaaattaagctgattaataaccctacaatcgtctctaagtgttcaagtgaaagaacagtgacacacaacaatattgaaattaggctgattaataaccctacagtgatctctaagtgttcaggtgaaaggaagagtcacatgtctctcactttaaatcaaaagctagaattgattttacttaatgaggaaggcatatcaaaagctgagataggctgaaaagctaggcctcttgtgccagttaaccaagttgcgaatgcagaagaaaagttcttgaaggtaattaaaaatgctacttcagtgaacacacgaatgataagaaagcaaaacagccttattgctgagatggagaaagttatagtagtctggatagatcaaaccagccacagcatgcccctaagccaaagcctaatccagagtgaggccctaactcgcctcatttctgtgaagacagagaggtgaggaagctgcggaagaaaagttggttcatgaggtttaaggaaataagctgtctctgtaacataaaagtgcaaagtgaagcagcaagtactagtggagaagctgcagcaagtcatccagaagatctagctaatgccaggcatggtggctcgtaattgatcatggtgtctataatcccaccactctgggaggccagggcaggaggattgcttgagcttaggagtttgataccagcctgggcaacatggtgaaaccccgtctttgcaaaaaatacaaaaaattagccaggcacagtggcacctgcctgtagtcccagccactcgggaggctgaggtgggagaattgcttacacctggaaggcggaggttgcagtgagcgagatcatgacactgcactccagcctaggtaacagagacagaccttgtctcaaaacaaaaaagcaataaaagatctagctaagataattaaagaaaatggctataataaacagatttttcagtgtagatgaaacagccttctattggaagaagatgtcatctagaactttgatagctagagagaagtcagtgcctggctgactcttgttaggggccaatgcagctgacaactttacgttgaagccagtgcccatttaccattctgaaaatcctagggcccttaagaatgatgctaagaaactgcaaagtttttgtcctgagtaaccagatggatggtggtaggcagtaagactggtttaccatctttgagatggggaaactgtggggactggcagaggagtagattttgtgtcagaagggatttgggacatataaaattggtggtggctataggacattcaaatttaaagccaggatagccaaaactcctatattttttagatttattacttgttctcttttgtcattgttgcaactttttcctgtcacatcgaaacttgggaaatcagaatctttgtattttaaagttgtgatgtaaaactctcctggcagatgaatggtaaatgtggggacattaaaatacagtgttatgaatttgctggcttcagcaagagtgcttatcccattttccacctttcctaccaacatgtatcacagatttcagaaaaattctgaacttcatccgtcctgtactaacttggcctcgacataaaggattaatgaatatgaatgtcctcccttggcaagagtttaaaattctgagaggctctactatatttactaaagattttctagggcttctcgaggccctcaaatgtgctaggtatacaataaatatttactcatttttaattttgcttttatttagtatctttgtgctgtgactttcatgaacattattttttttcctagaaagtttagtacctttgatgtattaagattactgttatttacactgtttcctttttacttgtaatcttgttttgtttctttgcattggtgggtggtagaagaaaaagacactgttatgaggtcacattcagtatagacaaggaaagaaaataaaagtaggtgcaggaaattaagttttataagttttaattatctttttctttacttcctaaaagccagctaacccagttttattaattacaacttttgcaaatgtaagcttttctagctttggtttcttttatgtcagttatctattgctgcattaataaattacccccaagtcagaagtgaaaaacaacaactgtttattatctcacacagtttctgaggctagtagtccagaagtggcttagctgggtagtcctggctgagggtctctcgtgaggcagcagtcagactgtcagccaggtctgcagtcatctgaaggtttccccagggttggaggatcttctcagatggctctctcacaggtgttgtcaagagacctcatttcctcactggctgtggcgggagatctgtttctttctgtagagatatggtttggctgtattcccacccaaatcttatcttgaattcccatgtgttgtgggagggacctggtgggaggtaattgaatcatgggggcaggtctttctctgctgttcttgtgatagtgaataagtcttatgagatctgatggttttataaaggggaggttccctgcccgcaccttcttctcgtttgtctgccgccatgtgagacatgcctttcaccttccaccatgattgtgagtcctccctagccacgtagaactgtaagtctattaaacctctttcttttgtaaattgcccagtcgtgggtatgcctttatcaggagtgtgaaacagactaatactcttaccacttgagcctctctgcagggctacctgaatggcctcctgccacagtcatgtgcttccctggggcgagtgagtgagagagaggcaagagaaggagttgggggtgttccattattgactaggattttcttccaaattcctgtcaaaagtcttccaagcttagatgttggcagttattcctcaaatgaggaatgtttgtgtcacaggtatatcaaatatatatctcactgctctgtttctgtgtctttctcttccaaaatcattttcatttcaatactaaataataatgcagtcatttgaagacgttttcaatggtgttgtctttgtccattgcatgcttccataatacagtaccacagactgggtaatttttaaagaacagacatttatttctcacagttttggagcctgggaagtccgtgatcaaagaaccagcttctgatgaaggttttcttgctgtgtcctcacatggcaaaagagagagaacctacctgcaaaccccgttattacagcggcattaattcattcgtgagggtagagcctcccgctaggccctacctcccaacattgttacattggggattcagtttccagcacatgaatttgggggcacatattcagacaatagcagacattgcaacttaacacgtctgttactaacagtgcacgtaacttgactgaagtggcagccatatgagcatttatgaccaaacatttccatgagctaacactgagaactaccctgtggctgtgcctgacaggcatctgttataaggtgcatcctgatttcagaagtgttagaatatgggggaaaaaagcttctagaaattgaagaaatatggtaaataattttctcccccacccaatcatggggaagtacaatagatcaaagtcttctgcaagtaagtttctttcctctgattttacaaaagctgcaactcacaaagtgtaaattgattgagaaggagatgtgaatgagtgatttatgacaaagataaatatgcaagttatttctaaaatgtttcaatttttggtttcagatgtataaacaaggaaaatccctcttgtgactttaattttttttttttttttttttttttttaggaataaagattactgtaaacccagagtcaaaggcagtcttggctggacagtttgtgaaactgtgttgccgggcaactggacatccttttgttcaatatcagtggttcaaaatgaataaagaggtaattttttaaatatatcttttaattcttccaaggagagagaatgatagagaattaattaacattatcgtcctaaatgtagttttaacagtttggtaaaagagtctgatagacattgctaggttattactgaagtagtcaatagtcattattttggtaagacagttccagaattgtctcatgaaaacattgtaaacaataatgaaattagttctccactctaaaaattgtggaaaatagggattacttagggcagcagtgttagcgagtataaaacatcaccagtacattcttgtgtatacaaactcttcacaacagattatgttccaaccaaaatctttaaaagattttcaaggctatatggaaagttaatgtgctattctttttaagaattccacatcactgttttatctgtatcagaagatttaggaccttgtggtagattctgaagtaaaattcagatgggcagaatgggccatttattccttttgtgaaatgattggatccctgcagcacccaacaaataatttaaattcacattttagaattctcttttcttcagagttccttgagccatcttgcactggggatttctcagtgggctggctgcctgcattgtgtcccacttctgtgggcttttatcttcgatccccccatccctctctatcctcctcccacttccacagtaccttgaaagtccatattcttttcactctgttagtcccagtaattcagctttcttccaaacttgatgtcacgtctccctttgcaaatctgaaactaaataaaagctgttctgagaatgacttttcctttaattggattgcctcatactgtaggtgaattctgtggttttatacgattttgtttccgtctgttacacagaggtaagacagagcaactgtggaatgtagtaaaaagattgcatgtagctttggcactagataggtctgtgttggaactctgactgccattattagccatgtgaattcctatcatcagaggttgtgagaattaagtagacaggatgttttacgtgcctaggctcttgaaagattgcacctaaaggtatttttttatcatattttctcaattgcaaagttactttcattttattaaatgccctttgaggagaaatagtggaaaaaccctactacattaagtatatcatttgtaagctatgtcctgattggaaaaaggtagaaatgtaggggatggaaaatgcatcttagagttgaagagttgtaatggattttaaaactcttaagttttgtaaaaccacatgatcataggagtattgtaggagatgtttacttaacaagtgcttgttgagcacctgttttgtgccgggccatgttctaggtgtgatgatacagcactgaccagaaggtctctgccctcaaagagcttacacgccagtggggacagagcaagtactgttaattcctgtgagttaagagctatgaggaaaatcaacagggtggcaacataatatgagaagctactaaggttttaagcaagggaagtaacatggtaggattcgtggggttttttgttgttgttgttgttgttttgttttgtttttttgttttttttttgagatggagtctcgctctgtcgccaggctggagtgcagtggcgcgatcttggctcactgcaacctccacctccccggttcaaacgattaccctgcctcagccttctgagtagctgggattacaggcgcgcatcaccacgcccagctcattttttgtgttttaggagagacggggtttcaccatgttggccagggtggtttcaatctcctgatctcgtgatccgcctgcctcagcctcccaaagtgctgggattacaggcgtgagctgtcgcacccgactaggattcatgtttttaaaacataaacttgcggcttgaaggaagcagagaacagcaaggtgagcagttgtcttaatacctgtgcttgactggaagtagcagtagcgtggagaagagaaggtggatcacagtgcataattcagtgtatattttagagagagtcaactaagctgacagattagatgtagagcatggggagaaggaagagaaatcaaggatgaccccttaggctttccacctgagcatctgagatgtgttatatactgaggtgttgaagattggaaaattaattgacagaagacagattaacggagaaaaagcttatttgtgtgcatgcaagagctttcagaaggagtagcttgctaactggttaagttatgtagctaatttagtagggaaaggcaggggccctgtgagcataatggatgggtttcttcaggaaagacaaaggggagaagaacaagggaagatagcaaagtttgtggtaatgttgttcatgcaggcaccagtggtatctcctcttcattgtgaccgtaaagtccccaaagagagatttatggtacttttactcttggtctgttgcctgggggtaaaagctgccccacgagggaatttatggcagcctcatttcccagaactttctgttttgggtcagataaaggaagactgagaagacttctttctgtatctgttgagtcccagatgtcttcagtttaatataatcttcataccaactcaggggttctgagtgggtctccacagatcttcagcccaagtagcctttgttaagaggatacatcttccattttaacaggagggaacagagcagttataaataagtacagacatggataggtttgtgatttgttggcagaaaaaggaggtaatttctgtctgaagtcagtgcctaagagaactaggattacaggaagtttgaggaaagagtatacatcaatagtctagaaggaaaacacacttaggacgatatagtaggattgtcaggcagttgtaagtgcagcctgtcatcccagttgtcacatcctgagcaaaatactcttgctttggtgtaggtactgaaaggggagagagtagagttcagtaacttggggtttggagagggaggaggtgagcttgttaaagtacaggttgaatatcccttgtctgaaatgcttgagaccagaagtatttcagattttggattttttttaggtgctgaaatatttgcattgtatacttaaaagttcagcatcccaaatctgaaatgttccagtgagcatgatggaggtgctcaaagagttttgaatttgggagtatttcagattttaaatcatcagattaacctgttctttgcaagggagttattgtaatgaggcacttgagtaagccccttggcaatgtgccaaagttgggtgtagctgatcaattgctgggagcagaaaaagcattaataaaagaaaccttactattggaggtggggactgtggatggccatcccgtcttactgtctcattgatatgctttccatagctcttctctgtctagaccttgaaggagattggatattgtttggttaaggagtttatcctcttacagaattttgcagatcagaaggtccggggtctcaaggtgaaataacttgcccacgtcttcccagctaatgtggtcagagctgaaagcaatagccaagcccaattctctgtgttttctctatgccgctgtggtgtttgtatgttgtatggctgctaaactcataaatgttgcagttgtagattctttcaatactcagtgattgatctcttaaatgccagagcaaatagttttctgttagtgagcctttggaagatgtttgggggccagcttaactctctggtttatggatttgtaaaagactggatttttaatacttcagtcctaaataactcaaagcgttactgtttttaactcagaaatgttttagaacttgggggaaaaatgttgcactttcaaagcttcatactgaaatcatagattttgtacagcatattttataaggtgtgtttttgatgagtcatccacttctcttattgattctttcacagattccaaatggaaatacatcagagcttatttttaatgcagtgcatgtaaaagatgcaggcttttatgtctgtcgagttaataacaatttcacctttgaattcagccagtggtcacagctggatgtttgcgacatcccagagagctt

SEQ ID NO: 12793 - DNA, 565 bp, Homo sapiens
agaggacttaaaatgcaaaagaaagggatgtggacactgctctgggagacctaaggaaggctgggaagaagcgcaggcgaggtgatgaatgcagagggtggggtgcaggaattcatgaacattttgcaagttgcctagacctggagcagtgttctcttaaggtactggagcctgaaggaagccccagcctgtgtctgctgaagttaatgggtgaaaaaggttgcacagtcacagaattgagtgatttcctgcaggctatggaacacactgaagttcttcagcttctcagccccccaggaataaagattactgtaaacccagagtcaaaggcagtcttggctggacagtttgtgaaactgtgttgccgggcaactggacatccttttgttcaatatcagtggttcaaaatgaataaagagattccaaatggaaatacatcagagcttatttttaatgcagtgcatgtaaaagatgcaggcttttatgtctgtcgagttaataacaatttcacctttgaattcagccagtggtcacagctggatgtttgcgacatcccagagagctt

SEQ ID NO: 12794 - DNA, 2185 bp, Homo sapiens
tgcctagacctggagcagtgttctcttaaggtactggagcctgaaggaagccccagcctgtgtctgctgaagttaatgggtgaaaaaggttgcacagtcacagaattgagtgatttcctgcaggctatggaacacactgaagttcttcagcttctcagccccccaggaataaagattactgtaaacccagagtcaaaggcagtcttggctggacagtttgtgaaactgtgttgccgggcaactggacatccttttgttcaatatcagtggttcaaaatgaataaagagattccaaatggaaatacatcagagcttatttttaatgcagtgcatgtaaaagatgcaggcttttatgtctgtcgagttaataacaatttcacctttgaattcagccagtggtcacagctggatgtttgcgacatcccagagagcttccagagtgccttatgtggatttggaacaccaaggaacctactggtgtcatgtatataatgatcgagacagtcaagatagcaagaaggtagaaatcatcataggaagaacagatgaggcagtggagtgcactgaagatgaattaaataatcttggtcatcctgataataaagagcaaacaactgaccagcctttggttcacctgtcacccaggaactgttttacaagtagattggacagcgaaggacaaggttgcccttttgataggaaatatgaattaccgggagcaccccaagctcaaagctcctttggtggatgtgtacgaattgactaacttactgagacagctggacttcaaagtggtttcactgttggatcttactgaatatgagatgcgtaatgctgtggatgagtttttactccttttagacaagggagtatatgggttattatattatgcaggacatggttatgaaaattttgggaacagcttcatggtccccgttgatgctccaaatccatataggtctgaaaattgtctgtgtgtacaaaatatactgaaattgatgcaagaaaaagaaactggacttaatgtgttcttattggatatgtgtaggaaaagaaatgactacgatgataccattccaatcttggatgcactaaaagtcaccgccaatattgtgtttggatatgccacgtgtcaaggagcagaagcttttgaaatccagcattctggattggcaaatggaatctttatgaaatttttaaaagacagattattagaagataagaaaatcactgtgttactggatgaagttgcagaagatatgggtaagtgtcaccttaccaaaggcaaacaggctctagagattcgaagtagtttatctgagaagagagcacttactgatccaatacagggaacagaatattctgctgaatctcttgtgcggaatctacagtgggccaaggctcatgaacttccagaaagtatgtgtcttaagtttgactgtggtgttcagattcaattaggatttgcagctgagttttccaatgtcatgatcatctatacaagtatagtttacaaaccaccggagataataatgtgtgatgcctacgttactgattttccacttgatctagatattgatccaaaagatgcaaataaaggcacacctgaagaaactggcagctacttggtatcaaaggatcttcccaagcattgcctctataccagactcagttcactgcaaaaattaaaggaacatctagtcttcacagtatgtttatcatatcagtactcaggattggaagatactgtagaggacaagcaggaagtgaatgttgggaaacctctcattgctaaattagacatgcatcgaggtttgggaaggaagacttgctttcaaacttgtcttatgtctaatggtccttaccagagttctgcagccacctcaggaggagcagggcattatcactcattgcaagacccattccatggtgtttaccattcacatcctggtaatccaagtaatgttacaccagcagatagctgtcattgcagccggactccagatgcatttatttcaagtttcgctcaccatgcttcatgtcattttagtagaagtaatgtgccagtagagacaactgatgaaataccatttagtttctctgacaggctcagaatttctgaaaaatgacctccttgtttttgaaagttagcataattttagatgcctgtgaaatagtactgcac

SEQ ID NO: 12795 - DNA, 2277 bp, Homo sapiens
gggaaattttatttttatttttaacctagagattttattttttcttttaatttaaggaagtgttgatggcgtctctgaatccaagttgcaaatctgtgttgaaccaacttcccaaaagctgatgccaggcagcacattggttttacagtgtgttgctgttggaagccctattcctcactaccagtggttcaaaaatgaattaccattaacacatgagaccaaaaagctatacatggtaggaagttgattttggggtcttttgggggagttaacatgtaaaacaaatggtacaattgaaatataaggtgaacattaaaactcatatcctttcagatgttttaatgttttcagtatttttatttaaagtcccttatgatttcatattaactagctcttatatttgctaaagtgctagaattcaactcaggcttatatgtaaaatgtcaaatagtattgcatgaaactcagcactgttggaatcattacaacatttacttgctggtatttaacctgatgaatggagctaatgtaacaaatgtctaaagccttctaagatgttatgttttggagcgtatttttaaaacacaaaatgattttttctccaagccattaaaatagaagaggaagcatttacatgttctaatattgatataggtgccttatgtggatttggaacaccaaggaacctactggtgtcatgtatataatgatcgagacagtcaagatagcaagaaggtagaaatcatcataggaagaacagatgaggcagtggagtgcactgaagatgaattaaataatcttggtcatcctgataataaagagcaaacaactgaccagcctttggttcacctgtcacccaggaactgttttacaagtagattggacagcgaaggacaaggttgcccttttgataggaaatatgaattaccgggagcaccccaagctcaaagctcctttggtggatgtgtacgaattgactaacttactgagacagctggacttcaaagtggtttcactgttggatcttactgaatatgagatgcgtaatgctgtggatgagtttttactccttttagacaagggagtatatgggttattatattatgcaggacatggttatgaaaattttgggaacagcttcatggtccccgttgatgctccaaatccatataggtctgaaaattgtctgtgtgtacaaaatatactgaaattgatgcaagaaaaagaaactggacttaatgtgttcttattggatatgtgtaggaaaaggagcaggggtcttaactctgtcacccaggctggagtgcagaggcgccatcatagctcactgctcctgggctcaagcgatcctcctgcctcagccttctgagtcgctgggattacaggtgtcaaggagcagaagcttttgaaatccagcattctggattggcaaatggaatctttatgaaatttttaaaagacagattattagaagataagaaaatcactgtgttactggatgaagttgcagaagatatgggtaagtgtcaccttaccaaaggcaaacaggctctagagattcgaagtagtttatctgagaagagagcacttactgatccaatacagggaacagaatattctgctgaatctcttgtgcggaatctacagtgggccaaggctcatgaacttccagaaagtatgtgtcttaagtttgactgtggtgttcagattcaattaggatttgcagctgagttttccaatgtcatgatcatctatacaagtatagtttacaaaccaccggagataataatgtgtgatgcctacgttactgattttccacttgatctagatattgatccaaaagatgcaaataaaggcacacctgaagaaactggcagctacttggtatcaaaggatcttcccaagcattgcctctataccagactcagttcactgcaaaaattaaaggaacatctagtcttcacagtatgtttatcatatcagtactcaggattggaagatactgtagaggacaagcaggaagtgaatgttgggaaacctctcattgctaaattagacatgcatcgaggtttgggaaggaagacttgctttcaaacttgtcttatgtctaatggtccttaccagagttctgcagccacctcaggaggagcagggcattatcactcattgcaagacccattccatggtgtttaccattcacatcctggtaatccaagtaatgttacaccagcagatagctgtcattgcagccggactccagatgcatttatttcaagt

SEQ ID NO: 12796 - DNA, 2374 bp, Homo sapiens
ctcagccccccaggaataaagattactgtaaacccagagtcaaaggcagtcttggctggacagtttgtgaaactgtgttgccgggcaactggacatccttttgttcaatatcagtggttcaaaatgaataaagagattccaaatggaaatacatcagagcttatttttaatgcagtgcatgtaaaagatgcaggcttttatgtctgtcgagttaataacaatttcacctttgaattcagccagtggtcacagctggatgtttgcgacatcccagagagcttccagagaagtgttgatggcgtctctgaatccaagttgcaaatctgtgttgaaccaacttcccaaaagctgatgccaggcagcacattggttttacagtgtgttgctgttggaagccctattcctcactaccagtggttcaaaaatgaattaccattaacacatgagaccaaaaagctatacatggtgccttatgtggatttggaacaccaaggaacctactggtgtcatgtatataatgatcgagacagtcaagatagcaagaaggtagaaatcatcatagatgaattaaataatcttggtcatcctgataataaagagcaaacaactgaccagcctttggcgaaggacaaggttgcccttttgataggaaatatgaattaccgggagcaccccaagctcaaagctcctttggtggatgtgtacgaattgactaacttactgagacagctggacttcaaagtggtttcactgttggatcttactgaatatgagatgcgtaatgctgtggatgagtttttactccttttagacaagggagtatatgggttattatattatgcaggacatggttatgaaaattttgggaacagcttcatggtccccgttgatgctccaaatccatataggtctgaaaattgtctgtgtgtacaaaatatactgaaattgatgcaagaaaaagaaactggacttaatgtgttcttattggatatgtgtaggaaaagaaatgactacgatgataccattccaatcttggatgcactaaaagtcaccgccaatattgtgtttggatatgccacgtaagaacatttgatgtttacgttgaagtttcctttattgtttgatgtctttttgtttttgctttttaggagcaggggtcttaactctgtcacccaggctggagtgcagaggcgccatcatagctcactgctcctgggctcaagcgatcctcctgcctcagccttctgagtcgctgggattacaggtgtcaaggagcagaagcttttgaaatccagcattctggattggcaaatggaatctttatgaaatttttaaaagacagattattagaagataagaaaatcactgtgttactggatgaagttgcagaagatatgggtaagtgtcaccttaccaaaggcaaacaggctctagagattcgaagtagtttatctgagaagagagcacttactgatccaatacagggaacagaatattctgctgaatctcttgtgcggaatctacagtgggccaaggctcatgaacttccagaaagtatgtgtcttaagtttgactgtggtgttcagattcaattaggatttgcagctgagttttccaatgtcatgatcatctatacaagtatagtttacaaaccaccggagataataatgtgtgatgcctacgttactgattttccacttgatctagatattgatccaaaagatgcaaataaaggcacacctgaagaaactggcagctacttggtatcaaaggatcttcccaagcattgcctctataccagactcagttcactgcaaaaattaaaggaacatctagtcttcacagtatgtttatcatatcagtactcaggattggaagatactgtagaggacaagcaggaagtgaatgttgggaaacctctcattgctaaattagacatgcatcgaggtttgggaaggaagacttgctttcaaacttgtcttatgtctaatggtccttaccagagttctgcagccacctcaggaggagcagggcattatcactcattgcaagacccattccatggtgtttaccattcacatcctggtaatccaagtaatgttacaccagcagatagctgtcattgcagccggactccagatgcatttatttcaagtttcgctcaccatgcttcatgtcattttagtagaagtaatgtgccagtagagacaactgatgaaataccatttagtttctctgacaggctcagaatttctgaaaaatgacctccttgtttttgaaagttagcataattttagatgcctgtgaaatagtactgcacttacataaagtgagacattgtgaaaaggcaaatttgtatatgtagagaaagaat

SEQ ID NO: 12797 - DNA, 9289 bp, Homo sapiens
aaacctgtctaattggggcggggagcggagcttcctcctctgagggccgtgccgcgctgccagatttgttcttccgcccctgcctccgcggctcggaggcgagcggaaggtgccccggggccgaggcccgtgacggggcgggcgggagccccggcagtccggggtcgccggcgagggccatgtcgctgttgggggacccgctacaggccctgccgccctcggccgcccccacggggccgctgctcgcccctccggccggcgcgaccctcaaccgcctgcgggagccgctgctgcggaggctcagcgagctcctggatcaggcgcccgagggccggggctggaggagactggcggagctggcggggagtcgcgggcgcctccgcctcagttgcctagacctggagcagtgttctcttaaggtactggagcctgaaggaagccccagcctgtgtctgctgaagttaatgggtgaaaaaggttgcacagtcacagaattgagtgatttcctgcaggctatggaacacactgaagttcttcagcttctcagccccccaggaataaagattactgtaaacccagagtcaaaggcagtcttggctggacagtttgtgaaactgtgttgccgggcaactggacatccttttgttcaatatcagtggttcaaaatgaataaagagattccaaatggaaatacatcagagcttatttttaatgcagtgcatgtaaaagatgcaggcttttatgtctgtcgagttaataacaatttcacctttgaattcagccagtggtcacagctggatgtttgcgacatcccagagagcttccagagaagtgttgatggcgtctctgaatccaagttgcaaatctgtgttgaaccaacttcccaaaagctgatgccaggcagcacattggttttacagtgtgttgctgttggaagccctattcctcactaccagtggttcaaaaatgaattaccattaacacatgagaccaaaaagctatacatggtgccttatgtggatttggaacaccaaggaacctactggtgtcatgtatataatgatcgagacagtcaagatagcaagaaggtagaaatcatcataggaagaacagatgaggcagtggagtgcactgaagatgaattaaataatcttggtcatcctgataataaagagcaaacaactgaccagcctttggcgaaggacaaggttgcccttttgataggaaatatgaattaccgggagcaccccaagctcaaagctcctttggtggatgtgtacgaattgactaacttactgagacagctggacttcaaagtggtttcactgttggatcttactgaatatgagatgcgtaatgctgtggatgagtttttactccttttagacaagggagtatatgggttattatattatgcaggacatggttatgaaaattttgggaacagcttcatggtccccgttgatgctccaaatccatataggtctgaaaattgtctgtgtgtacaaaatatactgaaattgatgcaagaaaaagaaactggacttaatgtgttcttattggatatgtgtaggaaaagaaatgactacgatgataccattccaatcttggatgcactaaaagtcaccgccaatattgtgtttggatatgccacgtgtcaaggagcagaagcttttgaaatccagcattctggattggcaaatggaatctttatgaaatttttaaaagacagattattagaagataagaaaatcactgtgttactggatgaagttgcagaagatatgggtaagtgtcaccttaccaaaggcaaacaggctctagagattcgaagtagtttatctgagaagagagcacttactgatccaatacagggaacagaatattctgctgaatctcttgtgcggaatctacagtgggccaaggctcatgaacttccagaaagtatgtgtcttaagtttgactgtggtgttcagattcaattaggatttgcagctgagttttccaatgtcatgatcatctatacaagtatagtttacaaaccaccggagataataatgtgtgatgcctacgttactgattttccacttgatctagatattgatccaaaagatgcaaataaaggcacacctgaagaaactggcagctacttggtatcaaaggatcttcccaagcattgcctctataccagactcagttcactgcaaaaattaaaggaacatctagtcttcacagtatgtttatcatatcagtactcaggattggaagatactgtagaggacaagcaggaagtgaatgttgggaaacctctcattgctaaattagacatgcatcgaggtttgggaaggaagacttgctttcaaacttgtcttatgtctaatggtccttaccagagttctgcagccacctcaggaggagcagggcattatcactcattgcaagacccattccatggtgtttaccattcacatcctggtaatccaagtaatgttacaccagcagatagctgtcattgcagccggactccagatgcatttatttcaagtttcgctcaccatgcttcatgtcattttagtagaagtaatgtgccagtagagacaactgatgaaataccatttagtttctctgacaggctcagaatttctgaaaaatgacctccttgtttttgaaagttagcataattttagatgcctgtgaaatagtactgcacttacataaagtgagacattgtgaaaaggcaaatttgtatatgtagagaaagaatagtagtaactgtttcatagcaaacttcaggactttgagatgttgaaattacattatttaattacagacttcctctttctaagattttgtgaattggttgaatagttctatacaaatgaagtatggaggtgtgtatgtttatatgtatataacaaaatattttcattgtgaccactctgaagtaagagcaatgggaatggcattattgtagaataagtcattgtatttttaacaccagaaagaaccttgccgatcaccaggcataacctaattttatccatggaagaaacacagaaaggcatctaagttagagctggcaccagaactgagacctccagaaatctattccagtattttttccactacacaactgccttcctgacaggttctgagataagtgttatgtttgtagatagagtgaaatatatttatatatatataaatatatacagatacatatctgtgtattatctcaaggaatgtacaaactttagtttttgattataaggacttcactgcaagttttagttaagaggtttgtatataaatctgttatagaacaggctgaaatttcttgttcataagattatgaaaccacatgagaagtgataaaatgtttgttaaagctagatagaggttaagaatcaagatataatggataattttcatagctgcctatcagaatttcccaaatatttagcatcttccttgataatatgtattttcttcttgaatttcactggcctaatgagataatactcttatctttggctctacctaaaagttggttaaaaatgcaattggcattaacaaggaaaaatactgaattagtaattttaaaagtctcacaaagaaaatcccaggcctagatggctgcattgttgaattctgccaaacattaaaattagcactaattttttgcacactgtttctaaaagtaggagaggaaagaacacttcccaacttactctaggtcagtattaccctgatactagactagacatcacaagaaaactataagccaatattccttattaatacaaacacaaaaatcattaacaaaaatattagcaaactgaatccagcaacctataaaaaggattctatatcatgaccaagtggaatttatcccaggaattcaaggttggttcaacatctaaaaatcaaataagctaatatacagtcagttctcattattcacagtaattatgttctacagaatattctcccataaacactgaattaaatatggaacaactgcttttaggagaaagtgtatttgtgtatatgtgtgtatacatatgtttatctcacacacattatgagcttgaattcttaattcatcctagcaaattctaccttattttacagaagtgaaagtgaggtatcagaagtgttaagtgacatgcctgaggcacccccctaacaggtgtcagagctgaaattcaaaccccatccagctggccccggagccagagcttcttgtactacacagaattgcccctgccatttccaccctccagtcatttctctatgagactgaagcaggaaggcagagcatcatcttgttcagcctcagctgggaacatgtgtactgggtgactcaaatttttcacccatttacacatatccacaaatgactgcaaaagtgccacggatatcaatttgagggttataaattttagcaagttggtaaattcacaaatacataaccttgaataatgaggatcaactgtaccatatttaataaagcacaaaacccacacagattgtcttattacagcatttgataaaatccaaaactctttcataaaaacactcaacaaacttaggaataaaaggaatcttcctagatatgataaatataacatctatgaaaagcccacacctaacattatacttcatggtgatagactgaaggctgaatgttttccccttaagattgggaagaaggacaaggatgttcactcggcactacttctattcagcattgtacttgaagttctagccacagcagttaggttaggaattcaaggtttgttcaacatctaaaaatcaaataagctaataaagaaaagaggtttatactgcaaaagaagtgaaactatatgtattcacagttgatacatagttgtatatagaaaatgctaaagaatccataaaaagtaataaatgagttcaacaggttgcaggatacaagatcagttttatttctctactaacagcaaacattctgaaaatgagaataaagaaatcctatatacagtagcatcaagaataaaactccaacacgtttaaagaaattaagatccagataaatggaaagacatccatgttcatggattggaagactgaatattggtaagatggcaatgctgcccaaattagtctacatattcaacaattcctatcaaaatcctagctgtattttttgcagaaattgacaaactggtaaaattggtagggaaacgcaggggacccagaatagccaaaaaaccttggaaaagaacaaagttggaagacgtaccaatttcaaaaagtgctaccaagctacaataagacagtgtaggcatatggatagacatatcgatcagaggaatggaactgaacatccagaaataaacccatacatttctggtcaacttgttttcaacaaggatgccaataccatcaatagagaaggagtggtcttttcaacaaacggtgctgggacaactaactggtagctacgtgcacagcaaaaggatccctaccttcctaccacattacaaattctaactcaaaatggatcatagacctcaatataagagtttaaactcttagaagaaaacagaagtaaatctttgtgatgttgggcttaggaatggtttcttagacataataccaaaagcacaagcaacaaaggcaaacagtagataaatgggacttcatcaaaattaactttagcgccttaaaggacaccattaagaaagtgaagttaaccctcagaatgggagaaaaatttttgaaaaatcatgtatctgataaaaaaacaaacaaacatgcaggtgctcagctgtggttaccaccgagcagcactgtccagtgaacttgctgtgatgatgggatgcttggtatccgcactcccagtgtgatagcctttagcctcatggggttgttgagcagttgaaataatagctagtgtgaggaactgaacataaaattttagttttaggatgggtgtggtggctcacgcctataatctcagcactttgggaggccaatgaaggcggatcacttgagcccaggagttcaagaccagcttgaccaagatggcaaaaccctgtctctattaaaaatacaaaaaaattagctgggcatggtggcacacacctgtaatcccagctactagggaggctgaggcaggagaatcgtacttcccctttatactcttctgtatatttgatttttttttttttaagacagagtcctggctctgtcgcccaggctggagtgcagcgacatagtctcagctcactgcagcatccgtggaggctgaaacaggagaatcgcatgaattttttaaaaaatctaaacatgtaattttaaaacgggcttaagaagaatgataacagttttggtcttcttttttatcaaccatgcttttattttacttgaatctcgtgccaattgctttgtaatattaaagtaggatttacacaagtggaatttagaaaagatgataatctatcaaatctgtcaataccaattagaatgtaataaagaaattaggatagtggaggtttgagcaagtaaaggctcacccaaattcaaagccaatacttgatgctgagaggggatattttctggaaggtaatttttaaaaattaaagtcacaattataaattgtatatttcctaataaaagaaatctcaactcatgggacaatttgaatttaaaacactattgttcctcattcagtgatgaacaagtcaaaacgtttcagaaaagaaagcctttaaagaagaatcctggcacagaaaaggtccatttagacattgccttcttcccccatctctaatgcctcttttcaaatctctgacttgcacatgaagtaacagtgaggtgtcctgtgcagcagtcgcaattttttgacttgtcaaattgaagaaattcaattatgtagccagagcttagatcactgacatgtatactggcataagcttttttttgtttgtttttaattttattagaagtgggatctcattttgttgcccatgctggtctcaaacacctgtcttcaagtgatcctcctgcctcagcagcatcagtttaatatctagataaaatctgatgtatgtaattttacttttaagggtttttttccaaacagacgtcctgacaatgttgtttcctattccttgaacattcacctgacgcttatatactgtcattacttttatctgtcaactgatgtcagctactcaatttacacattacttttgtgcatttcatcctgtttctcagtttgacattgtcattcaaattcagagtttgacactgaaaccctgggcatggtggctcacacctgtaatcccagcacttcgggagactgcggtaagcagatcatttgaacccaggagtttgagactagccttggcaacatggtgaaaccccatctctaccaaaaaaaaaaaaaaaaaaaaagcaaaaacaaaaattaactgggcatagttgcacacacctgtagtcccagctactcaggaggctgaagtgggacgatcgcttgagcccagaaggcagaggttacggtgagtagagattgtgccactgcactccagcctggacgacagggcaagacgctgtctcaaaaataaaatattagtaaagaagagtacaatcagaatatgaaaatgtgtaaatgtgcatattctctttttttctaatttggtagcattaaaaatacttaagcatcaaagtttggctttatgaagaaggagtctgagacacctcaggtttcagcccttactaatagcgtggctcaaagagcgttaacttgcctgtgcttctgtttccttatctgtaaaatggggatgatgctgtaacatcaaagagcttataatactttccagagctggcagtactaaataagaccattcctctaaagtgccagcattttgaaaagcatcaacccatcaaccttgtgctttaaatctggcattcttaaagctatacctgtaggcagtatagagtgtttttttttatttgtttttttgttgttgtcttttgagtctcactctgtctcccaggctgtagtgcagtggcacgtcttggttcgccgcaacctccgcctcccaggttcaagcgattctcgtgcctcagccccccgcatagctggcattacaggcacacaccaccacgcccagctaatttttgtagttttagtagtatctactaaaataaacagggtttcaccatgttggccaggctggtctcaaactcctgacctcaagtgatctgcctgcctcggcctcccaaagtgctgggattacaggcgtgagtcaccatgcccggccggcagtgtatatcttctaaagttgcaatttttgttcactccagaatcacttttcaaaaagcatgcagatttaatgccaccagtttgtgttatgtatctatcccgcaaaacagctctaaaggtgatttactaaaagattaacagcatttatctctggtgggataatttttctttgcttgtttacctgtgtcttgcagattttacacagtgaacaatgactgtataattttaaaatacagatatgcacaattgtgtaatgtaaatatgctcagcttcaatacatttaagaacacatttttaacttttcgtaaggagtcttcagtttaaaagtacagtgtcattacagagtgcttattctgttacaaaattagtaaagctgattctgcctctaaatctgaagtaattcccactttttttcatgcttgagtttagttgataaatagcattttagatactaaaaatgattggatgagtatttctacattaataagttgctaattaggcaccagggtagcagatagaatgcctttctgtgtgctaggtttaaacattttacacacagtcttatttaaaacagccttgcagtttatagatgaactgattgttaggctaaccagaggtgttactataccctccaggataacccagctagtaagggcagagccaggatgattcagacccagaccagagccgggtgttttgtccacagtactgctgctgcttataccgtaacgggaaaagtacacaacagtgtcttaatatttcattcttccatgaaaaacacttttaaaatattgaaacattataggagcagaagtacatctctaaatatacttttaggtcacattgaaaacatttccaaaggatttgacctgaagttaatgttgctacattatgctcaatacagcaggctgttctgctagggaaattgttaatattttaaaaatattttcctaagctttagctttacca

SEQ ID NO: 12798 - DNA, 8428 bp, Homo sapiens
ccccgttgatgctccaaatccatataggtctgaaaattgtctgtgtgtacaaaatatactgaaattgatgcaagaaaaagaaactggacttaatgtgttcttattggatatgtgtaggaaaaggtaagttttctaatctttattaaagaattgttggagttaaatatcgaccatgacaaactagagaaacctgtgaaatgctaaaagccatttgcgtttgtgaattttagtttatacattgaaactggaagaacaaaactagaggaaaatacatttactccatgtatatctaattattttaactcttcatatttgctatagaacacaaatgaagaactaaagggcatgggcatttactcacactacaggggattcaactctccagaatgcctttagatgactttaataatcactatagttattccctcaggaattaacaaaaccaacacccatggagttgggatctctgctcactagtcagtcctggtcttccagacatggaatgagtagccgaagcagatgtttggaggtttggatcccatttgtctgccattgcctttctaaggagtagaaccaatgactgttcctctagatttactatttttttgcttgctcagcatttaccaatcaaaatccaatgccagagttcaaatgcaactctagttttaaagctaacaaggagttagtgggttattttgggtagatatgtagctacctagatgaaaaattttgaatctataattttaaattatgtattctaaaaaactgttgtattttctcattatttatacccttttaagaatgctctttaacttttcatatttctatctgccctcctccgcctcccttaaatagaaatgactacgatgataccattccaatcttggatgcactaaaagtcaccgccaatattgtgtttggatatgccacgtaagaacatttgatgtttacgttgaagtttcctttattgtttgatgtctttttgtttttgctttttaggagcaggggtcttaactctgtcacccaggctggagtgcagaggcgccatcatagctcactgctcctgggctcaagcgatcctcctgcctcagccttctgagtcgctgggattacaggcatgtgccactgtgcctggcccctgagggttttttgattatagattagaggcctagaaaatacctatagacatgtaggcataaatttacctccttgatattctgcgtagaaaattttaaatgatcgactttagcattccatatcatggtatcttaattattaagcccaaattgggcatgtaattcctgcttaaagattaactctttaattatcaatgtcatgtgagaggcagaagagaaaatgaagcttattggtgtatacagaagtcccatgtggcaagtgtttgcttttctaacattttctttttaaaaaattatttttattggatattgacaagttataattgtatgtatttatgggatacaaagatatgctatgatgtacgtattcaatgtggaatgattgaatcaagataattcacatatcacctcaaatacttatcttttttcctaactgaaacattgtaccctgtgactaacagtccccacgctgtccccacccccccccagcctctggtaaccaccattctgctgggtgcttctctgagttcatttttattagcatccacatataagtgagaacatacagtatttgcctttctgtgcctggcttaacttctttttctatttttaaggtgtcaaggagcagaagcttttgaaatccagcattctggattggcaaatggaatctttatgaaatttttaaaagacagattattagaagataagaaaatcactgtgttactggatgaagttgcagaaggtaaaataaaaaataaagagaaaagtactcagaaaaaggagagcaggggagacacacctattcagggttccctctctggtgattgttttattcttattatgtgggtttggaattagtacctactttataaaacaatttttatattaatataacgttcagcaacacttctgctatttaatgtcatctttccttcccttttgacctagctctccaccatctgtgcagcattactcagactacaaggctaagcctcggcacagtcattaataaagttgaattctcagagctctactttgcttctatgcccagtgccttggtactggcaaatctccctatttgagggtgggtgggtggcatggaggggtggtggggaattgtccagtgagcagtctctcccaggatgggagagagaaaactttacagaaatttttagacactgctgggaaaagctgagttcatttttttccctgatgaacttagtagtttttaaatcctgatttaaggatgtgatcctagggggtctaatgccacatcttccatttctatctgttctccctgcctgctggtataatgctgtgcatatgtcagatgctgaacaagtacctattatttcagtagattgcactgtgttttttgaaaaaacattttataagccatagcaaaaagaaggtaacttggccaggtatggtggctcaagcctgtaatcccagcactttgggaagctgaggcaggaggatcacttaaggccaagagttcaagaccagcctaggcaacatagcgagaccctgtcttcaaaataaaaaataaaaataaaaaagaagaaattattttacaaactagcaccactagaaaatggagtttcatggatgttccagtgatggcagtttgggtataaggtgtttgaccaactgtcagccatatttattttcatgtttttatctgtgtagctattttagatcacttgacttagccacttttccatttaacataaccagccagggctttggacttcctgccaccctcccgcttcatccagagaagttccacttttatttgttttctacattaggcttcttctgaagcttacatttgaaggaaaggctctgctgctttaaaaaaaaaaaaagaaagaaagaaaacctttggattatgtcagttatattcaaactgagatccagtaaggtgctccagaaactctacagtgttttatttcaatttcgtttttaagtccattttaactattttaaaacttaataaaaagcaccatgctcactcacatatgatatttaccaaattgtcatagcaatgaatggcatcccgatatgtgctgtgaggatatttgaacttcttataaacatcttagacagttttgcttttcgctgatctttttcagtcctaccatgtctgcttaaccagaattgcccaggcaggaagaccctgtagtgtacatggagcacactcagctcagtgccgtgcacattgtgcccttcgtgggtaacggcccactcattgtacaaaataagtaaaggcctaatagtatcatgataaataatacagttaaatctagcccttattttgagttttggatgctttgtgtctgacccctgtcttagtagtaaagagcaaaagtagttgtatgaaatttttcacaagtcatccaattttgaaacaaaactttgctgtttctccctttggatcttccagattacttaattgaaactcattccatggctgggcatggtggctcacacctgtaatcccagcactttgggaggctgaggtaggaggattgcttgagcccaggaattcaagaccagtctgggcaacacagcaagaccccatctcaatttaaaaaaaaaattatttggggccaggtacagtggctcatgcctgtaatcccagcatttggggaggctgaggcaggagaatcacttgaacacagaagtttgagaccaacctaggcaacattgtcagaccccccatctctataaaaatttaaaaaattagccaggcattatggtgtgcacctgcagtgccagctactcgcgagacttaggtgggaggattgctcgagcctggcagtttgagactgtagtaagtatgaccacaccactgctctccagcatgtgtgacagagcaagccccatctcaaaaaaaaaaaaaaagaaaattccagagggagaaaagtattcacagattataagccaagcagttgaaggggaaaataaacatgttaccaatttctttttttaattttttggtttctttgtgtgagactacagagtctctgtcgcgcaggctagagtgcagtggcatgatcttggcttactgcaacgtccacctcccaggttcaagtgatcctcttgccgcagcctcccaagtagctgggactaaaggcacacaccaccacgtccggctaatttttgtatttttggtagagatagggtttcgccatgttggccaggcctgtctcgaactcctggcctcaagtgatccaccggcctcagcctcccaaagttctgggattacagacgtgagccaccacgcccggcccaccttaccaatttcaactgtgtgcaaggaaaacaaaatatgaggtaaattggttgttataatgctacagccatcaatctgtaacgtgacttttatttttgtactattcaggacagcattattattagaagtgttgaacatactactgaaggttttcattgtgagtagatgttcgatatgaatataggaccttgaagtaacctacatctaattataggacccctcttctcccttcccccactccatgataactaccattctaaacttattcctttttcgttttacatagttttattgagtttatatatacccaaaaaagtatgcgtagttttgtttttaacttcataaaaaggtattatgctctatgtagtcttttgggactagatttttttggttaatattatgttgctaagattgatccctattgttgcatgactgtagtttttaactgctacgtaatattctgttatgcaaacatactacagtttttttcaactactctcctgtgttggtgagcatttgagttagttgtaggtttttgctatgttaacagtgctatcattaacagtcttgtgtatgtctcctggaatatgtatgcatgaatttctttgcagtataattctacaacttggaattgctgggtcatagggtgtgacagtattccattttgagagagaatgccagacagttttgtaaagtggttgccgagtctacacttaaccctactccccacggccagcaagggataatgtgaatctgtactctctccatcacttgatagtcagacttttttatttttgccaaatgttaaatagtatctcatgtgatattgaacattgttcatatttttaatagctatatgtatatcttatgtgaaacatctttttatgtcatttgtgcattcttctgtgtgtgtgtgtgtgtgtgtgttttggcttattgatttagaggaatgttgtatgtgttcttgatataatactagcgaggaccgctaagacacaattgaataggtagttgtgggcatccttgtcttgtttctgactttaaaggaaatactgctaatgtcttcacatttagaataatattgtaagtttttttattaacactttatcaggttaaggaagttctcttaatttttttgaaaatttttattatgaataaatgaacaagattaaatggtttttctgcagctatgaagaagaaaataggatgtttcttttctttcaatttcttaatatggtgagttaaatttatagatagtctaacattaatccaacttgagataaatcactttcattgggatgtatatttttaatacactactagatttaatttgccatcattctgtttagaattttcatatctatattcatatgggaaatgggcctgtaattttactttcttatagtatttggtttaattttatgagaaaataaaattagtatttagtggtatcagtgttatcagtatcagtggcatacagagtatcagtgttatctgatagaatgtagcgtaggccttgtggaatgagatggaggacaaccaagatggttgattttatgtcaacttttgccaggcctcagtgccaagatatttagtccagcattattcaagatgtttctaggtgatggatccaacattattctggataagattaaagtttaaattgatggactttcagtaaagtagattgctctccataatgtgaatgggcctcattcagttagctgaaggccttaatggagcaaagactgacctcccacaagcatggagtttgctagcagcccgcctctggggctcaaactacaactctcctctgcatccccagcctgcctgcctgcaggtttcagacttgcaccgccacaattcataaaccaataccttaagtcagtcccttcttctcactgtccctctatgtacacacatacacacacacacacacacacacgtgtacgtgtacacatgcgcccatcttgttggtactgcttctctggagaactctaatacagaagaagtacaccctgttgtttactgggaacttttgtataaattatgatctgttccctaatgtttatggtagaacttgcctataaaccaacctgggattggtatttttttggtagaagatttttaaccactggttcagtatcttgaatatttcttgtaccatataggcttttcatttcttgagtcaattttgataagttatattttcctaggaatttgggcagttttcaaattcgttgtcatttagttgctcatatttctaatagtattctttaatctctgccttatccatagttatatatccgttttcatcagtattacttgtacttactttccttttttatttattgccagcttttgccaattgtgctatttcattttgaagaaccaatctttgactctgttgatttcttctactttttcattgttttctacatcattaacttctgctgtttatttatgtcttgccttgcatttattatttctttttctaacatcatcgtagttattcacttttagcctattttttccaatttaagtttctaaggctttacatttctcttaaaacatcactttcatcacacatcctataagtttagggattttttttagttgactttttttttctttgacctttaagttatataatattatctttaattttcaaatatggcaggaattttcatttcactttttgctttttatttctaccttaattgctttgtgatcgaataatagtctgtctaattgctatgctttgaaatttgtggaggttttcattatggccaagtaaaagatgaaattttgtaaattttgcatgtgtacttgagaaaaatggatatttttgtagtaactggttgcagaactctatgtatgcccattaggtttggcgtattaatttttattgttttgttcagttctatatttctgctgattgtctctttgatcaataattgagatgttgaaatctctcaatttaccaaattttcttgtagttctagcactttttacttcatatatagtgactattttcgtgttttaaatgtttatattttcttattgaacctttatcattatgtagtgatgcctccatttcaaatgcttcttctctttttgtatcatactaacagagccacaccaacttcctttttgttgacctaatatgctattttttacacttttactttcctactcttaacccctaggctagcctgcttctctacacttttactttcaaacatttcatgtcattctgctttgctgtagcttttggaggcaccatataacagattgtttaaaatccaatctgataatcttggtcttttaatgagaaaatttagttaatttacatttgttattttttgtacctgttttaaccatctaattttttgatttggctcattttcttatcttttttaaaaaaattgtatttatatcttttcttctctaacaaataataattttaatgtactcctacaatacttggtatctccttttaactcccaacatgttgatttaacttagacttagttctggatcactatataattttgtctctttttttaaaaaaaagaaccttactattgttaatttataacatagtagacagaagtaggataaactataacttaaataatatacttctaaatttaaattgatgtgtatccatatacattagtctatctaaaacatgttgaatgaaaatggtacattacaaagacatacatagaacatttttgttgaattcaaaaacctaaaacattggcatatactatttatgaacacttacacacatgagtaaaaattaaaacatgcctgatatgtctggcacataataggtgctcaggaaatatttgttgagtgaataaatgatactgagaatataacctgataatgtaggatagttcttagcctaaatatttaaaacataagaattggtggtcttaaaaataatatttattttcatatcttttagatatgggtaagtgtc

SEQ ID NO: 12799 - DNA, 500 bp, Homo sapiens
ccccgttgatgctccaaatccatataggtctgaaaattgtctgtgtgtacaaaatatactgaaattgatgcaagaaaaagaaactggacttaatgtgttcttattggatatgtgtaggaaaagaaatgactacgatgataccattccaatcttggatgcactaaaagtcaccgccaatattgtgtttggatatgccacgtgtcaaggagcagaagcttttgaaatccagcattctggattggcaaatggaatctttatgaaatttttaaaagacagattattagaagataagaaaatcactgtgttactggatgaagttgcagaagagatagggtttcgccatgttggccaggcctgtctcgaactcctggcctcaagtgatccaccggcctcagcctcccaaagttctgggattacagacgtgagccaccacgcccggcccaccttaccaatttcaactgtgtgcaaggaaaacaaaatatgagatatgggtaagtgtc

SEQ ID NO: 12800 - DNA, 3312 bp, Homo sapiens
agcggaaggtgccccggggccgaggcccgtgacggggcgggcgggagccccggcagtccggggtcgccggcgagggccatgtcgctgttgggggacccgctacaggccctgccgccctcggccgcccccacggggccgctgctcgcccctccggccggcgcgaccctcaaccgcctgcgggagccgctgctgcggaggctcagcgagctcctggatcaggcgcccgagggccggggctggaggagactggcggagctggcggggagtcgcgggcgcctccgcctcagttgcctagacctggagcagtgttctcttaaggtactggagcctgaaggaagccccagcctgtgtctgctgaagttaatgggtgaaaaaggttgcacagtcacagaattgagtgatttcctgcaggctatggaacacactgaagttcttcagcttctcagccccccaggaataaagattactgtaaacccagagtcaaaggcagtcttggctggacagtttgtgaaactgtgttgccgggcaactggacatccttttgttcaatatcagtggttcaaaatgaataaagagattccaaatggaaatacatcagagcttatttttaatgcagtgcatgtaaaagatgcaggcttttatgtctgtcgagttaataacaatttcacctttgaattcagccagtggtcacagctggatgtttgcgacatcccagagagcttccagagaagtgttgatggcgtctctgaatccaagttgcaaatctgtgttgaaccaacttcccaaaagctgatgccaggcagcacattggttttacagtgtgttgctgttggaagccctattcctcactaccagtggttcaaaaatgaattaccattaacacatgagaccaaaaagctatacatggtgccttatgtggatttggaacaccaaggaacctactggtgtcatgtatataatgatcgagacagtcaagatagcaagaaggtagaaatcatcataggaagaacagatgaggcagtggagtgcactgaagatgaattaaataatcttggtcatcctgataataaagagcaaacaactgaccagcctttggcgaaggacaaggttgcccttttgataggaaatatgaattaccgggagcaccccaagctcaaagctcctttggtggatgtgtacgaattgactaacttactgagacagctggacttcaaagtggtttcactgttggatcttactgaatatgagatgcgtaatgctgtggatgagtttttactccttttagacaagggagtatatgggttattatattatgcaggacatggttatgaaaattttgggaacagcttcatggtccccgttgatgctccaaatccatataggtctgaaaattgtctgtgtgtacaaaatatactgaaattgatgcaagaaaaagaaactggacttaatgtgttcttattggatatgtgtaggaaaaggaattaacaaaaccaacacccatggagttgggatctctgctcactagtcagtcctggtcttccagacatggaatgagtagccgaagcagatgtttggagaaatgactacgatgataccattccaatcttggatgcactaaaagtcaccgccaatattgtgtttggatatgccacgtgtcaaggagcagaagcttttgaaatccagcattctggattggcaaatggaatctttatgaaatttttaaaagacagattattagaagataagaaaatcactgtgttactggatgaagttgcagaagatatgggtaagtgtcaccttaccaaaggcaaacaggctctagagattcgaagtagtttatctgagaagagagcacttactgatccaatacagggaacagaatattctgctgaatctcttgtgcggaatctacagtgggccaaggctcatgaacttccagaaagtatgtgtcttaagtttgactgtggtgttcagattcaattaggatttgcagctgagttttccaatgtcatgatcatctatacaagtatagtttacaaaccaccggagataataatgtgtgatgcctacgttactgattttccacttgatctagatattgatccaaaagatgcaaataaaggcacacctgaagaaactggcagctacttggtatcaaaggatcttcccaagcattgcctctataccagactcagttcactgcaaaaattaaaggaacatctagtcttcacagtatgtttatcatatcagtactcaggattggaagatactgtagaggacaagcaggaagtgaatgttgggaaacctctcattgctaaattagacatgcatcgaggtttgggaaggaagacttgctttcaaacttgtcttatgtctaatggtccttaccagagttctgcagccacctcaggaggagcagggcattatcactcattgcaagacccattccatggtgtttaccattcacatcctggtaatccaagtaatgttacaccagcagatagctgtcattgcagccggactccagatgcatttatttcaagtttcgctcaccatgcttcatgtcattttagtagaagtaatgtgccagtagagacaactgatgaaataccatttagtttctctgacaggctcagaatttctgaaaaatgacctccttgtttttgaaagttagcataattttagatgcctgtgaaatagtactgcacttacataaagtgagacattgtgaaaaggcaaatttgtatatgtagagaaagaatagtagtaactgtttcatagcaaacttcaggactttgagatgttgaaattacattatttaattacagacttcctctttctaagattttgtgaattggttgaatagttctatacaaatgaagtatggaggtgtgtatgtttatatgtatataacaaaatattttcattgtgaccactctgaagtaagagcaatgggaatggcattattgtagaataagtcattgtatttttaacaccagaaagaaccttgccgatcaccaggcataacctaattttatccatggaagaaacacagaaaggcatctaagttagagctggcaccagaactgagacctccagaaatctattccagtattttttccactacacaactgccttcctgacaggttctgagataagtgttatgtttgtagatagagtgaaatatatttatatatatataaatatatacagatacatatctgtgtattatctcaaggaatgtacaaactttagtttttgattataaggacttcactgcaagttttagttaagaggtttgtatataaatct

SEQ ID NO: 12801 - DNA, 14265 bp, Homo sapiens
ctgtgaaatgctaaaagccatttgcgtttgtgaattttagtttatacattgaaactggaagaacaaaactagaggaaaatacatttactccatgtatatctaattattttaactcttcatatttgctatagaacacaaatgaagaactaaagggcatgggcatttactcacactacaggggattcaactctccagaatgcctttagatgactttaataatcactatagttattccctcaggaattaacaaaaccaacacccatggagttgggatctctgctcactagtcagtcctggtcttccagacatggaatgagtagccgaagcagatgtttggaggtttggatcccatttgtctgccattgcctttctaaggagtagaaccaatgactgttcctctagatttactatttttttgcttgctcagcatttaccaatcaaaatccaatgccagagttcaaatgcaactctagttttaaagctaacaaggagttagtgggttattttgggtagatatgtagctacctagatgaaaaattttgaatctataattttaaattatgtattctaaaaaactgttgtattttctcattatttatacccttttaagaatgctctttaacttttcatatttctatctgccctcctccgcctcccttaaatagaaatgactacgatgataccattccaatcttggatgcactaaaagtcaccgccaatattgtgtttggatatgccacgtaagaacatttgatgtttacgttgaagtttcctttattgtttgatgtctttttgtttttgctttttaggagcaggggtcttaactctgtcacccaggctggagtgcagaggcgccatcatagctcactgctcctgggctcaagcgatcctcctgcctcagccttctgagtcgctgggattacaggcatgtgccactgtgcctggcccctgagggttttttgattatagattagaggcctagaaaatacctatagacatgtaggcataaatttacctccttgatattctgcgtagaaaattttaaatgatcgactttagcattccatatcatggtatcttaattattaagcccaaattgggcatgtaattcctgcttaaagattaactctttaattatcaatgtcatgtgagaggcagaagagaaaatgaagcttattggtgtatacagaagtcccatgtggcaagtgtttgcttttctaacattttctttttaaaaaattatttttattggatattgacaagttataattgtatgtatttatgggatacaaagatatgctatgatgtacgtattcaatgtggaatgattgaatcaagataattcacatatcacctcaaatacttatcttttttcctaactgaaacattgtaccctgtgactaacagtccccacgctgtccccacccccccccagcctctggtaaccaccattctgctgggtgcttctctgagttcatttttattagcatccacatataagtgagaacatacagtatttgcctttctgtgcctggcttaacttctttttctatttttaaggtgtcaaggagcagaagcttttgaaatccagcattctggattggcaaatggaatctttatgaaatttttaaaagacagattattagaagataagaaaatcactgtgttactggatgaagttgcagaaggtaaaataaaaaataaagagaaaagtactcagaaaaaggagagcaggggagacacacctattcagggttccctctctggtgattgttttattcttattatgtgggtttggaattagtacctactttataaaacaatttttatattaatataacgttcagcaacacttctgctatttaatgtcatctttccttcccttttgacctagctctccaccatctgtgcagcattactcagactacaaggctaagcctcggcacagtcattaataaagttgaattctcagagctctactttgcttctatgcccagtgccttggtactggcaaatctccctatttgagggtgggtgggtggcatggaggggtggtggggaattgtccagtgagcagtctctcccaggatgggagagagaaaactttacagaaatttttagacactgctgggaaaagctgagttcatttttttccctgatgaacttagtagtttttaaatcctgatttaaggatgtgatcctagggggtctaatgccacatcttccatttctatctgttctccctgcctgctggtataatgctgtgcatatgtcagatgctgaacaagtacctattatttcagtagattgcactgtgttttttgaaaaaacattttataagccatagcaaaaagaaggtaacttggccaggtatggtggctcaagcctgtaatcccagcactttgggaagctgaggcaggaggatcacttaaggccaagagttcaagaccagcctaggcaacatagcgagaccctgtcttcaaaataaaaaataaaaataaaaaagaagaaattattttacaaactagcaccactagaaaatggagtttcatggatgttccagtgatggcagtttgggtataaggtgtttgaccaactgtcagccatatttattttcatgtttttatctgtgtagctattttagatcacttgacttagccacttttccatttaacataaccagccagggctttggacttcctgccaccctcccgcttcatccagagaagttccacttttatttgttttctacattaggcttcttctgaagcttacatttgaaggaaaggctctgctgctttaaaaaaaaaaaaagaaagaaagaaaacctttggattatgtcagttatattcaaactgagatccagtaaggtgctccagaaactctacagtgttttatttcaatttcgtttttaagtccattttaactattttaaaacttaataaaaagcaccatgctcactcacatatgatatttaccaaattgtcatagcaatgaatggcatcccgatatgtgctgtgaggatatttgaacttcttataaacatcttagacagttttgcttttcgctgatctttttcagtcctaccatgtctgcttaaccagaattgcccaggcaggaagaccctgtagtgtacatggagcacactcagctcagtgccgtgcacattgtgcccttcgtgggtaacggcccactcattgtacaaaataagtaaaggcctaatagtatcatgataaataatacagttaaatctagcccttattttgagttttggatgctttgtgtctgacccctgtcttagtagtaaagagcaaaagtagttgtatgaaatttttcacaagtcatccaattttgaaacaaaactttgctgtttctccctttggatcttccagattacttaattgaaactcattccatggctgggcatggtggctcacacctgtaatcccagcactttgggaggctgaggtaggaggattgcttgagcccaggaattcaagaccagtctgggcaacacagcaagaccccatctcaatttaaaaaaaaaattatttggggccaggtacagtggctcatgcctgtaatcccagcatttggggaggctgaggcaggagaatcacttgaacacagaagtttgagaccaacctaggcaacattgtcagaccccccatctctataaaaatttaaaaaattagccaggcattatggtgtgcacctgcagtgccagctactcgcgagacttaggtgggaggattgctcgagcctggcagtttgagactgtagtaagtatgaccacaccactgctctccagcatgtgtgacagagcaagccccatctcaaaaaaaaaaaaaaagaaaattccagagggagaaaagtattcacagattataagccaagcagttgaaggggaaaataaacatgttaccaatttctttttttaattttttggtttctttgtgtgagactacagagtctctgtcgcgcaggctagagtgcagtggcatgatcttggcttactgcaacgtccacctcccaggttcaagtgatcctcttgccgcagcctcccaagtagctgggactaaaggcacacaccaccacgtccggctaatttttgtatttttggtagagatagggtttcgccatgttggccaggcctgtctcgaactcctggcctcaagtgatccaccggcctcagcctcccaaagttctgggattacagacgtgagccaccacgcccggcccaccttaccaatttcaactgtgtgcaaggaaaacaaaatatgaggtaaattggttgttataatgctacagccatcaatctgtaacgtgacttttatttttgtactattcaggacagcattattattagaagtgttgaacatactactgaaggttttcattgtgagtagatgttcgatatgaatataggaccttgaagtaacctacatctaattataggacccctcttctcccttcccccactccatgataactaccattctaaacttattcctttttcgttttacatagttttattgagtttatatatacccaaaaaagtatgcgtagttttgtttttaacttcataaaaaggtattatgctctatgtagtcttttgggactagatttttttggttaatattatgttgctaagattgatccctattgttgcatgactgtagtttttaactgctacgtaatattctgttatgcaaacatactacagtttttttcaactactctcctgtgttggtgagcatttgagttagttgtaggtttttgctatgttaacagtgctatcattaacagtcttgtgtatgtctcctggaatatgtatgcatgaatttctttgcagtataattctacaacttggaattgctgggtcatagggtgtgacagtattccattttgagagagaatgccagacagttttgtaaagtggttgccgagtctacacttaaccctactccccacggccagcaagggataatgtgaatctgtactctctccatcacttgatagtcagacttttttatttttgccaaatgttaaatagtatctcatgtgatattgaacattgttcatatttttaatagctatatgtatatcttatgtgaaacatctttttatgtcatttgtgcattcttctgtgtgtgtgtgtgtgtgtgtgttttggcttattgatttagaggaatgttgtatgtgttcttgatataatactagcgaggaccgctaagacacaattgaataggtagttgtgggcatccttgtcttgtttctgactttaaaggaaatactgctaatgtcttcacatttagaataatattgtaagtttttttattaacactttatcaggttaaggaagttctcttaatttttttgaaaatttttattatgaataaatgaacaagattaaatggtttttctgcagctatgaagaagaaaataggatgtttcttttctttcaatttcttaatatggtgagttaaatttatagatagtctaacattaatccaacttgagataaatcactttcattgggatgtatatttttaatacactactagatttaatttgccatcattctgtttagaattttcatatctatattcatatgggaaatgggcctgtaattttactttcttatagtatttggtttaattttatgagaaaataaaattagtatttagtggtatcagtgttatcagtatcagtggcatacagagtatcagtgttatctgatagaatgtagcgtaggccttgtggaatgagatggaggacaaccaagatggttgattttatgtcaacttttgccaggcctcagtgccaagatatttagtccagcattattcaagatgtttctaggtgatggatccaacattattctggataagattaaagtttaaattgatggactttcagtaaagtagattgctctccataatgtgaatgggcctcattcagttagctgaaggccttaatggagcaaagactgacctcccacaagcatggagtttgctagcagcccgcctctggggctcaaactacaactctcctctgcatccccagcctgcctgcctgcaggtttcagacttgcaccgccacaattcataaaccaataccttaagtcagtcccttcttctcactgtccctctatgtacacacatacacacacacacacacacacacgtgtacgtgtacacatgcgcccatcttgttggtactgcttctctggagaactctaatacagaagaagtacaccctgttgtttactgggaacttttgtataaattatgatctgttccctaatgtttatggtagaacttgcctataaaccaacctgggattggtatttttttggtagaagatttttaaccactggttcagtatcttgaatatttcttgtaccatataggcttttcatttcttgagtcaattttgataagttatattttcctaggaatttgggcagttttcaaattcgttgtcatttagttgctcatatttctaatagtattctttaatctctgccttatccatagttatatatccgttttcatcagtattacttgtacttactttccttttttatttattgccagcttttgccaattgtgctatttcattttgaagaaccaatctttgactctgttgatttcttctactttttcattgttttctacatcattaacttctgctgtttatttatgtcttgccttgcatttattatttctttttctaacatcatcgtagttattcacttttagcctattttttccaatttaagtttctaaggctttacatttctcttaaaacatcactttcatcacacatcctataagtttagggattttttttagttgactttttttttctttgacctttaagttatataatattatctttaattttcaaatatggcaggaattttcatttcactttttgctttttatttctaccttaattgctttgtgatcgaataatagtctgtctaattgctatgctttgaaatttgtggaggttttcattatggccaagtaaaagatgaaattttgtaaattttgcatgtgtacttgagaaaaatggatatttttgtagtaactggttgcagaactctatgtatgcccattaggtttggcgtattaatttttattgttttgttcagttctatatttctgctgattgtctctttgatcaataattgagatgttgaaatctctcaatttaccaaattttcttgtagttctagcactttttacttcatatatagtgactattttcgtgttttaaatgtttatattttcttattgaacctttatcattatgtagtgatgcctccatttcaaatgcttcttctctttttgtatcatactaacagagccacaccaacttcctttttgttgacctaatatgctattttttacacttttactttcctactcttaacccctaggctagcctgcttctctacacttttactttcaaacatttcatgtcattctgctttgctgtagcttttggaggcaccatataacagattgtttaaaatccaatctgataatcttggtcttttaatgagaaaatttagttaatttacatttgttattttttgtacctgttttaaccatctaattttttgatttggctcattttcttatcttttttaaaaaaattgtatttatatcttttcttctctaacaaataataattttaatgtactcctacaatacttggtatctccttttaactcccaacatgttgatttaacttagacttagttctggatcactatataattttgtctctttttttaaaaaaaagaaccttactattgttaatttataacatagtagacagaagtaggataaactataacttaaataatatacttctaaatttaaattgatgtgtatccatatacattagtctatctaaaacatgttgaatgaaaatggtacattacaaagacatacatagaacatttttgttgaattcaaaaacctaaaacattggcatatactatttatgaacacttacacacatgagtaaaaattaaaacatgcctgatatgtctggcacataataggtgctcaggaaatatttgttgagtgaataaatgatactgagaatataacctgataatgtaggatagttcttagcctaaatatttaaaacataagaattggtggtcttaaaaataatatttattttcatatcttttagatatgggtaagtgtcaccttaccaaaggcaaacaggctctagagattcgaagtagtttatctgagaagagagcacttactgatccaatacagggaacagaatattctgctgaatctcttgtgcggaatctacagtgggccaaggctcatggtacggtaaagcccattttttgttagatctacaatatacttaacgttaaatcataaagtttcttctgaataaataactttcctcccagttttacagtgaaaatattttggcctactaggcaaatctcaaaccaaacaaatatttcaattatggatattacactggcttatttgatttagaaatatcaaattatttagcccattattgtcactattggtaaaatttaaatgaccatttaaaaatttttctatttttaaaataggttaagtttccatttgtctaatacacaatcctttagattctcctatattgtgacctgtcgaaaatcatggattgggttctgatccagtctctaccactctatgaacatgttatctataacatgtaaataagaaatggtacctgcttcaggctgggtgtggtcgctcacgcctgtaatcctagcactttgggaggccaaggcaggtggatcacctgaggtcaggagttagacaccagcctggacaacatggcaaaacctcgtctctactaaaaatacaaaaagttagcggggtgtggtggcacgtgcctgtaatcccaactactagggtggctgaggcaagagaatctcttgaacctgagaggtggaggttgcagtgcagtgagcagagattgtcccactgcactccagtctgggcgacagagcgagactctgtctcgaaaagaaaaagaaatagtacctgcctcataggttattgggattgaatgagtgcataggtagaaatgagcatggcactcgacaagtcctctgtacttttgattattcgtataactgagcatcctctcttggacacttgatcagtaagttgagtgatcagcagagaagatgacgtgaaaatcaatctgtagcttaattaccttttggtaattgtgtatggtttaatgaaaaaataagtttaaattaccaattgaaataattttggattttctgagtccaagtatctagtctgtgagtctcttatagataattgaaaaataattgtatttaatgaacttctataaaatatctttattttcataaataataatttttgttcttggccaggtgtggtggctcacacctgtaatcccagcactttgggaggccaaggtgggtagatcacctgaggtcaggggttcaagaccagcctggccaacatggtgaaactccatctctactaaaaatacaaaaaattagctggtcatggtggcaggtgcctgtaatcccagctactctggaggctgagccaggagaatcacttgaacctgggagtcggagtttgcagtaagctgaggtcacgccattgcactccagcctgggcaacaagagcaaaactcagtctcaaaaaaagaatttattctctaatacatatttttagtaaattaacatattaaagcacattaaaatgtaaaatgctataaatatctcaccattccagataactggataagtaattgaatgtcttttctctaaaaaagatctaaacaacaaatagcaaaattacggtggtaaagatcaacaataaacgaaacttcataaaacaaaatgaaaaggtcatatagaaaatatttgtaacaaataagagaaaaaaaattaagaccctcctcagtaaacaagcaaatgatacaaattcaacaatccacactgctggaagtatagagaaaaattttttaaatggctaatgtaagtaattaaggaataattaaaactgatggtatctttctgctttttaataccatcaagtagacaaatgttttaaaaattaatactctgttttggacatgttatgctgaaactttatattccatgcaaattgaaaataatttgtcccatatgtaaaggaacaatcacatagctttatctatcttaaagcattacgtatatataaatattaactatgatagaaaaacaataaaacccagaggtattataaatattcaagagttaacagaatggttaaaggtaacaaactataatgtggctgttcagtgacattgtgctttattaaaaattctggtcatataaattgaggcaacagtgaaaatttatctacaattgtatgcatatttttgattgccacaataaaaattatatatacagttggataagaactataaacaaatggtaaatgaaagactttgtttggccagcagaatagtgagcattattttttaaattgtatgtgtttaaacaatgtaaatcatgtttttaagcaaaagaaatgctaactatattctcctccataaatatttgcctcttatcatcagaaaacctaccaaagttgttcttattgttctttttcagaacttccagaaagtatgtgtcttaagtttgactgtggtgttcagattcaattaggatttgcagctgagttttccaatgtcatgatcatctatacaagtatagtttacaaaccaccggagataataatgtgtgatgcctacgttactgattttccacttgtgagtctcttcttttatttaaaatacagtgatatattctcacttattaaagactaaattttttaaaacttaaagttgatggtaaatataaaggaaatatatatatttatatatgtgtatatatttatagtttagtaacactgatcataatatttactaattgccaaaataccttaagtttatgagatttagaaatgtctaaagttcactcaggaaggatgcctctaatttcttatatcctaaacacgagagccaatgtgaaggaataaaatgtgctataaatatgtcaagaataatttccttttaaacagttataacttatattggaaacagtagtttttaagtcttgttaaggtatggtcatatgctggaataatagaaatctagttctgctcttttcaaacatttaggtttgatagttattttacgttggtctaaagaagccagtaaatagtacccctctttcctacatgagtgtgacaaactgagaagcaagcaaggagtaagacaagcagaaacccaaaatatcactttgattactgatagaggctttgtggaggatattgcttcatgtcagagtaaatggtctagcaccaaaccccagaattgagtggccaccccacacctccagtctcagcagtacggagcccagataggcttcctgaggtactgagcaagctgggggcctgtgggcttctcactggagcagcagaacccttactcttggccattgggttggctctaaaagaagaaaaaggaaaaggctgtttatttatccttcttaaatattctaatcatataaatttccctgcaccttcccaaaagtgatgattaagaggagagaatccaggagtcaaacactaatggggctctctctgcttaagaggaaacttgagtagctcaagaagcatttctaggaatcatttgaaaggaagctctttcagagctcactttactttttagatggcttagtacagaattgagaattcctattataaccatagattgttgttttcattgtttagtcctggataattttgggattaccaaaattcacgagaggccagaattcacgagaggatagtatcagttaagatgtcttatgtactagattatattgtggctttcattgatttcattattaacagtccctaatttttttttttacaggatctagatattgatccaaaagatgcaaataaaggcacacctgaagaaactggcagctacttggtatcaaaggatcttcccaagcattgcctctataccagactcagttcactgcaaaaattaaaggttactaccttttctgtttatagctactaatggaaaactttatgaaactggaaacttattttggcatagaccatagatatgctgccttattattaaagtagagataaccagtctacagaaggtcctatcagtgaccctttttatattctgtttccgatggtgaccagaggactttatgtgtgcttaccctccagaatgctaaaaaattagtaacattagagtatattcttttttctttttttagagacagagtcttaactctgtcacccaggctggagtgcagtggcatgaacatgacctactataacctcaaactcctcagtgcatatgatcctgccacctcagcttcccaagtatctgagtctacaggcacatgccactacacccagctaattttttaaaactttttgtggagaagggatctcactatattgcccaggccaatctcaaactcctggcctcaagaatcctcccttcttggtctcccaaagcactcggagtacaggtgtgagcttccactcccagctccatattctacttttaaatatgttcagattttcaagtaatcatttcctagttctatgactagacatatagcaaattagaattttttttccatttttttatttctagttgacttacaaatgagaagctagttctgcacattgagtgttctaatgaaagcttttaatttgttcacaactacatgaccatagaatgtatcagctaaaactcagggaatggaatgggcatgattgagaattacacacataaacctgttgtcatcctgttcggagctcatctacttaaaatcctttcttctcttaaaaagttagcccattatctgattcagttatattttccacctacgattatggattactataatattttaaaaacagcttaagctttttttataaaactggtataaaaccaggtttttttttttgttttgagatggtgtctctctctgtcgcctaggttggaatgcagtggcgcgatctcagctcactgcaacctccacctcccagactcaagtgattcttgtgcctcagcctcccgagtagccaggactacaggcgcacaccaccatgcccagttaattttttgtatttttagtagagacaggtttcaccacgttggccagactggtcttgaactcctaacttcaagtgatccatctgcgtcatcctcccaaagtgctgggattataggcgtgagccaccacgccgggcccagatcattttttaattaaaagttaataccccatctctaataatagggaagggtaagtttcctaagctgcactgcttggaaaatgttttccctgttcatctagagtgtaagaaagatctctttgactttgactactaacagtagtaagaactagaaattctaaatgggttgtaagtattgcatgaaggaaaaggaagataatgatagctggcgtttctcagtttcagggagatataaaggatgccttgaggatttggaacctgggaaaggagagtgagtggatttttgggggtgggggtgtgtatgtgtgaatattttcagattgatatatattcactgttgatgccaataataaaccagatttttttccttttcaggaacatctagtcttcacagtatgtttatcatatcagtactcaggattggaagatactgtagaggacaagcaggaagtgaatgttgggaaacctctcattgctaaattagacatgcatcgaggtttgggaaggaagacttgctttcaaacttgtcttatgtctaatggtccttaccagagttctgcagccacctcaggaggagcagggcattatcactcattgcaagacccattccatggtgtttaccattcacatcctggtaatccaagtaatgttacaccagcagatagctgtcattgcagccggactccagatgcatttatttcaagtttcgctcaccatgcttcatgtcattttagtagaagtaatgtgccagtagagacaactgatgaaataccatttagtttctctgacaggctcagaatttctgaaaaatgacctccttgtttttgaaagttagcataattttagatgcctgtgaaatagtactgcacttacataa

SEQ ID NO: 12802 - DNA, 1519 bp, Homo sapiens
ctgtgaaatgctaaaagccatttgcgtttgtgaattttagtttatacattgaaactggaagaacaaaactagaggaaaatacatttactccatgtatatctaattattttaactcttcatatttgctatagaacacaaatgaagaactaaagggcatgggcatttactcacactacaggggattcaactctccagaatgcctttagatgactttaataatcactatagttattccctcaggaattaacaaaaccaacacccatggagttgggatctctgctcactagtcagtcctggtcttccagacatggaatgagtagccgaagcagatgtttggaggagcaggggtcttaactctgtcacccaggctggagtgcagaggcgccatcatagctcactgctcctgggctcaagcgatcctcctgcctcagccttctgagtcgctgggattacaggtgtcaaggagcagaagcttttgaaatccagcattctggattggcaaatggaatctttatgaaatttttaaaagacagattattagaagataagaaaatcactgtgttactggatgaagttgcagaagatatgggtaagtgtcaccttaccaaaggcaaacaggctctagagattcgaagtagtttatctgagaagagagcacttactgatccaatacagggaacagaatattctgctgaatctcttgtgcggaatctacagtgggccaaggctcatgaacttccagaaagtatgtgtcttaagtttgactgtggtgttcagattcaattaggatttgcagctgagttttccaatgtcatgatcatctatacaagtatagtttacaaaccaccggagataataatgtgtgatgcctacgttactgattttccacttgatctagatattgatccaaaagatgcaaataaaggcacacctgaagaaactggcagctacttggtatcaaaggatcttcccaagcattgcctctataccagactcagttcactgcaaaaattaaaggaacatctagtcttcacagtatgtttatcatatcagtactcaggattggaagatactgtagaggacaagcaggaagtgaatgttgggaaacctctcattgctaaattagacatgcatcgaggtttgggaaggaagacttgctttcaaacttgtcttatgtctaatggtccttaccagagttctgcagccacctcaggaggagcagggcattatcactcattgcaagacccattccatggtgtttaccattcacatcctggtaatccaagtaatgttacaccagcagatagctgtcattgcagccggactccagatgcatttatttcaagtttcgctcaccatgcttcatgtcattttagtagaagtaatgtgccagtagagacaactgatgaaataccatttagtttctctgacaggctcagaatttctgaaaaatgacctccttgtttttgaaagttagcataattttagatgcctgtgaaatagtactgcacttacataa

SEQ ID NO: 12803 - DNA, 3328 bp, Homo sapiens
cataatggtactcgaccaccactgataaaaaatttacctaagcccattgagagcctgatgactcgttgttggtctaaagatccttcccagcgcccttcaatggaggaaattgtgaaaataatgactcacttgatgcgggtataatccttcttttgaggggctttggatttaggggaatttaatatgtgctgagttttaatggaattttaaaagggatgttattactatattctgctttatatattgctatgttttctaagtgagaatgggcatttattactcatagtcagaagaggaaacatttcgagagggaaaatctagttctttatcactggaaagatggctagactaggtttctagacttgcttttttctttttgcttacattagtggacaagtatgtttgtctctgggcctgttgcctcatttgtaatgtgggagaaactgaaatagatagtctctaaagccatcacaggacttggatatattaatattatgacttcaatacatgataaactaaattttacatttttctgataccaattttcatcaagcatttagtcatttatgcaaggcaataggttgcattctcagacacatttatttgagtgacttttactatttggcctattttcaggtttttatatcccagtaaaaagttaaactttcttctatttagaagaacccttttaaatgattatcaaattttcctagtctgtgaatcaagcgcctttagaattatttggaatattttacgcctctggtttttggtacattaacaaaaactgtgaagtggtatcttggctttaaaaagttcaaatatctatgaaagtgcctgaattttgaaacagtttgttcagtagaagaatcttacaatctccttaaatatagactaagtaatttcctaaatggtaaaacgttgtttattcaatctattgaaaatttcttacgcaaagcagcttgaactaatctactaaaagtttaccatcgtatttggataccagtcatatatagaagcctaggccttaaaggtgtgtgcataagaaaacaacttagtctctgtagtcagattacttaaaactttaggatatataagttattgcagttgtaattttgcttctctgttccttgtctaatttgaggagaatacgtttcctttttttctctaaattctaacatttttgtccagcagatactttgagtattatgcctccagtttgtagaaagacattcataatctatcctcttaatatttaaaatgttctaacaattattctatggtatactagtctcagtcttcagactaacagtcactggaagtttacatcactactgtaagaacatgagtatgttttacataattatgagaaatgatactattttatttcatatgtttctctagagaaatatttgctgttttcttcaagactatctagactccaatgtaagctagattcttaggtaggtgcatggcattgatcaaagttgaaatccaagagtacattattgtaatctttgtaaaataaaaaacttaggcacctacaaatttagtatataacttagggaaaataaaacattaatcaggatttaatttgtattaaggaaattttaagctgtggtttacttttttatatatagtactttccaggagcagatgagccattacagtatccttgtcagtattcagatgaaggacagagcaactctgccaccagtacaggctcattcatggacattgcttctacaaatacgagtaacaaaagtgacactaatatggagcaagttcctgccacaaatgatactattaagcgcttagaatcaaaattgttgaaaaatcaggcaaagcaacagagtgaatctggacgtttaagcttgggagcctcccgtgggagcagtgtggagagcttgcccccaacctctgagggcaagaggatgagtgctgacatgtctgaaatagaagctaggatcgccgcaaccacaggcaacggacagccaagacgtagatccatccaagacttgactgtaactggaacagaacctggtcaggtgagcagtaggtcatccagtcccagtgtcagaatgattactacctcaggaccaacctcagaaaagccaactcgaagtcatccatggacccctgatgattccacagataccaatggatcagataactccatcccaatggcttatcttacactggatcaccaactacagcctctagcaccgtgcccaaactccaaagaatctatggcagtgtttgaacagcattgtaaaatggcacaagaatatatgaaagttcaaacagaaattgcattgttattacagagaaagcaagaactagttgcagaactggaccaggatgaaaaggaccagcaaaatacatctcgcctggtacaggaacataaaaagcttttagatgaaaacaaaagcctttctacttactaccagcaatgcaaaaaacaactagaggtcatcagaagtcagcagcagaaacgacaaggcacttcatgattctctgggaccgttacattttgaaatatgcaaagaaagactttttttttaaggaaaggaaaaccttataatgacgattcatgagtgttagctttttggcgtgttctgaatgccaactgcctatatttgctgcatttttttcattgtttattttccttttctcatggtggacatacaattttactgtttcattgcataacatggtagcatctgtgacttgaatgagcagcactttgcaacttcaaaacagatgcagtgaactgtggctgtatatgcatgctcattgtgtgaaggctagcctaacagaacaggaggtatcaaactagctgctatgtgcaaacagcgtccattttttcatattagaggtggaacctcaagaatgactttattcttgtatctcatctcaaaatattaataatttttttcccaaaagatggtatataccaagttaaagacagggtattataaatttagagtgattggtggtatattacggaaatacggaacctttagggatagttccgtgtaagggctttgatgccagcatccttggatcagtactgaactcagttccatccgtaaaatatgtaaaggtaagtggcagctgctctatttaatgaaagcagttttaccggattttgttagactaaaatttgattgtgatacattgaacaaaatggaactcatttttttttaaggagtaaagatttttaattctgtgattgtgtgtatgtgtgttgaaactgtaaagcttttatgactctaatattaatctcttaaatgaaattaaaaggcaaaagaacatgattgagcttaaa

SEQ ID NO: 12804 - DNA, 4633 bp, Homo sapiens
atgtctacagcctctgccgcctcctcctcctcctcgtcttcggccggtgagatgatcgaagccccttcccaggtcctcaactttgaagagatcgactacaaggagatcgaggtggaagaggttgttggaagaggagcctttggagttgtttgcaaagctaagtggagagcaaaagatgttgctattaaacaaatagaaagtgaatctgagaggaaagcgtttattgtagagcttcggcagttatcccgtgtgaaccatcctaatattgtaaagctttatggagcctgcttgaatccagtgtgtcttgtgatggaatatgctgaagggggctctttatataatgtgctgcatggtgctgaaccattgccatattatactgctgcccacgcaatgagttggtgtttacagtgttcccaaggagtggcttatcttcacagcatgcaacccaaagcgctaattcacagggacctgaaaccaccaaacttactgctggttgcaggggggacagttctaaaaatttgtgattttggtacagcctgtgacattcagacacacatgaccaataacaaggggagtgctgcttggatggcacctgaagtttttgaaggtagtaattacagtgaaaaatgtgacgtcttcagctggggtattattctttgggaagtgataacgcgtcggaaaccctttgatgagattggtggcccagctttccgaatcatgtgggctgttcataatggtactcgaccaccactgataaaaaatttacctaagcccattgagagcctgatgactcgttgttggtctaaagatccttcccagcgcccttcaatggaggaaattgtgaaaataatgactcacttgatgcggtactttccaggagcagatgagccattacagtatccttgtcagtattcagatgaaggacagagcaactctgccaccagtacaggctcattcatggacattgcttctacaaatacgagtaacaaaagtgacactaatatggagcaagttcctgccacaaatgatactattaagcgcttagaatcaaaattgttgaaaaatcaggcaaagcaacagagtgaatctggacgtttaagcttgggagcctcccgtgggagcagtgtggagagcttgcccccaacctctgagggcaagaggatgagtgctgacatgtctgaaatagaagctaggatcgccgcaaccacagcctattccaagcctaaacggggccaccgtaaaactgcttcatttggcaacattctggatgtccctgagatcgtcatatcaggcaacggacagccaagacgtagatccatccaagacttgactgtaactggaacagaacctggtcaggtgagcagtaggtcatccagtcccagtgtcagaatgattactacctcaggaccaacctcagaaaagccaactcgaagtcatccatggacccctgatgattccacagataccaatggatcagataactccatcccaatggcttatcttacactggatcaccaactacaggcaagaactagttgcagaactggaccaggatgaaaaggaccagcaaaatacatctcgcctggtacaggaacataaaaagcttttagatgaaaacaaaagcctttctacttactaccagcaatgcaaaaaacaactagaggtcatcagaagtcagcagcagaaacgacaaggcacttcatgattctctgggaccgttacattttgaaatatgcaaagaaagactttttttttaaggaaaggaaaaccttataatgacgattcatgagtgttagctttttggcgtgttctgaatgccaactgcctatatttgctgcatttttttcattgtttattttccttttctcatggtggacatacaattttactgtttcattgcataacatggtagcatctgtgacttgaatgagcagcactttgcaacttcaaaacagatgcagtgaactgtggctgtatatgcatgctcattgtgtgaaggctagcctaacagaacaggaggtatcaaactagctgctatgtgcaaacagcgtccattttttcatattagaggtggaacctcaagaatgactttattcttgtatctcatctcaaaatattaataatttttttcccaaaagatggtatataccaagttaaagacagggtattataaatttagagtgattggtggtatattacggaaatacggaacctttagggatagttccgtgtaagggctttgatgccagcatccttggatcagtactgaactcagttccatccgtaaaatatgtaaaggtaagtggcagctgctctatttaatgaaagcagttttaccggattttgttagactaaaatttgattgtgatacattgaacaaaatggaactcatttttttttaaggagtaaagatttttaattctgtgattgtgtgtatgtgtgttgaaactgtaaagcttttatgactctaatattaatctcttaaatgaaattaaaaggcaaaagaacatgattgagcttaaatgatcatttcttcctgcagtgattcttggattgttttctcatgtatttgaaaaaaaaaaaatgaagaaaaataatggaaaatggaagtaattactccagctaaaaaaagcttggacttagatttctttttatgataccaaatgagaaataaaccaggcaaatcagaaggaagttaaagaagcaaatataaattcaacaagtgtcctaattatcctggatattggaatatttgattttccttacaatcccgttctagaatgcctgccgcctttcaacactttcaagagaatttcaacacttacagagtatttatattgttaacagtaattttgctaccaaaaccttcagaataactttaataataaaatgacactgaaataatagactatacaaactctatattttttcagttggtgttaaaataagtcacattttgataccagtacaagatgtcttttaaataaggatgtcatcagtctgatttttatagcattaatgttttatgaagaaaaagttcaaaatgaaagcattaattgctgtgattattagaattctatcatgactgtattgtagtttttgctctatttcagataagcaagatctaagaagttatcaaaactattctttaaaatgctaaagcaggtaactttttcttccattattttttcctcctaccactgagttttgtaatgaattccttgtgtatacaagcaatacaggtgaatactaaactgttatttttagcttcttcaaaagctattttagaaagcttcctggaaataaatgtcttctgtcatttaatttaaataaaaggagtgttaattgttcccaaatttgattacctagctgaaacagatattggattcagcatagtaatagtaaaataaaattggcagagaaaataactgtagactaggataaagcatgactcctccatagcattgttgcttgtatgtacatctgtcactccactgaaagggacctagtcactttaaagaggccttttatctcagcacgagatatccaagcgtgaatgctaaggcttgatgtttccattaggatttagcattcgagatttcagattttatttatagtcattgatgtgttttgctgtattataacacatttaagggaaattttattatggtttttacatgtagtcatttcataaaaatatccagataggtaaatggaagaaaatagtagattttagtcatggtaccaaatgcaagaggctgttgaacagttgcttgtttgtttacagtaagttccttgagattttcagtactgtagttgccctggacattgagtacagttcagccttactctgtttttaagtagttgtgttgtcaatttcatgcttttaagtcctgatgatccttggagatgggagaaaaagataccagggataattaaaatccacagccagtttcatcagtttcctcatccatcctgcaaataaaaatgttaacaaggagccaaacttattcgttctggttttacaatttattttgaccgttttttgggtgaaaattgcaaacagccaagcaagtggctggaatgccccagtctaagaaattcaaaaacaatcactgagtaagccctaattacattaattacattttactcttgactccaggaaaagaaagcaagcttttatctaatctagagggaagtattcgtgagcaataaaaatcacttttttgagttgaataataatcagttaagaatatttaccgcatagcaacacaacatataaagatttgttacaagttgtttacggatgtttgactatttttgctgaagtattttagagtattgaatgtcttctctcttcaagtttctttcatgttcctaatttcagctcctgtagccagagatcacaggtcttccctgtgaaactttggtttctttctataaatgtgtgtggttttcagcgctcaactcctgtcttcaaatggtagtaagttctacttctacttctgtcattcagaacattttatgtcaaatgatgtaatgcagaaattcttgtgcatatttgtaactgaaggaagctttttagatttatttttgtttttaataaaattcagattcctattctaaactggta

SEQ ID NO: 12805 - DNA, 4558 bp, Homo sapiens
gggatcatgtctacagcctctgccgcctcctcctcctcctcgtcttcggccggtgagatgatcgaagccccttcccaggtcctcaactttgaagagatcgactacaaggagatcgaggtggaagaggttgttggaagaggagcctttggagttgtttgcaaagctaagtggagagcaaaagatgttgctattaaacaaatagaaagtgaatctgagaggaaagcgtttattgtagagcttcggcagttatcccgtgtgaaccatcctaatattgtaaagctttatggagcctgcttgaatccagtgtgtcttgtgatggaatatgctgaagggggctctttatataatgtgctgcatggtgctgaaccattgccatattatactgctgcccacgcaatgagttggtgtttacagtgttcccaaggagtggcttatcttcacagcatgcaacccaaagcgctaattcacagggacctgaaaccaccaaacttactgctggttgcaggggggacagttctaaaaatttgtgattttggtacagcctgtgacattcagacacacatgaccaataacaaggggagtgctgcttggatggcacctgaagtttttgaaggtagtaattacagtgaaaaatgtgacgtcttcagctggggtattattctttgggaagtgataacgcgtcggaaaccctttgatgagattggtggcccagctttccgaatcatgtgggctgttcataatggtactcgaccaccactgataaaaaatttacctaagcccattgagagcctgatgactcgttgttggtctaaagatccttcccagcgcccttcaatggaggaaattgtgaaaataatgactcacttgatgcggtactttccaggagcagatgagccattacagtatccttgtcagtattcagatgaaggacagagcaactctgccaccagtacaggctcattcatggacattgcttctacaaatacgagtaacaaaagtgacactaatatggagcaagttcctgccacaaatgatactattaagcgcttagaatcaaaattgttgaaaaatcaggcaaagcaacagagtgaatctggacgtttaagcttgggagcctcccgtgggagcagtgtggagagcttgcccccaacctctgagggcaagaggatgagtgctgacatgtctgaaatagaagctaggatcgccgcaaccacaggcaacggacagccaagacgtagatccatccaagacttgactgtaactggaacagaacctggtcaggtgagcagtaggtcatccagtcccagtgtcagaatgattactacctcaggaccaacctcagaaaagccaactcgaagtcatccatggacccctgatgattccacagataccaatggatcagataactccatcccaatggcttatcttacactggatcaccaactacaggcaagaactagttgcagaactggaccaggatgaaaaggaccagcaaaatacatctcgcctggtacaggaacataaaaagcttttagatgaaaacaaaagcctttctacttactaccagcaatgcaaaaaacaactagaggtcatcagaagtcagcagcagaaacgacaaggcacttcatgattctctgggaccgttacattttgaaatatgcaaagaaagactttttttttaaggaaaggaaaaccttataatgacgattcatgagtgttagctttttggcgtgttctgaatgccaactgcctatatttgctgcatttttttcattgtttattttccttttctcatggtggacatacaattttactgtttcattgcataacatggtagcatctgtgacttgaatgagcagcactttgcaacttcaaaacagatgcagtgaactgtggctgtatatgcatgctcattgtgtgaaggctagcctaacagaacaggaggtatcaaactagctgctatgtgcaaacagcgtccattttttcatattagaggtggaacctcaagaatgactttattcttgtatctcatctcaaaatattaataatttttttcccaaaagatggtatataccaagttaaagacagggtattataaatttagagtgattggtggtatattacggaaatacggaacctttagggatagttccgtgtaagggctttgatgccagcatccttggatcagtactgaactcagttccatccgtaaaatatgtaaaggtaagtggcagctgctctatttaatgaaagcagttttaccggattttgttagactaaaatttgattgtgatacattgaacaaaatggaactcatttttttttaaggagtaaagatttttaattctgtgattgtgtgtatgtgtgttgaaactgtaaagcttttatgactctaatattaatctcttaaatgaaattaaaaggcaaaagaacatgattgagcttaaatgatcatttcttcctgcagtgattcttggattgttttctcatgtatttgaaaaaaaaaaaatgaagaaaaataatggaaaatggaagtaattactccagctaaaaaaagcttggacttagatttctttttatgataccaaatgagaaataaaccaggcaaatcagaaggaagttaaagaagcaaatataaattcaacaagtgtcctaattatcctggatattggaatatttgattttccttacaatcccgttctagaatgcctgccgcctttcaacactttcaagagaatttcaacacttacagagtatttatattgttaacagtaattttgctaccaaaaccttcagaataactttaataataaaatgacactgaaataatagactatacaaactctatattttttcagttggtgttaaaataagtcacattttgataccagtacaagatgtcttttaaataaggatgtcatcagtctgatttttatagcattaatgttttatgaagaaaaagttcaaaatgaaagcattaattgctgtgattattagaattctatcatgactgtattgtagtttttgctctatttcagataagcaagatctaagaagttatcaaaactattctttaaaatgctaaagcaggtaactttttcttccattattttttcctcctaccactgagttttgtaatgaattccttgtgtatacaagcaatacaggtgaatactaaactgttatttttagcttcttcaaaagctattttagaaagcttcctggaaataaatgtcttctgtcatttaatttaaataaaaggagtgttaattgttcccaaatttgattacctagctgaaacagatattggattcagcatagtaatagtaaaataaaattggcagagaaaataactgtagactaggataaagcatgactcctccatagcattgttgcttgtatgtacatctgtcactccactgaaagggacctagtcactttaaagaggccttttatctcagcacgagatatccaagcgtgaatgctaaggcttgatgtttccattaggatttagcattcgagatttcagattttatttatagtcattgatgtgttttgctgtattataacacatttaagggaaattttattatggtttttacatgtagtcatttcataaaaatatccagataggtaaatggaagaaaatagtagattttagtcatggtaccaaatgcaagaggctgttgaacagttgcttgtttgtttacagtaagttccttgagattttcagtactgtagttgccctggacattgagtacagttcagccttactctgtttttaagtagttgtgttgtcaatttcatgcttttaagtcctgatgatccttggagatgggagaaaaagataccagggataattaaaatccacagccagtttcatcagtttcctcatccatcctgcaaataaaaatgttaacaaggagccaaacttattcgttctggttttacaatttattttgaccgttttttgggtgaaaattgcaaacagccaagcaagtggctggaatgccccagtctaagaaattcaaaaacaatcactgagtaagccctaattacattaattacattttactcttgactccaggaaaagaaagcaagcttttatctaatctagagggaagtattcgtgagcaataaaaatcacttttttgagttgaataataatcagttaagaatatttaccgcatagcaacacaacatataaagatttgttacaagttgtttacggatgtttgactatttttgctgaagtattttagagtattgaatgtcttctctcttcaagtttctttcatgttcctaatttcagctcctgtagccagagatcacaggtcttccctgtgaaactttggtttctttctataaatgtgtgtggttttcagcgctcaactcctgtcttcaaatggtagtaagttctacttctacttctgtcattcagaacattttatgtcaaatgatgtaatgcagaaattcttgtgcatatttgtaactgaaggaagctttttagatttatttttgtttttaataaaattcagattcctattctaaactggta

SEQ ID NO: 12806 - DNA, 4932 bp, Homo sapiens
ggcggaaaacgcagcggagccagagccggacacggctgtggccgctgcctctacccccgccacggatcgccgggtagtaggactgcgcggctccaggctgagggtcggtccggaggcgggtgggcgcgggtctcacccggattgtccgggtggcaccgttcccggccccaccgggcgccgcgagggatcatgtctacagcctctgccgcctcctcctcctcctcgtcttcggccggtgagatgatcgaagccccttcccaggtcctcaactttgaagagatcgactacaaggagatcgaggtggaagaggttgttggaagaggagcctttggagttgtttgcaaagctaagtggagagcaaaagatgttgctattaaacaaatagaaagtgaatctgagaggaaagcgtttattgtagagcttcggcagttatcccgtgtgaaccatcctaatattgtaaagctttatggagcctgcttgaatccagtgtgtcttgtgatggaatatgctgaagggggctctttatataatgtgctgcatggtgctgaaccattgccatattatactgctgcccacgcaatgagttggtgtttacagtgttcccaaggagtggcttatcttcacagcatgcaacccaaagcgctaattcacagggacctgaaaccaccaaacttactgctggttgcaggggggacagttctaaaaatttgtgattttggtacagcctgtgacattcagacacacatgaccaataacaaggggagtgctgcttggatggcacctgaagtttttgaaggtagtaattacagtgaaaaatgtgacgtcttcagctggggtattattctttgggaagtgataacgcgtcggaaaccctttgatgagattggtggcccagctttccgaatcatgtgggctgttcataatggtactcgaccaccactgataaaaaatttacctaagcccattgagagcctgatgactcgttgttggtctaaagatccttcccagcgcccttcaatggaggaaattgtgaaaataatgactcacttgatgcggtactttccaggagcagatgagccattacagtatccttgtcagtattcagatgaaggacagagcaactctgccaccagtacaggctcattcatggacattgcttctacaaatacgagtaacaaaagtgacactaatatggagcaagttcctgccacaaatgatactattaagcgcttagaatcaaaattgttgaaaaatcaggcaaagcaacagagtgaatctggacgtttaagcttgggagcctcccgtgggagcagtgtggagagcttgcccccaacctctgagggcaagaggatgagtgctgacatgtctgaaatagaagctaggatcgccgcaaccacagcctattccaagcctaaacggggccaccgtaaaactgcttcatttggcaacattctggatgtccctgagatcgtcatatcaggcaacggacagccaagacgtagatccatccaagacttgactgtaactggaacagaacctggtcaggtgagcagtaggtcatccagtcccagtgtcagaatgattactacctcaggaccaacctcagaaaagccaactcgaagtcatccatggacccctgatgattccacagataccaatggatcagataactccatcccaatggcttatcttacactggatcaccaactacagcctctagcaccgtgcccaaactccaaagaatctatggcagtgtttgaacagcattgtaaaatggcacaagaatatatgaaagttcaaacagaaattgcattgttattacagagaaagcaagaactagttgcagaactggaccaggatgaaaaggaccagcaaaatacatctcgcctggtacaggaacataaaaagcttttagatgaaaacaaaagcctttctacttactaccagcaatgcaaaaaacaactagaggtcatcagaagtcagcagcagaaacgacaaggcacttcatgattctctgggaccgttacattttgaaatatgcaaagaaagactttttttttaaggaaaggaaaaccttataatgacgattcatgagtgttagctttttggcgtgttctgaatgccaactgcctatatttgctgcatttttttcattgtttattttccttttctcatggtggacatacaattttactgtttcattgcataacatggtagcatctgtgacttgaatgagcagcactttgcaacttcaaaacagatgcagtgaactgtggctgtatatgcatgctcattgtgtgaaggctagcctaacagaacaggaggtatcaaactagctgctatgtgcaaacagcgtccattttttcatattagaggtggaacctcaagaatgactttattcttgtatctcatctcaaaatattaataatttttttcccaaaagatggtatataccaagttaaagacagggtattataaatttagagtgattggtggtatattacggaaatacggaacctttagggatagttccgtgtaagggctttgatgccagcatccttggatcagtactgaactcagttccatccgtaaaatatgtaaaggtaagtggcagctgctctatttaatgaaagcagttttaccggattttgttagactaaaatttgattgtgatacattgaacaaaatggaactcatttttttttaaggagtaaagatttttaattctgtgattgtgtgtatgtgtgttgaaactgtaaagcttttatgactctaatattaatctcttaaatgaaattaaaaggcaaaagaacatgattgagcttaaatgatcatttcttcctgcagtgattcttggattgttttctcatgtatttgaaaaaaaaaaaatgaagaaaaataatggaaaatggaagtaattactccagctaaaaaaagcttggacttagatttctttttatgataccaaatgagaaataaaccaggcaaatcagaaggaagttaaagaagcaaatataaattcaacaagtgtcctaattatcctggatattggaatatttgattttccttacaatcccgttctagaatgcctgccgcctttcaacactttcaagagaatttcaacacttacagagtatttatattgttaacagtaattttgctaccaaaaccttcagaataactttaataataaaatgacactgaaataatagactatacaaactctatattttttcagttggtgttaaaataagtcacattttgataccagtacaagatgtcttttaaataaggatgtcatcagtctgatttttatagcattaatgttttatgaagaaaaagttcaaaatgaaagcattaattgctgtgattattagaattctatcatgactgtattgtagtttttgctctatttcagataagcaagatctaagaagttatcaaaactattctttaaaatgctaaagcaggtaactttttcttccattattttttcctcctaccactgagttttgtaatgaattccttgtgtatacaagcaatacaggtgaatactaaactgttatttttagcttcttcaaaagctattttagaaagcttcctggaaataaatgtcttctgtcatttaatttaaataaaaggagtgttaattgttcccaaatttgattacctagctgaaacagatattggattcagcatagtaatagtaaaataaaattggcagagaaaataactgtagactaggataaagcatgactcctccatagcattgttgcttgtatgtacatctgtcactccactgaaagggacctagtcactttaaagaggccttttatctcagcacgagatatccaagcgtgaatgctaaggcttgatgtttccattaggatttagcattcgagatttcagattttatttatagtcattgatgtgttttgctgtattataacacatttaagggaaattttattatggtttttacatgtagtcatttcataaaaatatccagataggtaaatggaagaaaatagtagattttagtcatggtaccaaatgcaagaggctgttgaacagttgcttgtttgtttacagtaagttccttgagattttcagtactgtagttgccctggacattgagtacagttcagccttactctgtttttaagtagttgtgttgtcaatttcatgcttttaagtcctgatgatccttggagatgggagaaaaagataccagggataattaaaatccacagccagtttcatcagtttcctcatccatcctgcaaataaaaatgttaacaaggagccaaacttattcgttctggttttacaatttattttgaccgttttttgggtgaaaattgcaaacagccaagcaagtggctggaatgccccagtctaagaaattcaaaaacaatcactgagtaagccctaattacattaattacattttactcttgactccaggaaaagaaagcaagcttttatctaatctagagggaagtattcgtgagcaataaaaatcacttttttgagttgaataataatcagttaagaatatttaccgcatagcaacacaacatataaagatttgttacaagttgtttacggatgtttgactatttttgctgaagtattttagagtattgaatgtcttctctcttcaagtttctttcatgttcctaatttcagctcctgtagccagagatcacaggtcttccctgtgaaactttggtttctttctataaatgtgtgtggttttcagcgctcaactcctgtcttcaaatggtagtaagttctacttctacttctgtcattcagaacattttatgtcaaatgatgtaatgcagaaattcttgtgcatatttgtaactgaaggaagctttttagatttatttttgtttttaataaaattcagattcctattctaaa

SEQ ID NO: 12807 - DNA, 4830 bp, Homo sapiens
ggacacggctgtggccgctgcctctacccccgccacggatcgccgggtagtaggactgcgcggctccaggctgagggtcggtccggaggcgggtgggcgcgggtctcacccggattgtccgggtggcaccgttcccggccccaccgggcgccgcgagggatcatgtctacagcctctgccgcctcctcctcctcctcgtcttcggccggtgagatgatcgaagccccttcccaggtcctcaactttgaagagatcgactacaaggagatcgaggtggaagaggttgttggaagaggagcctttggagttgtttgcaaagctaagtggagagcaaaagatgttgctattaaacaaatagaaagtgaatctgagaggaaagcgtttattgtagagcttcggcagttatcccgtgtgaaccatcctaatattgtaaagctttatggagcctgcttgaatccagtgtgtcttgtgatggaatatgctgaagggggctctttatataatgtgctgcatggtgctgaaccattgccatattatactgctgcccacgcaatgagttggtgtttacagtgttcccaaggagtggcttatcttcacagcatgcaacccaaagcgctaattcacagggacctgaaaccaccaaacttactgctggttgcaggggggacagttctaaaaatttgtgattttggtacagcctgtgacattcagacacacatgaccaataacaaggggagtgctgcttggatggcacctgaagtttttgaaggtagtaattacagtgaaaaatgtgacgtcttcagctggggtattattctttgggaagtgataacgcgtcggaaaccctttgatgagattggtggcccagctttccgaatcatgtgggctgttcataatggtactcgaccaccactgataaaaaatttacctaagcccattgagagcctgatgactcgttgttggtctaaagatccttcccagcgcccttcaatggaggaaattgtgaaaataatgactcacttgatgcggtactttccaggagcagatgagccattacagtatccttgtcagtattcagatgaaggacagagcaactctgccaccagtacaggctcattcatggacattgcttctacaaatacgagtaacaaaagtgacactaatatggagcaagttcctgccacaaatgatactattaagcgcttagaatcaaaattgttgaaaaatcaggcaaagcaacagagtgaatctggacgtttaagcttgggagcctcccgtgggagcagtgtggagagcttgcccccaacctctgagggcaagaggatgagtgctgacatgtctgaaatagaagctaggatcgccgcaaccacaggcaacggacagccaagacgtagatccatccaagacttgactgtaactggaacagaacctggtcaggtgagcagtaggtcatccagtcccagtgtcagaatgattactacctcaggaccaacctcagaaaagccaactcgaagtcatccatggacccctgatgattccacagataccaatggatcagataactccatcccaatggcttatcttacactggatcaccaactacagcctctagcaccgtgcccaaactccaaagaatctatggcagtgtttgaacagcattgtaaaatggcacaagaatatatgaaagttcaaacagaaattgcattgttattacagagaaagcaagaactagttgcagaactggaccaggatgaaaaggaccagcaaaatacatctcgcctggtacaggaacataaaaagcttttagatgaaaacaaaagcctttctacttactaccagcaatgcaaaaaacaactagaggtcatcagaagtcagcagcagaaacgacaaggcacttcatgattctctgggaccgttacattttgaaatatgcaaagaaagactttttttttaaggaaaggaaaaccttataatgacgattcatgagtgttagctttttggcgtgttctgaatgccaactgcctatatttgctgcatttttttcattgtttattttccttttctcatggtggacatacaattttactgtttcattgcataacatggtagcatctgtgacttgaatgagcagcactttgcaacttcaaaacagatgcagtgaactgtggctgtatatgcatgctcattgtgtgaaggctagcctaacagaacaggaggtatcaaactagctgctatgtgcaaacagcgtccattttttcatattagaggtggaacctcaagaatgactttattcttgtatctcatctcaaaatattaataatttttttcccaaaagatggtatataccaagttaaagacagggtattataaatttagagtgattggtggtatattacggaaatacggaacctttagggatagttccgtgtaagggctttgatgccagcatccttggatcagtactgaactcagttccatccgtaaaatatgtaaaggtaagtggcagctgctctatttaatgaaagcagttttaccggattttgttagactaaaatttgattgtgatacattgaacaaaatggaactcatttttttttaaggagtaaagatttttaattctgtgattgtgtgtatgtgtgttgaaactgtaaagcttttatgactctaatattaatctcttaaatgaaattaaaaggcaaaagaacatgattgagcttaaatgatcatttcttcctgcagtgattcttggattgttttctcatgtatttgaaaaaaaaaaaatgaagaaaaataatggaaaatggaagtaattactccagctaaaaaaagcttggacttagatttctttttatgataccaaatgagaaataaaccaggcaaatcagaaggaagttaaagaagcaaatataaattcaacaagtgtcctaattatcctggatattggaatatttgattttccttacaatcccgttctagaatgcctgccgcctttcaacactttcaagagaatttcaacacttacagagtatttatattgttaacagtaattttgctaccaaaaccttcagaataactttaataataaaatgacactgaaataatagactatacaaactctatattttttcagttggtgttaaaataagtcacattttgataccagtacaagatgtcttttaaataaggatgtcatcagtctgatttttatagcattaatgttttatgaagaaaaagttcaaaatgaaagcattaattgctgtgattattagaattctatcatgactgtattgtagtttttgctctatttcagataagcaagatctaagaagttatcaaaactattctttaaaatgctaaagcaggtaactttttcttccattattttttcctcctaccactgagttttgtaatgaattccttgtgtatacaagcaatacaggtgaatactaaactgttatttttagcttcttcaaaagctattttagaaagcttcctggaaataaatgtcttctgtcatttaatttaaataaaaggagtgttaattgttcccaaatttgattacctagctgaaacagatattggattcagcatagtaatagtaaaataaaattggcagagaaaataactgtagactaggataaagcatgactcctccatagcattgttgcttgtatgtacatctgtcactccactgaaagggacctagtcactttaaagaggccttttatctcagcacgagatatccaagcgtgaatgctaaggcttgatgtttccattaggatttagcattcgagatttcagattttatttatagtcattgatgtgttttgctgtattataacacatttaagggaaattttattatggtttttacatgtagtcatttcataaaaatatccagataggtaaatggaagaaaatagtagattttagtcatggtaccaaatgcaagaggctgttgaacagttgcttgtttgtttacagtaagttccttgagattttcagtactgtagttgccctggacattgagtacagttcagccttactctgtttttaagtagttgtgttgtcaatttcatgcttttaagtcctgatgatccttggagatgggagaaaaagataccagggataattaaaatccacagccagtttcatcagtttcctcatccatcctgcaaataaaaatgttaacaaggagccaaacttattcgttctggttttacaatttattttgaccgttttttgggtgaaaattgcaaacagccaagcaagtggctggaatgccccagtctaagaaattcaaaaacaatcactgagtaagccctaattacattaattacattttactcttgactccaggaaaagaaagcaagcttttatctaatctagagggaagtattcgtgagcaataaaaatcacttttttgagttgaataataatcagttaagaatatttaccgcatagcaacacaacatataaagatttgttacaagttgtttacggatgtttgactatttttgctgaagtattttagagtattgaatgtcttctctcttcaagtttctttcatgttcctaatttcagctcctgtagccagagatcacaggtcttccctgtgaaactttggtttctttctataaatgtgtgtggttttcagcgctcaactcctgtcttcaaatggtagtaagttctacttctacttctgtcattcagaacattttatgtcaaatgatgtaatgcagaaattcttgtgcatatttgtaactgaaggaagctttttagatttatttttgtttttaataaaattcagattcctattctaaactggta

SEQ ID NO: 12808 - DNA, 21585 bp, Homo sapiens
ttttagacagctgatctctcacgttagaagatactgcataaacagctttattcccaaataaaagtgctgagtgaagccattgctcaattcattgttttgctgaggacttatatgtgtagaattctctcataaattgatttttaattaaattaattataaacatagaagtttctaaagcagaattaacacaatagcccatttcaacaagctgtatatttgagaacagagtgacagttattaacatccagtaggaaattaagagttgttgttcacaaataataaattactagattctgacaaagactaatggggattaagtaagcgtgactcaatataacaaatttaagcctaagcatcttctaggccctgaaatgaacaaggtattgctgccagttaaagtcagttgtgtcttacaacctgctagctgtcttgctgtaaaaactgtaacgtaaggcccttgaaatagatgccgtcatcagccccagcccccaagcattcatctatttaaacacatgacagaagatggtggaagagagttcagcagctattcatgtggtagaagtggttattgtattaggacatactctgttgtaggccagcaacttttgagttaaaacaccgcagctgtttctcttcctttctttacatctttctcttcttttttttttttcttagcaataaactcacttttttttccccacaaacattttgtgtagatccaaggagcaacaaattccaactttctgctgtagcaattacacgctttttgtctgtttgactagattttagtattttactttttttcttctttttaaaggcaacggacagccaagacgtagatccatccaagacttgactgtaactggaacagaacctggtcaggtaagacaacattcaaattttctatctttgaagaatactaggcagaaaacaagaattaactgtattctactctgcaaaattagttttatgagttgacctaaagttgtgatagagaaattcattgcacctgaacttaaatacttaggggggaaaaaaacataggtgccattgttaatttaacttgaaagataatttattaaagtaggtttattaaactccatggaaaagtaaattgttcattagcgctgtatatatgttatatggttttatgtatgttttaataagtattcaattttataatttaacaatttatcattaaagtgtcctttaaagtgaatcattaatatgtctcctttttactaataagggtagtaaacatttccccaataagttgctactcctctagcgccacgtagggcattacatggagaactctaacgtcttttaacttggcatatccactggattaatatttttttcaaatatccttaagataacatttactaagcaaatgtgtaaactctcgaaaggcttctattccagtggttaagatttcattgtttatatttctggatcctcctctaaactctccttgtctctttatcactgctgctttgcagatgatgcagacagtgttataatttaagccattactgattagtgcagagttttaacccaccaggtatataaaagtagctcagtcattgttttttctgtgttactcagattaatacacttgacatatataatttattatatactatattctgtaaaatgaatgaagattaattataaggtgtttgttttcagctgtacaagaataagttttatgagagcagcataaaagtaatgaaattaagtaatgaaattgttacatattaagaagtattaagtattaaattattaagtattaagtaatgaaattattacatcgtgacccatatttttgtaaaattttagcgtttatatattataaacaatctgttgtaatttatgataatatgtattagtacttgtcatcctaaaaaggtattttattattatatcatttgtataatatacttaaaatttgggagatcctttgtagtcattaataaaaaagtcttttatacccatcaaccaacttaccaaaaaccacttcaaatatttaagtggtgaatatccttgatcttcatttatatctggaaatatgtttatttcacaaaatgcttataaacacatatataaataaaatctatatagacacattaatttattatgttttgtgatactagtgactctaaatcttgatttcattatttagtgatagtttttttcagtgcatctgtttttgtaagaccccagaacttttggctgaagtttcccgttttctccccctcagatacttaaaagttttaatcagcccatttagtaacagatagtttgacatctgctatttgctttgattctttggaggtttgatgagctcagccttttaaactctgtttactattgccactgatattccagttatgagaacttctagccaactgtttgactaggaatgagaagcttgtcctaagacatgtcaggagcagctactagtttgaaagcttttctgtagactctagaataaaagtgttgccataattcaggactgatcttcccacaccaagtcttacttatttcttcacaagttccacattatttgagattttcgttgttacccttttaattcacaataccttcaggtagtaaaacgctggaactgaggccaactatgggtgtgggacagtcatttgtggaattgtcatagaccactctgaaagatttggggtgagggagagtttgatatgggtgagggagagtttgatatggcagtaaaacctgttctgaaacaggtgatgtatgaccattgtgtagccacattttaaaactgatccactctttcaaaattatttgtgttatagccttaaaatgcctaatgttcagcttggcatgagagtggcaaatactaatcctaatgtactatgaaaacatttctcccaaaaaatgtatgataagtgaccattaaatcttttaaattactcacaaagatgatattcatttgaggaagaaaagtattcacaatatgtgttttcaaaattggaaggtgccatcctttttgaagtctggctaagcgtgattccatcttgcagaggaaagtaaacttattgtactgtggctcttgactcaaaacataatcttagtaaaaccacttagaatttccatctgtaaactaaaattaaattggttgtttttctgctgccatccatttgagaggaacagtaaatgaagcaagcttcttaattaaaagtaatgatataagtataggtgtaaaagattgcattcttacaacatacaactcactttcaaacatggttttttcattaattcaggaagctttttaaacactcaatagatgtgacttcctagaagctttgaaaagatactgagaaagaaaaaagcagtccctgacatccaggaactggtttgacactgtggcctcactgttgttagtagctagccttattctcaacggctggctgtcacagctagagcatgttactgtcttattggacataatctctcagaacaccaatatcagacaagataatgctgagaccgtgataaaaggagacaaaacaagactacttcggaatgttttctaagcacagacaaaaacaaggtcactgtgccacccacaaaatacctaacattgtcctctcccagctattaagagtgactgctgcttctttaccaattacagcttggtcctcactctggactgccctccctgtggaattgcccttgctttctgacagcggccaatctggaacgaacccctccttcctttgagtttccccaaaatcactcaaccaaagcctaaatcctataatactttctttttctaaaaccctcttactgagacaccccatgctgccccatggtaagcattctccttcactgcaataaatattaaacccaactctttccactattggtgtgttcctggcagtctttggctagagggctttgacaataccaataaagcctattccgcaaggacctcatttggagagatcagacttatgcccaaatcaattagaaaactaaagtaataacagcttccatttgttgtgcactgactttgtgccagataggctcttagtatacattatcagaatgttaatcctgttatcaggatcttagtcctgtgaagttggtactttttcacctaatttgcagccaggtaaagtgaggatgagagaaactgacctaagtctcttacttccttatactgccagtaattcctataaccaggttttgaatccagacctgattgcaaagcacacaaactctatactttaatcattctaacttgcatgtgaaactagatgtgatgcatgctgttatagccctagatctcttacatttaggtattttggcttctaatagtctgcattgtcattaattatttaaacagttgttaagtgatgatgaattgtagctgtatcatatcattgaacaaggttaacctatcttgataataaatttctaccaatgactgcacaaatttatgttttatacacctgggtgagccattctgtgtttcactaaaacaatatacattcttataaatgcctgaataccccttctggaattgtattcagtatagatctatattcaagaattctcttagaggaggctgcagtcagtgaaaattacgactgcaagatgatacagttatgattatttagagaagtgggcatattacatttccatatggactttataatctacttttactagtcaaatatgtgactttgggcaagttccttaatttccctgagcttctgcacccttatctgcaaatagggaccataacacccacctcccagagttcttaacagatgtgaaagtgccagggcacacagtagatactaatccatgttgtatgccagcctctccacagtgtgcctcaccgggctcttgatatcacttccttgctctcatgatagtgagaaataaaaagaaaatagcacttggaaagaagtaaaatccaccagcgttctttctgtatcataaggaaaccttgtgtcaaggatcatggaaagtatttgctttaaaggtctcttatcgcatattgagtgatattaatatacattgttattatttatttaagggatgtgatttattatactacttttttccatcttcattctgcacctccttttgtgtaaacaaatgttctggtaaactctaaatcagaaacttatgtaatagttttgaataattccttcttcatagtatacctttctattggagaatagacacgtttcttcttttttttttttttttccgagacacagtccccgctgtcagccaggctggagtgcagtagtgtgatctccgctcattgcaacctctgcctcctgagttcaagtgattcttccacctcagcctcccgagtagctgggattacaggcatgtgccaccacacctggctaatttttgttttatttttagtggaggcagggtttcaccctgttgcccaggctggtctcgaacttctggcctcaagcgatctgcccgcctcagcctcccaaagtgctaggattacagtcgtgagccactatgcctggcctctgttggagaacagacacctttctattgtagaagaccatgtaagaataataaaattctgaaatttccttatgaaaaactgtagtgaagccaaaatagatcaagcctacagacctttagattagaaagaatattttcagtacaaccttcatgtatagatttaattatctgtaactaccataataagtacccatgtaaatccacattaccaacttatacccattttaaaaatatttatattattgagatgttactttagcaagaatatcatagaagtcatcatttaatctctgtgttttgtgcttgtataattttagctactaagatttctgagggtattaaatagcttttaaatgtcagtctaaataataacactgggtgtaaattcctgacttatgaaaatattttcccagtctttcaggtaagatattaaaagctgagctttatttttgtctgtaaaataacttccaattcctttttataaatatagggataaatttctggtcaaaggccaattctggttcatgtctactgatggtaatctgcccctgaggtttaaatttggcttagtattcttttgctgccttaaattgctgtgtcacgtttctatactcttgtgactttcatatccagttcttttggtaagtcaagtttgcctatatctcttaaactttgcaattaatgtggggatagaataagtaattttaaatgtcttagaggaaggagcaacttaaatgagttttaatagtttgagagcatttgtgaccctcagaattttaccagtgattttaaaaaataagtactgtaaaaacttcttcagtagttggttacaagcagtaacataaattcagccacaaactagtttgagttttttcattgattgtcagatgttatgtgttcctcttatttatgccttgtattattcacatactcaaaaactacagttatgccttgtttttaaatatttccttagtttttttatacaaacatattagcatatttttatttattgagatacacatttcttaaaatataaagatttatttattagttaatggatttaaatctaactgtgctggtctaaaaacagttttgaaacttgcattaaaagtgcaagccttatatttcttagtttcatagctgttggaaattacaagtgggacaaacaagcatgcacagaaggtgctaagagtttcttggaaagtagaaggtgaaaagaaaggtgtagcaaagaatcattttgcaaaagatttaagcttaaggagtactataaaattcctattaggtccaacttatttgttttaatattgcagatgttcagtgacctcttttttaaatatactaaatccattctcattttaaaaacctaattattacttctactgtattttgttgatttctcacaactgatactgattcttacatgtcacaaacatgtgtttctctttttaaaatgtgcattagcattacactgactctgaaaccctggtctgccaccactttgaaggaaaaatgcctttgatttataatagcagttataactatgggcatatttgtgtacttgctttcagtcaaagaaagttaaaaagactcaggaataatttcataatgtctatacttgctttgtcaagggtaaaagtatcctaaaagtaagagtgaaacatttcatcactggttttctttggtgtatgtcgttgttattcttatatactaaaggtaaataagcttaagcaccaatcttgtatctgagtgctaatagcttgtgttctcattttattcaatgagtatctattatgtgtttattatatattcagcaatttcccagatcctgggaagtacaatataaaaagtacgcatggtctctgcccttaagaggttataatacttttgaagaggagtaaaactttgagactactataatttcgggcacaagttgaagtaggaactgactatacagccaaaattcaaagaagaaaaaaatctcgtgtgaagacatttcatgtacatcatttcatttaatttttataaccttatagatagataatactgtccttattttcctattgagtcttagaggttaaataagttacccaaagctgtactagttagaaatggcagagcacagtcaaactctgggctgtcttgtctccaacacccaacttcttactgctactactttttctcattcacacttcatcaatgagaaacctaagtctcagagaggctaagttacttacacaggttcacacagctgtaagtggcagaatggagacataaccccaggtctccaaagtattagactgaaacatgtgaagttgctgagttttcaactacaaaaacaccagttttatctggttcagttttatgcatgccctgtgcactacgccgtattatctttaggtgaatatgaggtcaggattaaaaactgcaagggaaacaggggcatgaggaattttaagaggagagaaaatccagatgggcaaggtaaacctgctgatggagagtcatgaatgccagagtgagaatttcagaattgattcagtaacaatcagtaaacgaacattttgcctgcagtacactgttaggcactccatgtcctcaaacacaaggtctggccttgtacacaaacaaccagagaagtggcaagaatcaccacataatgtagaagaaaacctgagctgggccttacagggtggggaaggattaacaaggagaagaaaagaacagaatgagcaatcttatatggagttaaaaattggttatggtgtagaaaagctttttggaatttctgaagcaatttcagtgggtacccaaaatgaaagtcatatttcatcagtttttcttcaaagttaatttatgatttttttctctgaaattgttaggaaagtacctttcactaaaagtataattagattgtttgtaacacaaaggataaatgcttgagggaatgggtaccccatttttcatgatgtgattattatgcattgcatgcctgtgtcaaaacatctcatgtgccccataaatatgtacctactatgtacacacaaaaattaaaaattatttttaaaaaaacagaaatgagaggaaaacaaagtacctgtcactgtttattatcctgaatccattgtggcttttcaagacctaaaatcatataattttagcactatatggaacacttctcatcacattcttaacccagccccaacccctctccagataaagagaggttgaagtgatctgaagcagacattacagcataattagaactcacatacgatggattctactcaaaggtacttttgtattgcatttcattttacttgttgcagtcttgaatttgagtgtttgtatatatgttgaagctagatataagattcttcatgaatttattttaagttttattttctataactccatgttcttttttaagtctcttctttggtactcagtaacacatcaagaaaaaaaaggtgctttttaaaaagtccttatgaggccgggcgcggtggctcacgcctgtaatcccagcactttgggaggccgaggcgggcggatcacgaggtcaggagatcgagaccattctggctaacacggtgaaaccccgtctctactaaaaatacaaaaaattagccgggcgtggtagcgggcgcctgtagtcccagctactcgggaggctgaggcaggagaatggcgtgaacccgggaggcggagcttgcagtgagccgagatcgcgccactgcactccagcctgggcgacagagcgagactccgtctcaaaaaaaaaaaaaaaaaaaaaaaaaaaaaagtccttatgaaacccattttagtttctgtgtcctttgaaaggctttaatatatgaaatataaatatgtagacaagaatgtatataatgtataagttatgaaaataaaatgagcacttgtgaacccaccacccagcttaaggaatggaacattagcaatcccagtgggggttggtccctgtgtgttcctcgcctgtggccttccctgtcatttccccaccaaccctcagtgccatgttctgtcatatgtcatgtttccagatatcataaataccttttatctgattaagaagtcctcttcccactgggcacaggggctcacacctataatcccagcacgttaggaggctgaggcaggaggatcgcttgagcccaggagttcaagaccagcctgcacaacacgggcgagaccccgtctctacacaaattttttttaaaattagccatgcatggtgccgtgagcatgtggttccagctactgaggaggctgaggtgggaggattacttgagcccaggaggtcaaagctgcagtgagctgtgttggtgccattgcacaccagcctgggcaagagaacaagaccctgtctcaaaaaaaaaagaaagaaagaaaaagaaattctcttctcatacatggaatttaagtttgttaaatgtcttttttataagtagatgttaaatgttgtcaaatgctttttctgcatctgttgaggttttgtcctttaatctgttgatgtgattaattttattaatggaatttcctaatgtcagatgagtgacctttgcagtcatttgcaaagttggataaactaaactttttaaatggtttttattgcttctacactgccacattatatttgctaatataatttttagaaattttgacttttgtgtctttttatttttattttatttttttggaagtgaggttcagttgtaactttctttctcacactgtccttacatattgatttttactgccttcacagaatgggtcagaaagtttcttctttctttgtttaggataatttaagattggaaaaatccttatcttgaatgtttgatagaacttacctgtaaaaccctcctctgtgcttggtattttctataatgtataggaatttttgaaacttttttttaaagaatgtgttcatttttatagtattgtctccgatttcaaaatactatcttttactatttttcattttgggaggcaaattcttttttttaactaagttagatctctagcttataaattgtcagtgtttctggttttttcatatatatatttagaattaaatattttcctttaaatgctcttatagtcacatccccaagtattagcatgattcacgttaaaagtcagttcaagtactttctaatgtcccttttgttttcttctttgaccaatgagttatttagaagtgtttttcaaaacaaaagatttttaaaggttttgaaatcagtataaaaagtaattaagttatgatactgaaattttttttaactttgagatttgctttatagcttagtacataatcagttttcattagtgtcccatgaatgcttaaaaagaatgtgtattcttcatttgctaggcgtaaagtcacttatgtttagattaagcttgttttttatggagttcaagttttactgtgtgtgttttgttttgtttttttggtctccttttatataatttacagaagaatattaaaatatattactgtggggctgggcacagttgctcacacctgtaatcccagcactttgggaggccaaggtgggaggatttcttgaagccattaggtcagcctgggcaacataacaagatcccatctctacaaaaagtttaaaaattagccaagtgcaatatcatgtaactgtagtcccagctactcaggaggctactcaaggaggatcacttgagcccaggagtttgacgatacctccttgagcttttttactttatgtgtttatatgtacagcatataaattttgaattgttggccaggcacagtggcttatacctgcaatcccagtgctttgggaaactgtggagggaggatcacttgaggccaagaggtagagaccagcctgggaacgtagcaagaccctggctctacaaaatattttaaaattaactgggcatagttgtgtgtgcctgtagtcccagttactcgggaggctgagatggaaggatcgcttgagcccaggagtttgagggtacagtgagccatgatggtaccactgcactccagcctgggcaacagagcaagaccctgtctttaaaaacaaatctcactgtgatggtggatatgtcctttttccttgcagttttttgatttatctatttgtatgtacagcatataaattttgaatcgttggccaggcacagtggctcatgcctgtaatcccagcacttagggagactgaggcaagagggtcacttggggccaggagattgagagaagcctggtcaacatagtaagacccatttctacaaaaaaaaattagtttttaaaaaataaattttgaattgttgtattctgaattgaaccacttatcatattatctctttctctagtaattttttggaccctaaaatacattctctctgatattaatataggtaccttatttggggtagtttttgcctggttttctttttttatcctttaactttctgttttctctgtctctgtaaattagatatgtctcttataaatagcatttaattcatcctgacaatctgatttttttttaaatatcttaactggagagtaattcatttacatttattgtggttactgataagtttgctctcttatgttttatttctctttcttttctttcaagttttgagttgaataaatttattcttcattttattattttctttctggtttgggagttatatattaattactacttttagtaaatacctttgaaattttaacattcatgcccaacctagtaaagatctgtaccctcatcctgaacaatatttaaaacaaggagttttaagtcagtgcttttcatgcttgtgctattgttattataattttagtgccatcttgtttgtttgataattctataaattcactgtttctgtcactgaatgttttcagtgtgtagatttatttccctgtttatcactattccttattgcatcttgatccttctatcaagtaaaatttttcttcttccaaaaatacatgcttgaaaaacttatgtggtaagaatgtatggaaggtaaactcagtttttgcccatctaagaatgttattttggcctctatcttcaaattttgttggctagacaattctagactggcagttatttttcagcactttgaagatattgttctgctttcttctggctgctttttctgtctcctgttgattgtttcctagaatttgaatgtatacgttccatgttgaactcaatttgtgagcttcctcctatttcttatgctggggatttgttgtggttggaatttgttgtaacctgcatccaatctggaaattttttgtggattcacagttaatacatttctcccttccacccagagccactaacccaagagagacaaatttgtttcctgtctgcttttgtaggtcagattttttttttcctagttgagtgaccttttctctgagagtgaagcctttgctgagttttagctttaagcagaggtttctccagtcttacttccatcctacaaaggcccaaggctttatggtccattcctctgagtgcagcagcctgtgaaaacagtagctctaggccattggtgtttagttgaaattccgagggctgtcagcttaagcacttactagtttcctgatattgttttgtttctaatctcagagtatttcttagtttcttgcaagctcatcagtttttaataggtatcatgcgtgagtgaatataaatttttacatatatataagagaggatttattttgttgtttacaagagttttggggggatctctaagtctcttcttgccttttaatggaaacgttctcgtcattttttttaatcaaaaaatcacattttgtttctcctgtgacttcttcctgtaggtgagcagtaggtcatccagtcccagtgtcagaatgattactacctcaggaccaacctcagaaaagccaactcgaagtcatccatggacccctgatgattccacaggtgaccagtctgtttcttcatacttatgaagttgaatcagtcatgtttatattcatttggccatgtcattactctaatgtttacaaaggcaggcattatactgttgtttagatttttatattaaataaactatttagtaatacatgttaaaataccattttgaatacagagacagagactgccttgccttctgtattttttttaatccagatactaaacatgtattttaaagattgtctgtttggggtttttttccagttgcgaagcgtattgaattcttgatacttcagcctgtgattttcctactagattcatcctactagatgatagtagtaaagtcattttttcagtaaccaaaatcggagaatggtaaaaatcatccccatcatcttcatctcaatcttttaaggacacgagatgtcatgtaccttaagttgaaaaaaattctgaccattgaccttttgaattgtttttaactgataagagacaccattttcagttatacaaatattctattagacctttagaaacctgtgatgagttattaaagctccccaacatgaataactaactgttcacaatattagtattaatgtctacctgcctaaaggtagtgacggcatcgtttcattatgggcaaacaggaaatgatgtgccatagtagaattaacttttccctaactttaagagaataccttgataaatgcttttaagtgtacttatgaaattttttatttatattatattaagtcacgaagggaaagatgatctcttagcccttggaaaattaaagcatttgatattttatataagatcgactatgttattaatagtaacaattagattgaagtttaaaagccagctttctgtctttacaaactaaaatacaactcaagtatttatagttatctgatgtggtttggtcaagtttataatttaatttaaaaaattaactgggtggtttttctgtgtgtcatgtaagatagaactatgtttagccagggtgtactctctagttttagtaagtttaaatttagtggcggcaaaaactcctgtttcacccctagcacagcccaacctaggactgtccagagcattcaccactacgcagcacatgtgtagaattcattatagacttgctcctccccagtggtagacagggcaatgctcttgcccagttttatcattaacattcaggtgatagcagctctttttgatttctgaaccccctggcaagggagtacgttctctgacattacagcatttgcccgggtctggtactcaactcagcagagccttctgtcttcagtctacactaatctgtatatgccagtcaatagtgtggcagattgtgacttcatgggggtaaaataaaaaatgtttaaggctctctctcacataactgctacatttctgcctcatatgttgcttctaccttccaactcccgtcccattgttttctttttctgtacctagaaacaccacaaaataccaattgctagaaataatttgcaatatcagctgaattttgtctttgccttgaaatatattgcacatgtgtggctataattttgaatacattttaaaaatggatgctctggtttaagtttataattaattcagctgtgcagtatttgtaagaaaaatattgataaccaagctaatagaataaattagggaacagataggtaaagtctttttctttgaaggcccactgaccaaggaaaaaattaagagtgtaaatgtaagttaaagtgacctaattaaatttttttaatttgagaggtttttgtatattttcagagaaagctaaagagcataacaatttaataatcatagccgataataagcgctcttcagttcctatttataatataatgggtattcaaaaagacacacatactgagaggatctagtgagagagagatctagacgcagtagagggagccgcagagggggaaactcactaaagaattttcacctttgcttagtactttgcaaacatgtattaatataaagtgtaagacatggcccattccttgcagtctggttagagtcataatactgacacattaaaagtaaacttatactatataataacttactaaatttatagtacaagctgagtgttttgatagttgtaagagaaatcagttcaacaagacttggcatagtctctggccttttcataaaatgatgagacttttctttagccataaagcagaaaggagaaggcagcattccactgaagggaatgcatactcaaagaatatgagatagtaacaagtgttgtgtttgaggggtcagaaaagagagtttgccttaatttaaccaaaccaacatgagctttgacattcaggagaagcaattagatttgattagcaattgaaacacacacacacacacacacacacacacacgcaaaaaactttcattaaataatcttccgatctgtgaccaattattgctagtagagattggaagttcaatatcaatttagtgtaaagtgagaaagtgaaatcccacttctttttttagagagaagatgaaattcaatgaaggaccttaagttccccaccatacaagggctttaattatttgaataacacaatccttggactttttttctgctcccagaataccacgcaacactgatgtattaagcttaattctaaaatacatatcagatacagggtgctgatataatgagatatataatgtatcagtgatttaagaaagaataataggaatggaaatcttaaattgaaactttttcaagacacttaaatttttctagtaaatcaggaggaaatcagtcatttttaatcagttttagttttgtggaaagcagtgtttatgtgggagcgtagtttgaaaccactgttggggtgggagaagagttggtcagagaaataacaaattaagtatatttcttgtttagccacttcagaaaaacacacatttatgttagtactgtatatgagccttaagggtaagggtaagtgccttaagtctctactgtttttctgtattgccctgcaatatttaataaacattactttttcaatatggaattcatactatactattttaaattgttctttctaattctccatttagtatgaataataatgataactaccgtcatgtattgagtgcttaatatacgccaggatttgcatggtgttcctcacatgcactggctcatttggtctgatttcgctaattagcttttggagtttcttgagagcacgttctcagtggctttaaaaaaacaaaaacaaaagcaaaaagaaaaaaaaacacctggattatcagttgacaataaattagaagattactgagccagcaacccttcttgagtttttttggattgcatacagtgcgtctgctgtcttcctgacttgcctttatccacaccactccttcaaggagttattcgtcagaaaaaggctgaagagctcactcatttagctctttttttgtctactaacagtgggaaagcaactacttctgaagtagaaaagtctgtattgcttcagagttactctgtttacttctggaactgttctacataaccataaatgttgagaagagactgtcccacgcatctcagtcaagttgtatggcagttttacctcttttgaaatataaacaaaagcattctattcaaataattttataaaattgactgattgtttgaattaatcaacttaactgttttcggcatgacattgagccacaggtttcaacctcattttggttccttactgttcgtatttgtaatatactctcatcaccaacatctcgttttctgcagtgattcttactgggaagggcaggatgagtggtggaggtcacattataatctatataaattgaaaatgatccactggaagagaatgtgtctctgctttctccctttccctgttaaggaacattgatattagcggagttgatatagccttctataaaataaacttagcatgataaagaaaagagatggggagtttgattagatagggtcaattaagactgaatttaaaatataaaggtctcatcactgtttttgtttttaattaagagcttagaagctctaatatattgtgttctattcagtttatagccaacttaaattataggtatgagaatataattgcattctaatatctgataattgaatatcctttttttaacctttagaattcagaaatagactcttcaattaccaatagctgtaacttttaatttacatattatttactttagggaaaaaaagcatttcattcatgctttcttgctgttcgtttataattatttgtgacagaaaatcaataaaatacatgcttgaattccagataccaatggatcagataactccatcccaatggcttatcttacactggatcaccaactacaggtaaaggagtactttcttattgaaagttgacttttttcttcttagagagtttaagttgacaattgtgttgctacctgtcattgtatagtcactccttaatttatccttttagttggcctccttaaactttttagaatcaaatcaaaataattcttttggttaagttaatcaaactttaaattggcagaatcatattcttatcttttcagtcatcttaaaatcctccagtatctttctttagtactgctaagcattacattttcactctttaattttagtgcattaaaacaaaactcataagcttatttctatttaatacatttgtgatacattctcatgttcatagtgactgaaaatgtaaataatatacttcagtgccccctcatgagtatgagggctataaacatcatttagtttgagcctgtttgcagcctgaaatgtcataccagagactacaactccaacaatcatgattctctgtaacagactgttaaaacagcaagaatagatttaaatgctgagttaattctgacaaaaggacactgagattttctagggcatggtttaacacttatttttaaaagatcattgctttagtgctataaaaatatatcacagtctctgtcttgactctcatcttagctagatattgaaatttgatttaattatgttttaacattcctgattattttcagcctctagcaccgtgcccaaactccaaagaatctatggcagtgtttgaacagcattgtaaaatggcacaagaatatatgaaagttcaaacagaaattgcattgttattacagagaaagtaagttattttttatgaataaaaataaaaatacattagtattttgagtttaaaatatgataaggtgcaatgaaaacgtagtttttagaattagtcattaagtatactttcaacttgtttaagctttaagcacccttttactaaaaattttttatgcaaaactcaatccttttgactatcatattagtgctatggaaaataaactggtgctttatacttgttgttttatgttctcagagctgtttagacttattattataaagatttattgttttcttgtaaatagataaaataatttgatttattaacattcagttgtgccttatcttagaaacatttttgtagatacattttttccaggtgtatgtttagaattggattacttattaaaagactgtatttcataactgagtgtttttctgaggagttatagaaactgccttcctccctttttaaagaaacacagcctaatttccttactactgcattcacagttcttaaatatgtatgtatcttcagttttcttaagcatgacctccatgaaattttatacttaggtaactgaattgttggtggtaactaaaatgaagtgataaggaaaaaattttggcaactttatatatgtatgataataggattcccttcattaattttaatctaaataaatgaaagttgtttttttctgaatttgcgaaaagctttctgtatgtacttcaaaaaaaagagagaaaaaattgttttatcataatttattgatacagtgatttaaatggaaccaacctggtatttgaaaggtaagcctaaataggaaattaaatactacagtttggaaatcgtagaagtaattatcaaactgctggcacttttatgttgaaaaagcttgatttcttatttcacttatttaacctatacttttgccatactttaatcatttgaaagaagtattctatgctggaaaaaacaaatggtggattagggtgttggctgtgaaaactatgacagttttaatcaattttaaatactttcagaagtagtattagttagttattttgcttgaggactttttattaattattcatttatatccagtaacctcactttaggaaatgcctaaagatgcatctttttcgggaatacttaatagttcccaaataagagggacttaaataagtttatcagactataaaagaatgagggtctttcctgaaagtgcttgcaaatgtaagtgttttaaaagaagtggtactttgtcatttttctcactgctttaaaatgggaaaaagctttaaattggatagcatttattttaattagattgcaaatttgctattagcttaccactctctgctatagttaagtaggattgtgacttcagaatgtgaatcagtataaaagtagaatgtgaaggataaaaacttcatgatattttcccatagccacatagaacccttcccagccttttttcatccttcctacacaaaaagaggatagaaaatgaaattttctgaaacttttattttaccattttatctgcttcgctaattatccaagtacagttacttaataaaaggattatgttatttgtatgattacactagaagtagatgagagttccatcccagcccataattatatttgattagtgtacctaagatgcaaaatgataaaccaagaataaaaattctcattaattgagcttccatcatcagctactaaggtatgaatttttccatcatgtgtaatattatgtggtatttgtttgtaggcaagaactagttgcagaactggaccaggatgaaaaggaccagcaaaatacatctcgcctggtacaggaacataaaaagcttttagatgaaaacaaaagcctttctacttactaccagcaatgcaaaaaacaactagaggtcatcagaagtcagcagcagaaacgacaaggcacttcatgattctctgggaccgttacattttgaaatatgcaaagaaagactttttttttaaggaaaggaaaaccttataatgacgattcatgagtgttagctttttggcgtgttctgaatgccaactgcctatatttgctgcatttttttcattgtttattttccttttctcatggtggacatacaattttactgtttcattgcataacatggtagcatctgtgacttgaatgagcagcactttgcaacttcaaaacagatgcagtgaactgtggctgtatatgcatgctcattgtgtgaaggctagcctaacagaacaggaggtatcaaactagctgctatgtgcaaacagcgtccattttttcatattagaggtggaacctcaagaatgactttattcttgtatctcatctcaaaatattaataatttttttcccaaaagatggtatataccaagttaaagacagggtattataaatttagagtgattggtggtatattacggaaatacggaacctttagggatagttccgtgtaagggctttgatgccagcatccttggatcagtactgaactcagttccatccgtaaaatatgtaaaggtaagtggcagctgctctatttaatgaaagcagttttaccggattttgttagactaaaatttgattgtgatacattgaacaaaatggaactcatttttttttaaggagtaaagatttttaattctgtgattgtgtgtatgtgtgttgaaactgtaaagcttttatgactctaatattaatctcttaaatgaaattaaaaggcaaaagaacatgattgagcttaaatgatcatttcttcctgcagtgattcttggattgttttctcatgtatttg

SEQ ID NO: 12809 - DNA, 2214 bp, Homo sapiens
ttttagacagctgatctctcacgttagaagatactgcataaacagctttattcccaaataaaagtgctgagtgaagccattgctcaattcattgttttgctgaggacttatatgtgtagaattctctcataaattgatttttaattaaattaattataaacatagaagtttctaaagcagaattaacacaatagcccatttcaacaagctgtatatttgagaacagagtgacagttattaacatccagtaggaaattaagagttgttgttcacaaataataaattactagattctgacaaagactaatggggattaagtaagcgtgactcaatataacaaatttaagcctaagcatcttctaggccctgaaatgaacaaggtattgctgccagttaaagtcagttgtgtcttacaacctgctagctgtcttgctgtaaaaactgtaacgtaaggcccttgaaatagatgccgtcatcagccccagcccccaagcattcatctatttaaacacatgacagaagatggtggaagagagttcagcagctattcatgtggtagaagtggttattgtattaggacatactctgttgtaggccagcaacttttgagttaaaacaccgcagctgtttctcttcctttctttacatctttctcttcttttttttttttcttagcaataaactcacttttttttccccacaaacattttgtgtagatccaaggagcaacaaattccaactttctgctgtagcaattacacgctttttgtctgtttgactagattttagtattttactttttttcttctttttaaaggcaacggacagccaagacgtagatccatccaagacttgactgtaactggaacagaacctggtcaggtgagcagtaggtcatccagtcccagtgtcagaatgattactacctcaggaccaacctcagaaaagccaactcgaagtcatccatggacccctgatgattccacagataccaatggatcagataactccatcccaatggcttatcttacactggatcaccaactacagcctctagcaccgtgcccaaactccaaagaatctatggcagtgtttgaacagcattgtaaaatggcacaagaatatatgaaagttcaaacagaaattgcattgttattacagagaaagcaagaactagttgcagaactggaccaggatgaaaaggaccagcaaaatacatctcgcctggtacaggaacataaaaagcttttagatgaaaacaaaagcctttctacttactaccagcaatgcaaaaaacaactagaggtcatcagaagtcagcagcagaaacgacaaggcacttcatgattctctgggaccgttacattttgaaatatgcaaagaaagactttttttttaaggaaaggaaaaccttataatgacgattcatgagtgttagctttttggcgtgttctgaatgccaactgcctatatttgctgcatttttttcattgtttattttccttttctcatggtggacatacaattttactgtttcattgcataacatggtagcatctgtgacttgaatgagcagcactttgcaacttcaaaacagatgcagtgaactgtggctgtatatgcatgctcattgtgtgaaggctagcctaacagaacaggaggtatcaaactagctgctatgtgcaaacagcgtccattttttcatattagaggtggaacctcaagaatgactttattcttgtatctcatctcaaaatattaataatttttttcccaaaagatggtatataccaagttaaagacagggtattataaatttagagtgattggtggtatattacggaaatacggaacctttagggatagttccgtgtaagggctttgatgccagcatccttggatcagtactgaactcagttccatccgtaaaatatgtaaaggtaagtggcagctgctctatttaatgaaagcagttttaccggattttgttagactaaaatttgattgtgatacattgaacaaaatggaactcatttttttttaaggagtaaagatttttaattctgtgattgtgtgtatgtgtgttgaaactgtaaagcttttatgactctaatattaatctcttaaatgaaattaaaaggcaaaagaacatgattgagcttaaatgatcatttcttcctgcagtgattcttggattgttttctcatgtatttg

SEQ ID NO: 12810 - DNA, 14009 bp, Homo sapiens
ggggcgctgggagcccgttgggccgcgaacgcagccgccacgctggggccgccgagatcgggtgcccgggatgagcctcatccggaaaaagggcttctacaagcaggacgtcaacaagacagcctgggagctgcccaagacctacgtgtccccgacgcacgtcggcagcggggcctatggctccgtgtggtgagacccctgggccgctggggggcggggggcgggcgccaggctctcccctttccgcccagcccgccctgggctggcccctcgccagcgccaccttgaccgcggacctcaaggcccagcgccctccccggggccacccagcggccatctcccttttctcaccgagtggctgagtgaggtctctgggggttgagttgggactgggcctggttctccaggactgtacacttgcaagaccccagagttcatcgggcagatcctcactgttacagacgagtacaccgaggccccaagagggggaggtggctcgccaagttgcagacagagtgagactcccgccctgccgtggatcccgtcgcaatgagacgttgctgcccctggcgctgtgcccctctctcagctcctgcctggcttcctactccctgccctgcgtcccgcggctcccccatattctaggtggtgggcctagtcccctctcagcccagctgcccagtgggaggggtcagggcggtctgggagatacggcccaggaggagagcctcgcctgctgaccggcctgtgcccgacagctcggccatcgacaagcggtcaggggagaaggtggccatcaagaagctgagccgaccctttcagtccgagatcttcgccaagcgcgcctaccgggagctgctgctgctgaagcacatgcagcatgagaacgtaggtggtggctgccccggggagggggtgggggctgccctggggagtcaggggcaggcgcaggcggggcctcccggtatggagagctcgggacagtctcctccctgctcccctgacggtgcctctcgcctcactattgaaaggagggggtgccgagaccttccctgcccactttccaggaagaggtcaaagggtatttttggcagaatgcactttgtgaggtacagactgtgttatcctacagaggaaattggcacaggggaactttgtaattggttccatgtctgagagcttgtggccagctgggactagaatcctagttagcgttgtgtccacgtgaccctgataacaatagcaatatacacatattgagcacttcctatgttctaagagctctgcatacactaacttgtctagtcctcatgatatatgagtactactgcccccatgtcacagacaggaaactaaagcacagcaaggctcacagattagatggttagtcagtagcagagctggggtttcaatctcggcagcgaggctcccggtctgagcacatgaccatcagattgtcttgtctgatagaagcagctgggaaaaccaggggcccagctcagggcctggcagccaggctttgctgcaggatacctagattggagggcagacatttcaaagaatgatttcaaaatgttatgtacattttaagcccatccttctccagcaaacccctcccctatggcctccagccagggtgatcttgcccttggctctgaaccagccctgtggcaggcaaggatggatgtggctggagacccaaggtcaggggcagggagtttgctggctgaaaagctccttctctgttccctcctttttcccttccaccctccccttatgctttcctgctgcctaggtgagttgagagtgggtttgtgttgcttgccctgacaccagacttgacagcaatgagcacacatcattctccccaccttcccttctccccagcctgactctctgtcatgatttattgcaaactccctccaaatccaggggattcctctaggcctctgccctttttactgcttccaagaaggttggagacatgcctcctgctggaggtggtgtattaggaaagggtggatggccctgtgcatggccagggcccaggaggaggtgggaggagaaggtagcgtctgtctagccctcacaggtgacttcttccccaggtcattgggctcctggatgtcttcaccccagcctcctccctgcgcaacttctatgacttgtgagttgggctgcactgggttctggggcatttgcaggccttacatgccgctggggagcaaggtgggggagggtctagggtttctattccgggtgtggcggggagagcctccttccctggcagtcctgtgcctttgcctgtcaagtgtgattctctctggaaagatgcttttagccaaaggcaggcaggaagaggcaggaaggactttgtggggtgcttgcctggcagggggcagtctgcacagctgctttgctttttacccagctttaacaccatgaagacacatctgccagtcctcacagggttagcaccaactcacctttcctggggacacagatgtgagtctggaccttggagctctttctagcatgaagcaaggattaagaagccttggctgcctctggctgatgggggtgtttgacagaatggcagaaaaccagaatatttagctgcaaaatgtatagctttgcctgtgcagtgtctgaatgagactggactatttggacaagatggagaagtcagtgtggcacgtggaggccagcagctggcttggtcaagctgaatctggactgaccctacaggcagcctcaagacctggggactttgagccgggaggtgatatgttcagatgggatttgggggatgcacactggcagcagcaagaaaggagtaggaagcagctcggaggcagagggggagagcctggaggtcagtgttagtgatctaaagtagggatctaaagcagaggtgatgggatgccaagagcagacttgaggccccatttgggaggcagggccgacacaatgttccatctgttggggtgcagtagctgagtgaggtggcagaggtggaggaatgggcaggttcctgcttgaaatacacggtagaggaagaacagatcttgggggaaagataacgaactccattttggacactttacttttaaagaaactgtgaacattccaatgtttaatcacagttgcaaataaatatgaacctcaggagacgaaggtctgggctagggatgtggatttgtgctggaataatcaccgatgggttatagctgacacccgggaacagataattgtagaatgtggtaagatagtattgattcagatatcaacatgaaagagaagatccaagaggatgagcagatggaagaagctgagagggcctgataggaggcagaggagagtcagcaaagaattgagagggagtttcagacttggtgaaaggttagatcagaagaaaagggagtcatggtgtgtttgtcgggtgttcactggtgaccttgagctgagcagtctggcagtaggagggaagcagaaaccaggttaactcaggactgggaggtaaggcagtgggatccaggagtgtggaccgccctttctagaagtttggtggtgagagagggagaaggggtggtcagttgaagaagcaaagtcaagggaatgtggttctagcacagagaggcttcaggaagcatgttgccaagatgaaagaaccagtgcccgagtggaggggaaagacacaggaggggactgggcatggagaggcccccaagggaggtgtgtggtccggcaggagagggctgccaaaatccagagtctcctggagatgcctccagcatgtcctttcaaaaacaacaacaacaacaacaacaaaaaacacaacctattacataattgtttaaggtaacattcattttaaaaaagttttaaatttattatattctagagatagggctgggttgcccagactggagtgcagtggcacaaacacagttcactgcagcctccaactcctaggctcaagccatcctcccgcctcagccccccaagtaggtgggactacagatgcatgccaccatgtccagctttttgttttgttttaatttttatagatatggggtctcactatgttactcatcctgatctcgaattcccggcctcaagtgatcctcccacctcagcctcttgagtagctaagactaaaggtgcatgccaccacacctggctaatttttttttttttttctgaaaggtggggtccaggccgggcatggtggctcacgcctgtaatcccagcactttgggaagccgaggcaggcagatcacctgaggtcaggagttcgagaccagcctggccaacatggcaaaaccccgtctctactaagaatacaaaaattagctgggcgttctggcgtgcacctgtagttgtagctactcagggaagctgaggcaggaaaatcgcttgaacctgggaggtggaggttgcagtgagccaagatcacgccactgcactctagcctgggcgacagagcaagactccatctcaaagaaaaaaagaaaggaagaaagaaagatgggtccctatgttgctcaggctggtcttaaactcttcgcctcaagcgatcgtccagcctccatctcccaaagcactgggattggaggtatgcccctggcctattttataatttttattattttttgtctttgtcctggtctttgcttttactgtaacagttacattttgctggccttatcctgttgtgcaatcccctaagaggctgcaggagcctccccatctccctcttccaccctcctggaaactgttgtattgtttccttcttggaaaggtagacatattgtttgtttgtggagccatctcagctgggcatgaccctctgagggatcaaatatttggacagaagccgaaggaaatactggcagatgtttctaactcctagctgtggctttccctggggtgtggaggagggcaaggagagagtacctttgaagagcgggaacacagttccatgtggctttcctgagcgcgctccaactgcagcgcttactccgagctctgccagctgggcggcccgccacagggagactgggagccaggagcccagaggcccgtgtggtgatctggctggctgaggtggagttgagtttttgcacactggagggtgtctctatgacccctgttctgccctgaggtccctcctctgagctctgacctggggctgggtgggacccggcactgttccaagaacccctcatgccttccagctacctggtgatgcccttcatgcagacggatctgcagaagatcatggggatggagttcagtgaggagaagatccagtacctggtgtatcagatgctcaaaggccttaaggtgggtggggacttggaggctggcagaggggacgccttgctgtctagacctgaggtttggggaggctggagggagcgcactgttacaggtcggccagcctgaagtgcctggtgtggaagctgggccatggactcacccttctctctctcccacatagtacatccactctgctggggtcgtgcacagggtgagtgctttctctgccatggtcctcagaggcccctgtcccatccctgggtatggggttctctggcaatcaaggagtgggaaagttggagggaggggacactgcccaggagcacagaatgtggagttttcacacccagccacggcccaggaaggcctgctcaaaagagtcactgtgtcccaggggacttcatggggaattgctgcagacaaagtgagccctgagctgagtgtttcaggcttcaagaatcaggaacattttagagctgggtgggccctgagagaacacctagtccaaccctcattttacacatgaagaaactgaggcccagaaggggaaggggcctggctgaggtcacacccctgggtggtggtggagctaggacaagctccatctctgcctcagcctagcatgcattctctgtcctccccccaggacctgaagccaggcaacctggctgtgaatgaggactgtgaactgaaggtgagtgggctgcaggctcagcccagaggcgggataggccctcccccagggaagcccctggaagccgctcccagagcctcctcccctcagcaagttccttttctatttatcccctgtgccatagattctggattttgggctggcgcgacatgcagacgccgagatgactggctacgtggtgacccgctggtaccgagcccccgaggtgatcctcagctggatgcactacaaccagacaggtcagtggtcaatgcctgagagggcggtcctggggccatctggtcactcggtgctgactgactgctgggccccagacagtccaggtgacactctccctccctctgcagtggacatctggtctgtgggctgtatcatggcagagatgctgacagggaaaactctgttcaaggggaaagattgtatcctttgctggaaaagccaaactccatctagggattccttccttcaacagacactttatttaaataactgtcttttttttcttaatgtgagagtgatacatactccctgtagaataatttgtaaatgcagataaggctggacgcagtggttcatgcctgtaatcccagcactttgggaggctgaggtggaaggatcctttgagcccaggagtttgagaccagatgtggcaacatagggagaccccatctctaaaaaagttttttaaattagccagacatgggcctggcgcagtggctcatgtctgtaatcccagcactctgggaggctgaggcgggcagatcatgaggtcaggagatcgagaccatcctggctaacaaggggaaaccccgtatctactaaaaatacaaaaaattagccaggcgtggtggcaggcgcctgtagtcccagctactcaggaggctgaggcaggagaatggcgtgaacccaggaggtggagcttgcagtgagctgagatcgcgccactgcactccagcctgggtgacagagcaagactctgtctcaaaaaaaagaaaaagaaaaatcccagctacttgagaggctgaggtgggagggttgagcctgggaggttgaggctgcagtgagctatgattgtgccactgtactccagcctgggtgacagagggagaccctaactcaaaaaaaaaaaaaaaaaaaacaaaatgttgggtgggcatggtggctcacacctataatcccagcactttgggaggccatggcaggcggatcacctgagattaggagttcgagaccagcctggccaacgtggtcaaaccccatctctaccaaaaaatacaaaaattagccgggtgtggttcacgcctgtaatcccagctactcgggaggctgaggcaggaaaatcgcttgaacccaggaggtggaggttgcagtgagccaagactgtgccactgcactccagcctgagtgacagagtgagaccctgtctcaaaaaaaaaaaaaaaaaaaaaatgtagataagcaaaatgatgaaaaattctaccactacgtggaaaatacattttggcacggcacacattaactgagtacctgtgtgtgcagggcaggcctttggtgagaagacgaggaaacagaaaagagtcactgggatgaaggctgagaagtccacatccatttgttgggtagggacccccctcagcctggcacgttggaaagctctccagagccctgagccctgaagaataagcctcctcctgagagcaggaggtggttaggcagggctggagcctggatgatcagttgccatggtgcccgggtgaagtgatggtggggtcgcaggaagggcagtctcagacccaccaggagagcaaggctaagccttaacctgccaccaagacctggaccagctgacccagatcctgaaagtgaccggggtgcctggcacggagtttgtgcagaagctgaacgacaaagcggtgggtggtaaatgggacctaggctggcctgggctgtgtgcttgcctgacgtgggcccagtgggctgcaggcctttgtggaagaaggctcaccagcaccttcccacagcatcctcctaccctggcaggcactcttgtcttaatctcaccgtggaccctgacctgaactttcagccctgctctgaggcttttctgaaatccctgctctacacgctgaggccagagccctaaggggtttgatgcttttctgtcttccaggccaaatcctacatccagtccctgccacagacccccaggaaggatttcactcagctgttcccacgggccagcccccagggtgagtctcagagcccgctccccaggggcctctcagcgtatcccagagggcgggctctcccagcccctggtgtgaggctcttggctctgcccctgcagctgcggacctgctggagaagatgctggagctagacgtggacaagcgcctgacggccgcgcaggccctcacccatcccttctttgaacccttccgggaccctgaggaagagacggaggcccagcagccgtttgatgattccttagaacacgagaaactcacagtggatgaatggaagcgtaagagctggggcctcgggcttcctcgcctccgcctgcagcctctcttccttgcttcctccatctttgtgcctggcctctgccagccctacctgccacctccttcttggtgggcattgtctcctgggtgcttctttctccttgagctgacttcgctctccatgctgtctctgaaggggggtggactttctcgccacagcacctctttacgcaccttaaaccatgctgcctttctcagagcacatctacaaggagattgtgaacttcagccccattgcccggaaggactcacggcgccggagtggcatgaagctgtagggactcatcttgcatggcaccgccggccagacactgcccaaggaccagtatttgtcactaccaaactcagcccttcttggaatacagcctttcaagcagaggacagaagggtccttctccttatgtgggaaatgggcctagtagatgcagaattcaaagatgtcggttgggagaaactagctctgatcctaacaggccacgttaaactgcccatctggagaatcgcctgcaggtggggccctttccttcccgccagagtggggctgagtgggcgctgagccaggccgggggcctatggcagtgatgctgtgttggtttcctagggatgctctaacgaattaccacaaacctggtggattgaaacagcagaacttgattcccttacagttctggaggctggaaatctgggatggaggtgttggcagggctgtggtccctttgaaggctctggggaagaatccttccttggctctttttagcttgtggcggcagtgggcagtccgtggcattccccagcttattgctgcatcactccagtctctgtctcttctgttctctcctcttttaacaacagtcattggatttagggcccaccctaatcctgtgtgatcttatcttgatccttattaattaaacctgcaaatactctagttccaaataaagtcacattctcaggttccaggtggacatgaattccagggggaaatgattcaactcactacagacagctgggagggaggggccccttcctgggccccgtgctgaggccttgtgctctgtgaaggaacccaatgtgtttggctgctaaattaagggagttgcagagagagctgcagctggtgcgattgcattcaggttattttgggtgagtgataagcaatcaagatatgaaacaacagcaggctcggagactgcgagctgcacaggcagaaatgggctcttgcctggcttgatggcaaaccgttctgctccctttgggagatggcacagctctccagagctttgacctgacagtggctagaacctctctgtttttatctgagaaactttggcagaacaaatttccatgtgcacaagctgtcgggcacagtgggtctcaaatttccttgtgcaccaggggacttgttaaaatgcagattcctgggccccaccccagggcttgtgactcagcaggtctgcagttgagaccttagaatgtgcatttgaatgaggacctctcgccctgacccaagcctagtgattctgatggatatcagaccatagttcgagacatttagtggatttcagtcatacttgatttgttgggaggcctaaatcaaaaacctataggaggagactggggggcttcagatggagtttcacactcatcttacaggtgttaaaactgaggctcagaaagcttttttttgtttgtttgtttgagacagggtctggctctgtcacccgggctggagttcagtggcacaattacatcttactgcaacctcagcctcctgggctcaagccatcctcccacctcagcctcctaagtagctgggactacaggtctgtgccacccaggtgcaccaggactgcaggtggctaattaaaacattttttttcttttttgtataggcggggtttctctatgttgcccaggctgatcttgaacttctggactcaagtgatcctcccactttggcctcccaaagtgctgggattataggcatgagccaccctgcaggcccagacagcatttttaaggccttgaaactcttctgtataatactgtaatggtggatacctattgtgcatttgttaccatctgtaggactggataacacagagtgaaccctcaagtaaactatggacttcagttaataataatgtatcagtattggttcataaattgtaacaattgtgccacactaatgcaagatgttactcatcaagaaaactgaggagagagaaggggaggaagtaggtgggaacctctatactttctaccaacctaaaactgctctaaaaaataaaccacaggccggtcgcagtagctcacgcctgtaatcccagcaccttgggaggctgaggtgggcggatcacttgaggtcaggagttcaagaccagcctggccaacatggtgaaaccccatctctaccaaaaatacaaaaattagctgggcttggtggtgcatgcctgtaatcccaaactactcgggaggctgaggcagaattgcttgaacctgggaggtggaggttgcagtgagctgagatcacaccactgcactccagcctgggtgacagagtgagactccatctcaaaaaaacaaaaaaaacaaataccctgaggacacagagacattgggtcagacacccacagctaggaagtggtggagtcagattggaacccaagtaggcttgagcactgtacccagcttggattcaagggttgcccagccttccctcttcacgccagtctgagacccttactgctgactgtgtccatggtctctgttttctctcccacagaatggccctgctgtcaaggagctggggagtccttgactgggactggctagtcttgccacagccctggcctcgctggttactaaaactgccccaggttccctgagtctacatccctctaagcctcctgagaattctcactgccccaaggaaaaagtctagccttccttcttggcctggcattcaaaaccccttgtgttctctctaatctcatcagctcccactgcctcccctagctagtccttatgtcagtgtgggacaccagtcctgggatccaccgtaaggttcattctgcattcacaggttaaaggtcttgacaagtcctgcagtaaagagatccgttcctcatttaatccagaacttcccagatgtacttaaccgcaggacccattttctcccaacagcatgacacacatagccttttttgcccagtgcagcccagtgcacaggtcccgatattgcctctccccaagtaggcttggccttcttttagtgcccgtgcgtggaaggccctccattctcctctccattctccttggccttcaaggctctaccttaggcctccctccaggcagctgttctccatcatcccccctgggctgcaggccctctgtgggcagcatttagtgtgtggtttggcctccccttcccattgcccactgtgagcaaatacctgtgcgtgaatgaataatgagtgaaagatgtcccaggggcctgtcggtcacttctttgccccgaccaggccaatgtcatatggaaggtggcagagagcccagcaggaagcagaagtgggcggccctgggctgtacctttgagctgctctcctgaaaatctctattatttcagactcccagaccccaccccccgcttcatcctctggtgtcctcctaggccatccccactccggaattaaacctcagcccctcccacagagttttctcaaatctgtgaagtttcttcaaaaggcggtggaggtgctcagcagtgcaaggtggggggtggagggggtggggagtagagggagtgggggttccacgggtttgggtcttgcccagtgggcacatggcctgtgtaataggaaacaagtccattctcctgctgtggggggcagaggagctggcggggcgagggagggggagatgtgggctcaggtattcttggtggatgcgcttcgttctgtggctgatggggtggcttaaaagatcttaacagagagagatcaggaagccagactgcaaggtgggggacatttcctaagagcaagtgtaccctccattccctcttttgaggaacaaagagtatctttgctggggcctgagtcatccatgaaaacagacagcagcggtgtcccagggcagggcttgcctggcgtggattggggtggtgctgcccccagtgaggggcagcacaaggggagacagaaatggaggaatagcccccgtaagggcaagcccagtgtgcaccagtgcccagagctgcctgatggaggaacagctccgtaagggtgaacccagtgtgcacgggtgcccggagctgcctgcgtgaggctgggggctagtttggatgagggcatggctcaactttcacttggcacattgaaatagcttttgctgtctgctagggtgtggaaaactgtttttccatggccccaagcaatgctatagctacagctgaggagggaggaatctctccctgcctctcctcccaactcttggcttttgcttccttaaatttgaacaattccctaagatctaatgctgggaggctccccttccttcattacacagtgaactcatgtgctctatctgcattccccctaaatcctcctgagcttttaggtaagaggccgatgatttcacaatcggcagcagaggcctaaggccattccatcaaactgaagatggcagcaagttgtcctcacttcttcattgagcacccatgggtgtgtactggagcaagggtggtgccagggattctcctgctctggttcctcctgcggggtccctgctcagctgggcagctgccctcactctgggcgggtggcatgtgagtgtcaacagggcccctctcagtcaggggctcttggccattttttgtgccatggatcgcttctcaaaatcatattttcttttcttttcttttgagatggggtctcactccattacccaggctggagtgcagtggtgcaatcacagctcactgtagcctcgacctccctgggttcaggtgatcctcccacctcagcctcccaagtagctgggactataggcatgcaccaccatgcctggctaatttcagaataatattttcatacacataaaatatgtaggattacaaagtaagctagttatatttatatacagttgtcaaaatatttttaaaatgtataacgtgatactatgtgtataggtttctttattaacatattgaataaaaagatcgagggtaggcctattaaacaatggtaaactgaagagagatgagtgtaaacaatattttaagatagatacctgtggcaaactgtaaagggatatgaaaaactctgtaatttctattggcactgctgatacaactgcactttgctacctttgttcataaccaaggaaatagaaatgactgaaaataaagttgtattctattccaa

SEQ ID NO: 12811 - DNA, 6316 bp, Homo sapiens
ggggcgctgggagcccgttgggccgcgaacgcagccgccacgctggggccgccgagatcgggtgcccgggatgagcctcatccggaaaaagggcttctacaagcaggacgtcaacaagacagcctgggagctgcccaagacctacgtgtccccgacgcacgtcggcagcggggcctatggctccgtgtgctcggccatcgacaagcggtcaggggagaaggtggccatcaagaagctgagccgaccctttcagtccgagatcttcgccaagcgcgcctaccgggagctgctgctgctgaagcacatgcagcatgagaacgtcattgggctcctggatgtcttcaccccagcctcctccctgcgcaacttctatgacttctacctggtgatgcccttcatgcagacggatctgcagaagatcatggggatggagttcagtgaggagaagatccagtacctggtgtatcagatgctcaaaggccttaagtacatccactctgctggggtcgtgcacagggacctgaagccaggcaacctggctgtgaatgaggactgtgaactgaagattctggattttgggctggcgcgacatgcagacgccgagatgactggctacgtggtgacccgctggtaccgagcccccgaggtgatcctcagctggatgcactacaaccagacagtggacatctggtctgtgggctgtatcatggcagagatgctgacagggaaaactctgttcaaggggaaagattacctggaccagctgacccagatcctgaaagtgaccggggtgcctggcacggagtttgtgcagaagctgaacgacaaagcggccaaatcctacatccagtccctgccacagacccccaggaaggatttcactcagctgttcccacgggccagcccccaggctgcggacctgctggagaagatgctggagctagacgtggacaagcgcctgacggccgcgcaggccctcacccatcccttctttgaacccttccgggaccctgaggaagagacggaggcccagcagccgtttgatgattccttagaacacgagaaactcacagtggatgaatggaagcagcacatctacaaggagattgtgaacttcagccccattgcccggaaggactcacggcgccggagtggcatgaagctgtagggactcatcttgcatggcaccgccggccagacactgcccaaggaccagtatttgtcactaccaaactcagcccttcttggaatacagcctttcaagcagaggacagaagggtccttctccttatgtgggaaatgggcctagtagatgcagaattcaaagatgtcggttgggagaaactagctctgatcctaacaggccacgttaaactgcccatctggagaatcgcctgcaggtggggccctttccttcccgccagagtggggctgagtgggcgctgagccaggccgggggcctatggcagtgatgctgtgttggtttcctagggatgctctaacgaattaccacaaacctggtggattgaaacagcagaacttgattcccttacagttctggaggctggaaatctgggatggaggtgttggcagggctgtggtccctttgaaggctctggggaagaatccttccttggctctttttagcttgtggcggcagtgggcagtccgtggcattccccagcttattgctgcatcactccagtctctgtctcttctgttctctcctcttttaacaacagtcattggatttagggcccaccctaatcctgtgtgatcttatcttgatccttattaattaaacctgcaaatactctagttccaaataaagtcacattctcaggttccaggtggacatgaattccagggggaaatgattcaactcactacagacagctgggagggaggggccccttcctgggccccgtgctgaggccttgtgctctgtgaaggaacccaatgtgtttggctgctaaattaagggagttgcagagagagctgcagctggtgcgattgcattcaggttattttgggtgagtgataagcaatcaagatatgaaacaacagcaggctcggagactgcgagctgcacaggcagaaatgggctcttgcctggcttgatggcaaaccgttctgctccctttgggagatggcacagctctccagagctttgacctgacagtggctagaacctctctgtttttatctgagaaactttggcagaacaaatttccatgtgcacaagctgtcgggcacagtgggtctcaaatttccttgtgcaccaggggacttgttaaaatgcagattcctgggccccaccccagggcttgtgactcagcaggtctgcagttgagaccttagaatgtgcatttgaatgaggacctctcgccctgacccaagcctagtgattctgatggatatcagaccatagttcgagacatttagtggatttcagtcatacttgatttgttgggaggcctaaatcaaaaacctataggaggagactggggggcttcagatggagtttcacactcatcttacaggtgttaaaactgaggctcagaaagcttttttttgtttgtttgtttgagacagggtctggctctgtcacccgggctggagttcagtggcacaattacatcttactgcaacctcagcctcctgggctcaagccatcctcccacctcagcctcctaagtagctgggactacaggtctgtgccacccaggtgcaccaggactgcaggtggctaattaaaacattttttttcttttttgtataggcggggtttctctatgttgcccaggctgatcttgaacttctggactcaagtgatcctcccactttggcctcccaaagtgctgggattataggcatgagccaccctgcaggcccagacagcatttttaaggccttgaaactcttctgtataatactgtaatggtggatacctattgtgcatttgttaccatctgtaggactggataacacagagtgaaccctcaagtaaactatggacttcagttaataataatgtatcagtattggttcataaattgtaacaattgtgccacactaatgcaagatgttactcatcaagaaaactgaggagagagaaggggaggaagtaggtgggaacctctatactttctaccaacctaaaactgctctaaaaaataaaccacaggccggtcgcagtagctcacgcctgtaatcccagcaccttgggaggctgaggtgggcggatcacttgaggtcaggagttcaagaccagcctggccaacatggtgaaaccccatctctaccaaaaatacaaaaattagctgggcttggtggtgcatgcctgtaatcccaaactactcgggaggctgaggcagaattgcttgaacctgggaggtggaggttgcagtgagctgagatcacaccactgcactccagcctgggtgacagagtgagactccatctcaaaaaaacaaaaaaaacaaataccctgaggacacagagacattgggtcagacacccacagctaggaagtggtggagtcagattggaacccaagtaggcttgagcactgtacccagcttggattcaagggttgcccagccttccctcttcacgccagtctgagacccttactgctgactgtgtccatggtctctgttttctctcccacagaatggccctgctgtcaaggagctggggagtccttgactgggactggctagtcttgccacagccctggcctcgctggttactaaaactgccccaggttccctgagtctacatccctctaagcctcctgagaattctcactgccccaaggaaaaagtctagccttccttcttggcctggcattcaaaaccccttgtgttctctctaatctcatcagctcccactgcctcccctagctagtccttatgtcagtgtgggacaccagtcctgggatccaccgtaaggttcattctgcattcacaggttaaaggtcttgacaagtcctgcagtaaagagatccgttcctcatttaatccagaacttcccagatgtacttaaccgcaggacccattttctcccaacagcatgacacacatagccttttttgcccagtgcagcccagtgcacaggtcccgatattgcctctccccaagtaggcttggccttcttttagtgcccgtgcgtggaaggccctccattctcctctccattctccttggccttcaaggctctaccttaggcctccctccaggcagctgttctccatcatcccccctgggctgcaggccctctgtgggcagcatttagtgtgtggtttggcctccccttcccattgcccactgtgagcaaatacctgtgcgtgaatgaataatgagtgaaagatgtcccaggggcctgtcggtcacttctttgccccgaccaggccaatgtcatatggaaggtggcagagagcccagcaggaagcagaagtgggcggccctgggctgtacctttgagctgctctcctgaaaatctctattatttcagactcccagaccccaccccccgcttcatcctctggtgtcctcctaggccatccccactccggaattaaacctcagcccctcccacagagttttctcaaatctgtgaagtttcttcaaaaggcggtggaggtgctcagcagtgcaaggtggggggtggagggggtggggagtagagggagtgggggttccacgggtttgggtcttgcccagtgggcacatggcctgtgtaataggaaacaagtccattctcctgctgtggggggcagaggagctggcggggcgagggagggggagatgtgggctcaggtattcttggtggatgcgcttcgttctgtggctgatggggtggcttaaaagatcttaacagagagagatcaggaagccagactgcaaggtgggggacatttcctaagagcaagtgtaccctccattccctcttttgaggaacaaagagtatctttgctggggcctgagtcatccatgaaaacagacagcagcggtgtcccagggcagggcttgcctggcgtggattggggtggtgctgcccccagtgaggggcagcacaaggggagacagaaatggaggaatagcccccgtaagggcaagcccagtgtgcaccagtgcccagagctgcctgatggaggaacagctccgtaagggtgaacccagtgtgcacgggtgcccggagctgcctgcgtgaggctgggggctagtttggatgagggcatggctcaactttcacttggcacattgaaatagcttttgctgtctgctagggtgtggaaaactgtttttccatggccccaagcaatgctatagctacagctgaggagggaggaatctctccctgcctctcctcccaactcttggcttttgcttccttaaatttgaacaattccctaagatctaatgctgggaggctccccttccttcattacacagtgaactcatgtgctctatctgcattccccctaaatcctcctgagcttttaggtaagaggccgatgatttcacaatcggcagcagaggcctaaggccattccatcaaactgaagatggcagcaagttgtcctcacttcttcattgagcacccatgggtgtgtactggagcaagggtggtgccagggattctcctgctctggttcctcctgcggggtccctgctcagctgggcagctgccctcactctgggcgggtggcatgtgagtgtcaacagggcccctctcagtcaggggctcttggccattttttgtgccatggatcgcttctcaaaatcatattttcttttcttttcttttgagatggggtctcactccattacccaggctggagtgcagtggtgcaatcacagctcactgtagcctcgacctccctgggttcaggtgatcctcccacctcagcctcccaagtagctgggactataggcatgcaccaccatgcctggctaatttcagaataatattttcatacacataaaatatgtaggattacaaagtaagctagttatatttatatacagttgtcaaaatatttttaaaatgtataacgtgatactatgtgtataggtttctttattaacatattgaataaaaagatcgagggtaggcctattaaacaatggtaaactgaagagagatgagtgtaaacaatattttaagatagatacctgtggcaaactgtaaagggatatgaaaaactctgtaatttctattggcactgctgatacaactgcactttgctacctttgttcataaccaaggaaatagaaatgactgaaaataaagttgtattctattccaa

SEQ ID NO: 12812 - DNA, 8545 bp, Homo sapiens
cccgacgcacgtcggcagcggggcctatggctccgtgtggtgagacccctgggccgctggggggcggggggcgggcgccaggctctcccctttccgcccagcccgccctgggctggcccctcgccagcgccaccttgaccgcggacctcaaggcccagcgccctccccggggccacccagcggccatctcccttttctcaccgagtggctgagtgaggtctctgggggttgagttgggactgggcctggttctccaggactgtacacttgcaagaccccagagttcatcgggcagatcctcactgttacagacgagtacaccgaggccccaagagggggaggtggctcgccaagttgcagacagagtgagactcccgccctgccgtggatcccgtcgcaatgagacgttgctgcccctggcgctgtgcccctctctcagctcctgcctggcttcctactccctgccctgcgtcccgcggctcccccatattctaggtggtgggcctagtcccctctcagcccagctgcccagtgggaggggtcagggcggtctgggagatacggcccaggaggagagcctcgcctgctgaccggcctgtgcccgacagctcggccatcgacaagcggtcaggggagaaggtggccatcaagaagctgagccgaccctttcagtccgagatcttcgccaagcgcgcctaccgggagctgctgctgctgaagcacatgcagcatgagaacgtaggtggtggctgccccggggagggggtgggggctgccctggggagtcaggggcaggcgcaggcggggcctcccggtatggagagctcgggacagtctcctccctgctcccctgacggtgcctctcgcctcactattgaaaggagggggtgccgagaccttccctgcccactttccaggaagaggtcaaagggtatttttggcagaatgcactttgtgaggtacagactgtgttatcctacagaggaaattggcacaggggaactttgtaattggttccatgtctgagagcttgtggccagctgggactagaatcctagttagcgttgtgtccacgtgaccctgataacaatagcaatatacacatattgagcacttcctatgttctaagagctctgcatacactaacttgtctagtcctcatgatatatgagtactactgcccccatgtcacagacaggaaactaaagcacagcaaggctcacagattagatggttagtcagtagcagagctggggtttcaatctcggcagcgaggctcccggtctgagcacatgaccatcagattgtcttgtctgatagaagcagctgggaaaaccaggggcccagctcagggcctggcagccaggctttgctgcaggatacctagattggagggcagacatttcaaagaatgatttcaaaatgttatgtacattttaagcccatccttctccagcaaacccctcccctatggcctccagccagggtgatcttgcccttggctctgaaccagccctgtggcaggcaaggatggatgtggctggagacccaaggtcaggggcagggagtttgctggctgaaaagctccttctctgttccctcctttttcccttccaccctccccttatgctttcctgctgcctaggtgagttgagagtgggtttgtgttgcttgccctgacaccagacttgacagcaatgagcacacatcattctccccaccttcccttctccccagcctgactctctgtcatgatttattgcaaactccctccaaatccaggggattcctctaggcctctgccctttttactgcttccaagaaggttggagacatgcctcctgctggaggtggtgtattaggaaagggtggatggccctgtgcatggccagggcccaggaggaggtgggaggagaaggtagcgtctgtctagccctcacaggtgacttcttccccaggtcattgggctcctggatgtcttcaccccagcctcctccctgcgcaacttctatgacttgtgagttgggctgcactgggttctggggcatttgcaggccttacatgccgctggggagcaaggtgggggagggtctagggtttctattccgggtgtggcggggagagcctccttccctggcagtcctgtgcctttgcctgtcaagtgtgattctctctggaaagatgcttttagccaaaggcaggcaggaagaggcaggaaggactttgtggggtgcttgcctggcagggggcagtctgcacagctgctttgctttttacccagctttaacaccatgaagacacatctgccagtcctcacagggttagcaccaactcacctttcctggggacacagatgtgagtctggaccttggagctctttctagcatgaagcaaggattaagaagccttggctgcctctggctgatgggggtgtttgacagaatggcagaaaaccagaatatttagctgcaaaatgtatagctttgcctgtgcagtgtctgaatgagactggactatttggacaagatggagaagtcagtgtggcacgtggaggccagcagctggcttggtcaagctgaatctggactgaccctacaggcagcctcaagacctggggactttgagccgggaggtgatatgttcagatgggatttgggggatgcacactggcagcagcaagaaaggagtaggaagcagctcggaggcagagggggagagcctggaggtcagtgttagtgatctaaagtagggatctaaagcagaggtgatgggatgccaagagcagacttgaggccccatttgggaggcagggccgacacaatgttccatctgttggggtgcagtagctgagtgaggtggcagaggtggaggaatgggcaggttcctgcttgaaatacacggtagaggaagaacagatcttgggggaaagataacgaactccattttggacactttacttttaaagaaactgtgaacattccaatgtttaatcacagttgcaaataaatatgaacctcaggagacgaaggtctgggctagggatgtggatttgtgctggaataatcaccgatgggttatagctgacacccgggaacagataattgtagaatgtggtaagatagtattgattcagatatcaacatgaaagagaagatccaagaggatgagcagatggaagaagctgagagggcctgataggaggcagaggagagtcagcaaagaattgagagggagtttcagacttggtgaaaggttagatcagaagaaaagggagtcatggtgtgtttgtcgggtgttcactggtgaccttgagctgagcagtctggcagtaggagggaagcagaaaccaggttaactcaggactgggaggtaaggcagtgggatccaggagtgtggaccgccctttctagaagtttggtggtgagagagggagaaggggtggtcagttgaagaagcaaagtcaagggaatgtggttctagcacagagaggcttcaggaagcatgttgccaagatgaaagaaccagtgcccgagtggaggggaaagacacaggaggggactgggcatggagaggcccccaagggaggtgtgtggtccggcaggagagggctgccaaaatccagagtctcctggagatgcctccagcatgtcctttcaaaaacaacaacaacaacaacaacaaaaaacacaacctattacataattgtttaaggtaacattcattttaaaaaagttttaaatttattatattctagagatagggctgggttgcccagactggagtgcagtggcacaaacacagttcactgcagcctccaactcctaggctcaagccatcctcccgcctcagccccccaagtaggtgggactacagatgcatgccaccatgtccagctttttgttttgttttaatttttatagatatggggtctcactatgttactcatcctgatctcgaattcccggcctcaagtgatcctcccacctcagcctcttgagtagctaagactaaaggtgcatgccaccacacctggctaatttttttttttttttctgaaaggtggggtccaggccgggcatggtggctcacgcctgtaatcccagcactttgggaagccgaggcaggcagatcacctgaggtcaggagttcgagaccagcctggccaacatggcaaaaccccgtctctactaagaatacaaaaattagctgggcgttctggcgtgcacctgtagttgtagctactcagggaagctgaggcaggaaaatcgcttgaacctgggaggtggaggttgcagtgagccaagatcacgccactgcactctagcctgggcgacagagcaagactccatctcaaagaaaaaaagaaaggaagaaagaaagatgggtccctatgttgctcaggctggtcttaaactcttcgcctcaagcgatcgtccagcctccatctcccaaagcactgggattggaggtatgcccctggcctattttataatttttattattttttgtctttgtcctggtctttgcttttactgtaacagttacattttgctggccttatcctgttgtgcaatcccctaagaggctgcaggagcctccccatctccctcttccaccctcctggaaactgttgtattgtttccttcttggaaaggtagacatattgtttgtttgtggagccatctcagctgggcatgaccctctgagggatcaaatatttggacagaagccgaaggaaatactggcagatgtttctaactcctagctgtggctttccctggggtgtggaggagggcaaggagagagtacctttgaagagcgggaacacagttccatgtggctttcctgagcgcgctccaactgcagcgcttactccgagctctgccagctgggcggcccgccacagggagactgggagccaggagcccagaggcccgtgtggtgatctggctggctgaggtggagttgagtttttgcacactggagggtgtctctatgacccctgttctgccctgaggtccctcctctgagctctgacctggggctgggtgggacccggcactgttccaagaacccctcatgccttccagctacctggtgatgcccttcatgcagacggatctgcagaagatcatggggatggagttcagtgaggagaagatccagtacctggtgtatcagatgctcaaaggccttaaggtgggtggggacttggaggctggcagaggggacgccttgctgtctagacctgaggtttggggaggctggagggagcgcactgttacaggtcggccagcctgaagtgcctggtgtggaagctgggccatggactcacccttctctctctcccacatagtacatccactctgctggggtcgtgcacagggtgagtgctttctctgccatggtcctcagaggcccctgtcccatccctgggtatggggttctctggcaatcaaggagtgggaaagttggagggaggggacactgcccaggagcacagaatgtggagttttcacacccagccacggcccaggaaggcctgctcaaaagagtcactgtgtcccaggggacttcatggggaattgctgcagacaaagtgagccctgagctgagtgtttcaggcttcaagaatcaggaacattttagagctgggtgggccctgagagaacacctagtccaaccctcattttacacatgaagaaactgaggcccagaaggggaaggggcctggctgaggtcacacccctgggtggtggtggagctaggacaagctccatctctgcctcagcctagcatgcattctctgtcctccccccaggacctgaagccaggcaacctggctgtgaatgaggactgtgaactgaaggtgagtgggctgcaggctcagcccagaggcgggataggccctcccccagggaagcccctggaagccgctcccagagcctcctcccctcagcaagttccttttctatttatcccctgtgccatagattctggattttgggctggcgcgacatgcagacgccgagatgactggctacgtggtgacccgctggtaccgagcccccgaggtgatcctcagctggatgcactacaaccagacaggtcagtggtcaatgcctgagagggcggtcctggggccatctggtcactcggtgctgactgactgctgggccccagacagtccaggtgacactctccctccctctgcagtggacatctggtctgtgggctgtatcatggcagagatgctgacagggaaaactctgttcaaggggaaagattgtatcctttgctggaaaagccaaactccatctagggattccttccttcaacagacactttatttaaataactgtcttttttttcttaatgtgagagtgatacatactccctgtagaataatttgtaaatgcagataaggctggacgcagtggttcatgcctgtaatcccagcactttgggaggctgaggtggaaggatcctttgagcccaggagtttgagaccagatgtggcaacatagggagaccccatctctaaaaaagttttttaaattagccagacatgggcctggcgcagtggctcatgtctgtaatcccagcactctgggaggctgaggcgggcagatcatgaggtcaggagatcgagaccatcctggctaacaaggggaaaccccgtatctactaaaaatacaaaaaattagccaggcgtggtggcaggcgcctgtagtcccagctactcaggaggctgaggcaggagaatggcgtgaacccaggaggtggagcttgcagtgagctgagatcgcgccactgcactccagcctgggtgacagagcaagactctgtctcaaaaaaaagaaaaagaaaaatcccagctacttgagaggctgaggtgggagggttgagcctgggaggttgaggctgcagtgagctatgattgtgccactgtactccagcctgggtgacagagggagaccctaactcaaaaaaaaaaaaaaaaaaaacaaaatgttgggtgggcatggtggctcacacctataatcccagcactttgggaggccatggcaggcggatcacctgagattaggagttcgagaccagcctggccaacgtggtcaaaccccatctctaccaaaaaatacaaaaattagccgggtgtggttcacgcctgtaatcccagctactcgggaggctgaggcaggaaaatcgcttgaacccaggaggtggaggttgcagtgagccaagactgtgccactgcactccagcctgagtgacagagtgagaccctgtctcaaaaaaaaaaaaaaaaaaaaaatgtagataagcaaaatgatgaaaaattctaccactacgtggaaaatacattttggcacggcacacattaactgagtacctgtgtgtgcagggcaggcctttggtgagaagacgaggaaacagaaaagagtcactgggatgaaggctgagaagtccacatccatttgttgggtagggacccccctcagcctggcacgttggaaagctctccagagccctgagccctgaagaataagcctcctcctgagagcaggaggtggttaggcagggctggagcctggatgatcagttgccatggtgcccgggtgaagtgatggtggggtcgcaggaagggcagtctcagacccaccaggagagcaaggctaagccttaacctgccaccaagacctggaccagctgacccagatcctgaaagtgaccggggtgcctggcacggagtttgtgcagaagctgaacgacaaagcggtgggtggtaaatgggacctaggctggcctgggctgtgtgcttgcctgacgtgggcccagtgggctgcaggcctttgtggaagaaggctcaccagcaccttcccacagcatcctcctaccctggcaggcactcttgtcttaatctcaccgtggaccctgacctgaactttcagccctgctctgaggcttttctgaaatccctgctctacacgctgaggccagagccctaaggggtttgatgcttttctgtcttccaggccaaatcctacatccagtccctgccacagacccccaggaaggatttcactcagctgttcccacgggccagcccccagggtgagtctcagagcccgctccccaggggcctctcagcgtatcccagagggcgggctctcccagcccctggtgtgaggctcttggctctgcccctgcagctgcggacctgctggagaagatgctggagctagacgtggacaagcgcctgacggccgcgcaggccctcacccatcccttctttgaacccttccgggaccctgaggaagagacggaggcccagcagccgtttgatgattccttagaacacgagaaactcacagtggatgaatggaagcgtaagagctggggcctcgggcttcctcgcctccgcctgcagcctctcttccttgcttcctccatctttgtgcctggcctctgccagccctacctgccacctccttcttggtgggcattgtctcctgggtgcttctttctccttgagctgact

SEQ ID NO: 12813 - DNA, 1036 bp, Homo sapiens
cccgacgcacgtcggcagcggggcctatggctccgtgtgctcggccatcgacaagcggtcaggggagaaggtggccatcaagaagctgagccgaccctttcagtccgagatcttcgccaagcgcgcctaccgggagctgctgctgctgaagcacatgcagcatgagaacgtcattgggctcctggatgtcttcaccccagcctcctccctgcgcaacttctatgacttctacctggtgatgcccttcatgcagacggatctgcagaagatcatggggatggagttcagtgaggagaagatccagtacctggtgtatcagatgctcaaaggccttaagtacatccactctgctggggtcgtgcacagggacctgaagccaggcaacctggctgtgaatgaggactgtgaactgaagattctggattttgggctggcgcgacatgcagacgccgagatgactggctacgtggtgacccgctggtaccgagcccccgaggtgatcctcagctggatgcactacaaccagacaggccaaatcctacatccagtccctgccacagacccccaggaaggatttcactcagctgttcccacgggccagcccccagggtgagtctcagagcccgctccccaggggcctctcagcgtatcccagagggcgggctctcccagcccctggtgtgaggctcttggctctgcccctgcagctgcggacctgctggagaagatgctggagctagacgtggacaagcgcctgacggccgcgcaggccctcacccatcccttctttgaacccttccgggaccctgaggaagagacggaggcccagcagccgtttgatgattccttagaacacgagaaactcacagtggatgaatggaagcgtaagagctggggcctcgggcttcctcgcctccgcctgcagcctctcttccttgcttcctccatctttgtgcctggcctctgccagccctacctgccacctccttcttggtgggcattgtctcctgggtgcttctttctccttgagctgact

SEQ ID NO: 12814 - DNA, 14041 bp, Homo sapiens
ggcggcgcggggcgggcgcagcgggggtcggggcgctgggagcccgttgggccgcgaacgcagccgccacgctggggccgccgagatcgggtgcccgggatgagcctcatccggaaaaagggcttctacaagcaggacgtcaacaagacagcctgggagctgcccaagacctacgtgtccccgacgcacgtcggcagcggggcctatggctccgtgtggtgagacccctgggccgctggggggcggggggcgggcgccaggctctcccctttccgcccagcccgccctgggctggcccctcgccagcgccaccttgaccgcggacctcaaggcccagcgccctccccggggccacccagcggccatctcccttttctcaccgagtggctgagtgaggtctctgggggttgagttgggactgggcctggttctccaggactgtacacttgcaagaccccagagttcatcgggcagatcctcactgttacagacgagtacaccgaggccccaagagggggaggtggctcgccaagttgcagacagagtgagactcccgccctgccgtggatcccgtcgcaatgagacgttgctgcccctggcgctgtgcccctctctcagctcctgcctggcttcctactccctgccctgcgtcccgcggctcccccatattctaggtggtgggcctagtcccctctcagcccagctgcccagtgggaggggtcagggcggtctgggagatacggcccaggaggagagcctcgcctgctgaccggcctgtgcccgacagctcggccatcgacaagcggtcaggggagaaggtggccatcaagaagctgagccgaccctttcagtccgagatcttcgccaagcgcgcctaccgggagctgctgctgctgaagcacatgcagcatgagaacgtaggtggtggctgccccggggagggggtgggggctgccctggggagtcaggggcaggcgcaggcggggcctcccggtatggagagctcgggacagtctcctccctgctcccctgacggtgcctctcgcctcactattgaaaggagggggtgccgagaccttccctgcccactttccaggaagaggtcaaagggtatttttggcagaatgcactttgtgaggtacagactgtgttatcctacagaggaaattggcacaggggaactttgtaattggttccatgtctgagagcttgtggccagctgggactagaatcctagttagcgttgtgtccacgtgaccctgataacaatagcaatatacacatattgagcacttcctatgttctaagagctctgcatacactaacttgtctagtcctcatgatatatgagtactactgcccccatgtcacagacaggaaactaaagcacagcaaggctcacagattagatggttagtcagtagcagagctggggtttcaatctcggcagcgaggctcccggtctgagcacatgaccatcagattgtcttgtctgatagaagcagctgggaaaaccaggggcccagctcagggcctggcagccaggctttgctgcaggatacctagattggagggcagacatttcaaagaatgatttcaaaatgttatgtacattttaagcccatccttctccagcaaacccctcccctatggcctccagccagggtgatcttgcccttggctctgaaccagccctgtggcaggcaaggatggatgtggctggagacccaaggtcaggggcagggagtttgctggctgaaaagctccttctctgttccctcctttttcccttccaccctccccttatgctttcctgctgcctaggtgagttgagagtgggtttgtgttgcttgccctgacaccagacttgacagcaatgagcacacatcattctccccaccttcccttctccccagcctgactctctgtcatgatttattgcaaactccctccaaatccaggggattcctctaggcctctgccctttttactgcttccaagaaggttggagacatgcctcctgctggaggtggtgtattaggaaagggtggatggccctgtgcatggccagggcccaggaggaggtgggaggagaaggtagcgtctgtctagccctcacaggtgacttcttccccaggtcattgggctcctggatgtcttcaccccagcctcctccctgcgcaacttctatgacttgtgagttgggctgcactgggttctggggcatttgcaggccttacatgccgctggggagcaaggtgggggagggtctagggtttctattccgggtgtggcggggagagcctccttccctggcagtcctgtgcctttgcctgtcaagtgtgattctctctggaaagatgcttttagccaaaggcaggcaggaagaggcaggaaggactttgtggggtgcttgcctggcagggggcagtctgcacagctgctttgctttttacccagctttaacaccatgaagacacatctgccagtcctcacagggttagcaccaactcacctttcctggggacacagatgtgagtctggaccttggagctctttctagcatgaagcaaggattaagaagccttggctgcctctggctgatgggggtgtttgacagaatggcagaaaaccagaatatttagctgcaaaatgtatagctttgcctgtgcagtgtctgaatgagactggactatttggacaagatggagaagtcagtgtggcacgtggaggccagcagctggcttggtcaagctgaatctggactgaccctacaggcagcctcaagacctggggactttgagccgggaggtgatatgttcagatgggatttgggggatgcacactggcagcagcaagaaaggagtaggaagcagctcggaggcagagggggagagcctggaggtcagtgttagtgatctaaagtagggatctaaagcagaggtgatgggatgccaagagcagacttgaggccccatttgggaggcagggccgacacaatgttccatctgttggggtgcagtagctgagtgaggtggcagaggtggaggaatgggcaggttcctgcttgaaatacacggtagaggaagaacagatcttgggggaaagataacgaactccattttggacactttacttttaaagaaactgtgaacattccaatgtttaatcacagttgcaaataaatatgaacctcaggagacgaaggtctgggctagggatgtggatttgtgctggaataatcaccgatgggttatagctgacacccgggaacagataattgtagaatgtggtaagatagtattgattcagatatcaacatgaaagagaagatccaagaggatgagcagatggaagaagctgagagggcctgataggaggcagaggagagtcagcaaagaattgagagggagtttcagacttggtgaaaggttagatcagaagaaaagggagtcatggtgtgtttgtcgggtgttcactggtgaccttgagctgagcagtctggcagtaggagggaagcagaaaccaggttaactcaggactgggaggtaaggcagtgggatccaggagtgtggaccgccctttctagaagtttggtggtgagagagggagaaggggtggtcagttgaagaagcaaagtcaagggaatgtggttctagcacagagaggcttcaggaagcatgttgccaagatgaaagaaccagtgcccgagtggaggggaaagacacaggaggggactgggcatggagaggcccccaagggaggtgtgtggtccggcaggagagggctgccaaaatccagagtctcctggagatgcctccagcatgtcctttcaaaaacaacaacaacaacaacaacaaaaaacacaacctattacataattgtttaaggtaacattcattttaaaaaagttttaaatttattatattctagagatagggctgggttgcccagactggagtgcagtggcacaaacacagttcactgcagcctccaactcctaggctcaagccatcctcccgcctcagccccccaagtaggtgggactacagatgcatgccaccatgtccagctttttgttttgttttaatttttatagatatggggtctcactatgttactcatcctgatctcgaattcccggcctcaagtgatcctcccacctcagcctcttgagtagctaagactaaaggtgcatgccaccacacctggctaatttttttttttttttctgaaaggtggggtccaggccgggcatggtggctcacgcctgtaatcccagcactttgggaagccgaggcaggcagatcacctgaggtcaggagttcgagaccagcctggccaacatggcaaaaccccgtctctactaagaatacaaaaattagctgggcgttctggcgtgcacctgtagttgtagctactcagggaagctgaggcaggaaaatcgcttgaacctgggaggtggaggttgcagtgagccaagatcacgccactgcactctagcctgggcgacagagcaagactccatctcaaagaaaaaaagaaaggaagaaagaaagatgggtccctatgttgctcaggctggtcttaaactcttcgcctcaagcgatcgtccagcctccatctcccaaagcactgggattggaggtatgcccctggcctattttataatttttattattttttgtctttgtcctggtctttgcttttactgtaacagttacattttgctggccttatcctgttgtgcaatcccctaagaggctgcaggagcctccccatctccctcttccaccctcctggaaactgttgtattgtttccttcttggaaaggtagacatattgtttgtttgtggagccatctcagctgggcatgaccctctgagggatcaaatatttggacagaagccgaaggaaatactggcagatgtttctaactcctagctgtggctttccctggggtgtggaggagggcaaggagagagtacctttgaagagcgggaacacagttccatgtggctttcctgagcgcgctccaactgcagcgcttactccgagctctgccagctgggcggcccgccacagggagactgggagccaggagcccagaggcccgtgtggtgatctggctggctgaggtggagttgagtttttgcacactggagggtgtctctatgacccctgttctgccctgaggtccctcctctgagctctgacctggggctgggtgggacccggcactgttccaagaacccctcatgccttccagctacctggtgatgcccttcatgcagacggatctgcagaagatcatggggatggagttcagtgaggagaagatccagtacctggtgtatcagatgctcaaaggccttaaggtgggtggggacttggaggctggcagaggggacgccttgctgtctagacctgaggtttggggaggctggagggagcgcactgttacaggtcggccagcctgaagtgcctggtgtggaagctgggccatggactcacccttctctctctcccacatagtacatccactctgctggggtcgtgcacagggtgagtgctttctctgccatggtcctcagaggcccctgtcccatccctgggtatggggttctctggcaatcaaggagtgggaaagttggagggaggggacactgcccaggagcacagaatgtggagttttcacacccagccacggcccaggaaggcctgctcaaaagagtcactgtgtcccaggggacttcatggggaattgctgcagacaaagtgagccctgagctgagtgtttcaggcttcaagaatcaggaacattttagagctgggtgggccctgagagaacacctagtccaaccctcattttacacatgaagaaactgaggcccagaaggggaaggggcctggctgaggtcacacccctgggtggtggtggagctaggacaagctccatctctgcctcagcctagcatgcattctctgtcctccccccaggacctgaagccaggcaacctggctgtgaatgaggactgtgaactgaaggtgagtgggctgcaggctcagcccagaggcgggataggccctcccccagggaagcccctggaagccgctcccagagcctcctcccctcagcaagttccttttctatttatcccctgtgccatagattctggattttgggctggcgcgacatgcagacgccgagatgactggctacgtggtgacccgctggtaccgagcccccgaggtgatcctcagctggatgcactacaaccagacaggtcagtggtcaatgcctgagagggcggtcctggggccatctggtcactcggtgctgactgactgctgggccccagacagtccaggtgacactctccctccctctgcagtggacatctggtctgtgggctgtatcatggcagagatgctgacagggaaaactctgttcaaggggaaagattgtatcctttgctggaaaagccaaactccatctagggattccttccttcaacagacactttatttaaataactgtcttttttttcttaatgtgagagtgatacatactccctgtagaataatttgtaaatgcagataaggctggacgcagtggttcatgcctgtaatcccagcactttgggaggctgaggtggaaggatcctttgagcccaggagtttgagaccagatgtggcaacatagggagaccccatctctaaaaaagttttttaaattagccagacatgggcctggcgcagtggctcatgtctgtaatcccagcactctgggaggctgaggcgggcagatcatgaggtcaggagatcgagaccatcctggctaacaaggggaaaccccgtatctactaaaaatacaaaaaattagccaggcgtggtggcaggcgcctgtagtcccagctactcaggaggctgaggcaggagaatggcgtgaacccaggaggtggagcttgcagtgagctgagatcgcgccactgcactccagcctgggtgacagagcaagactctgtctcaaaaaaaagaaaaagaaaaatcccagctacttgagaggctgaggtgggagggttgagcctgggaggttgaggctgcagtgagctatgattgtgccactgtactccagcctgggtgacagagggagaccctaactcaaaaaaaaaaaaaaaaaaaacaaaatgttgggtgggcatggtggctcacacctataatcccagcactttgggaggccatggcaggcggatcacctgagattaggagttcgagaccagcctggccaacgtggtcaaaccccatctctaccaaaaaatacaaaaattagccgggtgtggttcacgcctgtaatcccagctactcgggaggctgaggcaggaaaatcgcttgaacccaggaggtggaggttgcagtgagccaagactgtgccactgcactccagcctgagtgacagagtgagaccctgtctcaaaaaaaaaaaaaaaaaaaaaatgtagataagcaaaatgatgaaaaattctaccactacgtggaaaatacattttggcacggcacacattaactgagtacctgtgtgtgcagggcaggcctttggtgagaagacgaggaaacagaaaagagtcactgggatgaaggctgagaagtccacatccatttgttgggtagggacccccctcagcctggcacgttggaaagctctccagagccctgagccctgaagaataagcctcctcctgagagcaggaggtggttaggcagggctggagcctggatgatcagttgccatggtgcccgggtgaagtgatggtggggtcgcaggaagggcagtctcagacccaccaggagagcaaggctaagccttaacctgccaccaagacctggaccagctgacccagatcctgaaagtgaccggggtgcctggcacggagtttgtgcagaagctgaacgacaaagcggtgggtggtaaatgggacctaggctggcctgggctgtgtgcttgcctgacgtgggcccagtgggctgcaggcctttgtggaagaaggctcaccagcaccttcccacagcatcctcctaccctggcaggcactcttgtcttaatctcaccgtggaccctgacctgaactttcagccctgctctgaggcttttctgaaatccctgctctacacgctgaggccagagccctaaggggtttgatgcttttctgtcttccaggccaaatcctacatccagtccctgccacagacccccaggaaggatttcactcagctgttcccacgggccagcccccagggtgagtctcagagcccgctccccaggggcctctcagcgtatcccagagggcgggctctcccagcccctggtgtgaggctcttggctctgcccctgcagctgcggacctgctggagaagatgctggagctagacgtggacaagcgcctgacggccgcgcaggccctcacccatcccttctttgaacccttccgggaccctgaggaagagacggaggcccagcagccgtttgatgattccttagaacacgagaaactcacagtggatgaatggaagcgtaagagctggggcctcgggcttcctcgcctccgcctgcagcctctcttccttgcttcctccatctttgtgcctggcctctgccagccctacctgccacctccttcttggtgggcattgtctcctgggtgcttctttctccttgagctgacttcgctctccatgctgtctctgaaggggggtggactttctcgccacagcacctctttacgcaccttaaaccatgctgcctttctcagagcacatctacaaggagattgtgaacttcagccccattgcccggaaggactcacggcgccggagtggcatgaagctgtagggactcatcttgcatggcaccgccggccagacactgcccaaggaccagtatttgtcactaccaaactcagcccttcttggaatacagcctttcaagcagaggacagaagggtccttctccttatgtgggaaatgggcctagtagatgcagaattcaaagatgtcggttgggagaaactagctctgatcctaacaggccacgttaaactgcccatctggagaatcgcctgcaggtggggccctttccttcccgccagagtggggctgagtgggcgctgagccaggccgggggcctatggcagtgatgctgtgttggtttcctagggatgctctaacgaattaccacaaacctggtggattgaaacagcagaacttgattcccttacagttctggaggctggaaatctgggatggaggtgttggcagggctgtggtccctttgaaggctctggggaagaatccttccttggctctttttagcttgtggcggcagtgggcagtccgtggcattccccagcttattgctgcatcactccagtctctgtctcttctgttctctcctcttttaacaacagtcattggatttagggcccaccctaatcctgtgtgatcttatcttgatccttattaattaaacctgcaaatactctagttccaaataaagtcacattctcaggttccaggtggacatgaattccagggggaaatgattcaactcactacagacagctgggagggaggggccccttcctgggccccgtgctgaggccttgtgctctgtgaaggaacccaatgtgtttggctgctaaattaagggagttgcagagagagctgcagctggtgcgattgcattcaggttattttgggtgagtgataagcaatcaagatatgaaacaacagcaggctcggagactgcgagctgcacaggcagaaatgggctcttgcctggcttgatggcaaaccgttctgctccctttgggagatggcacagctctccagagctttgacctgacagtggctagaacctctctgtttttatctgagaaactttggcagaacaaatttccatgtgcacaagctgtcgggcacagtgggtctcaaatttccttgtgcaccaggggacttgttaaaatgcagattcctgggccccaccccagggcttgtgactcagcaggtctgcagttgagaccttagaatgtgcatttgaatgaggacctctcgccctgacccaagcctagtgattctgatggatatcagaccatagttcgagacatttagtggatttcagtcatacttgatttgttgggaggcctaaatcaaaaacctataggaggagactggggggcttcagatggagtttcacactcatcttacaggtgttaaaactgaggctcagaaagcttttttttgtttgtttgtttgagacagggtctggctctgtcacccgggctggagttcagtggcacaattacatcttactgcaacctcagcctcctgggctcaagccatcctcccacctcagcctcctaagtagctgggactacaggtctgtgccacccaggtgcaccaggactgcaggtggctaattaaaacattttttttcttttttgtataggcggggtttctctatgttgcccaggctgatcttgaacttctggactcaagtgatcctcccactttggcctcccaaagtgctgggattataggcatgagccaccctgcaggcccagacagcatttttaaggccttgaaactcttctgtataatactgtaatggtggatacctattgtgcatttgttaccatctgtaggactggataacacagagtgaaccctcaagtaaactatggacttcagttaataataatgtatcagtattggttcataaattgtaacaattgtgccacactaatgcaagatgttactcatcaagaaaactgaggagagagaaggggaggaagtaggtgggaacctctatactttctaccaacctaaaactgctctaaaaaataaaccacaggccggtcgcagtagctcacgcctgtaatcccagcaccttgggaggctgaggtgggcggatcacttgaggtcaggagttcaagaccagcctggccaacatggtgaaaccccatctctaccaaaaatacaaaaattagctgggcttggtggtgcatgcctgtaatcccaaactactcgggaggctgaggcagaattgcttgaacctgggaggtggaggttgcagtgagctgagatcacaccactgcactccagcctgggtgacagagtgagactccatctcaaaaaaacaaaaaaaacaaataccctgaggacacagagacattgggtcagacacccacagctaggaagtggtggagtcagattggaacccaagtaggcttgagcactgtacccagcttggattcaagggttgcccagccttccctcttcacgccagtctgagacccttactgctgactgtgtccatggtctctgttttctctcccacagaatggccctgctgtcaaggagctggggagtccttgactgggactggctagtcttgccacagccctggcctcgctggttactaaaactgccccaggttccctgagtctacatccctctaagcctcctgagaattctcactgccccaaggaaaaagtctagccttccttcttggcctggcattcaaaaccccttgtgttctctctaatctcatcagctcccactgcctcccctagctagtccttatgtcagtgtgggacaccagtcctgggatccaccgtaaggttcattctgcattcacaggttaaaggtcttgacaagtcctgcagtaaagagatccgttcctcatttaatccagaacttcccagatgtacttaaccgcaggacccattttctcccaacagcatgacacacatagccttttttgcccagtgcagcccagtgcacaggtcccgatattgcctctccccaagtaggcttggccttcttttagtgcccgtgcgtggaaggccctccattctcctctccattctccttggccttcaaggctctaccttaggcctccctccaggcagctgttctccatcatcccccctgggctgcaggccctctgtgggcagcatttagtgtgtggtttggcctccccttcccattgcccactgtgagcaaatacctgtgcgtgaatgaataatgagtgaaagatgtcccaggggcctgtcggtcacttctttgccccgaccaggccaatgtcatatggaaggtggcagagagcccagcaggaagcagaagtgggcggccctgggctgtacctttgagctgctctcctgaaaatctctattatttcagactcccagaccccaccccccgcttcatcctctggtgtcctcctaggccatccccactccggaattaaacctcagcccctcccacagagttttctcaaatctgtgaagtttcttcaaaaggcggtggaggtgctcagcagtgcaaggtggggggtggagggggtggggagtagagggagtgggggttccacgggtttgggtcttgcccagtgggcacatggcctgtgtaataggaaacaagtccattctcctgctgtggggggcagaggagctggcggggcgagggagggggagatgtgggctcaggtattcttggtggatgcgcttcgttctgtggctgatggggtggcttaaaagatcttaacagagagagatcaggaagccagactgcaaggtgggggacatttcctaagagcaagtgtaccctccattccctcttttgaggaacaaagagtatctttgctggggcctgagtcatccatgaaaacagacagcagcggtgtcccagggcagggcttgcctggcgtggattggggtggtgctgcccccagtgaggggcagcacaaggggagacagaaatggaggaatagcccccgtaagggcaagcccagtgtgcaccagtgcccagagctgcctgatggaggaacagctccgtaagggtgaacccagtgtgcacgggtgcccggagctgcctgcgtgaggctgggggctagtttggatgagggcatggctcaactttcacttggcacattgaaatagcttttgctgtctgctagggtgtggaaaactgtttttccatggccccaagcaatgctatagctacagctgaggagggaggaatctctccctgcctctcctcccaactcttggcttttgcttccttaaatttgaacaattccctaagatctaatgctgggaggctccccttccttcattacacagtgaactcatgtgctctatctgcattccccctaaatcctcctgagcttttaggtaagaggccgatgatttcacaatcggcagcagaggcctaaggccattccatcaaactgaagatggcagcaagttgtcctcacttcttcattgagcacccatgggtgtgtactggagcaagggtggtgccagggattctcctgctctggttcctcctgcggggtccctgctcagctgggcagctgccctcactctgggcgggtggcatgtgagtgtcaacagggcccctctcagtcaggggctcttggccattttttgtgccatggatcgcttctcaaaatcatattttcttttcttttcttttgagatggggtctcactccattacccaggctggagtgcagtggtgcaatcacagctcactgtagcctcgacctccctgggttcaggtgatcctcccacctcagcctcccaagtagctgggactataggcatgcaccaccatgcctggctaatttcagaataatattttcatacacataaaatatgtaggattacaaagtaagctagttatatttatatacagttgtcaaaatatttttaaaatgtataacgtgatactatgtgtataggtttctttattaacatattgaataaaaagatcgagggtaggcctattaaacaatggtaaactgaagagagatgagtgtaaacaatattttaagatagatacctgtggcaaactgtaaagggatatgaaaaactctgtaatttctattggcactgctgatacaactgcactttgctacctttgttcataaccaaggaaatagaaatgactgaaaataaagttgtattctattccaatcc

SEQ ID NO: 12815 - DNA, 6196 bp, Homo sapiens
ggcggcgcggggcgggcgcagcgggggtcggggcgctgggagcccgttgggccgcgaacgcagccgccacgctggggccgccgagatcgggtgcccgggatgagcctcatccggaaaaagggcttctacaagcaggacgtcaacaagacagcctgggagctgcccaagacctacgtgtccccgacgcacgtcggcagcggggcctatggctccgtgtgctcggccatcgacaagcggtcaggggagaaggtggccatcaagaagctgagccgaccctttcagtccgagatcttcgccaagcgcgcctaccgggagctgctgctgctgaagcacatgcagcatgagaacgtcattgggctcctggatgtcttcaccccagcctcctccctgcgcaacttctatgacttctacctggtgatgcccttcatgcagacggatctgcagaagatcatggggatggagttcagtgaggagaagatccagtacctggtgtatcagatgctcaaaggccttaagtacatccactctgctggggtcgtgcacagggacctgaagccaggcaacctggctgtgaatgaggactgtgaactgaagattctggattttgggctggcgcgacatgcagacgccgagatgactggctacgtggtgacccgctggtaccgagcccccgaggtgatcctcagctggatgcactacaaccagacaggccaaatcctacatccagtccctgccacagacccccaggaaggatttcactcagctgttcccacgggccagcccccaggctgcggacctgctggagaagatgctggagctagacgtggacaagcgcctgacggccgcgcaggccctcacccatcccttctttgaacccttccgggaccctgaggaagagacggaggcccagcagccgtttgatgattccttagaacacgagaaactcacagtggatgaatggaagcagcacatctacaaggagattgtgaacttcagccccattgcccggaaggactcacggcgccggagtggcatgaagctgtagggactcatcttgcatggcaccgccggccagacactgcccaaggaccagtatttgtcactaccaaactcagcccttcttggaatacagcctttcaagcagaggacagaagggtccttctccttatgtgggaaatgggcctagtagatgcagaattcaaagatgtcggttgggagaaactagctctgatcctaacaggccacgttaaactgcccatctggagaatcgcctgcaggtggggccctttccttcccgccagagtggggctgagtgggcgctgagccaggccgggggcctatggcagtgatgctgtgttggtttcctagggatgctctaacgaattaccacaaacctggtggattgaaacagcagaacttgattcccttacagttctggaggctggaaatctgggatggaggtgttggcagggctgtggtccctttgaaggctctggggaagaatccttccttggctctttttagcttgtggcggcagtgggcagtccgtggcattccccagcttattgctgcatcactccagtctctgtctcttctgttctctcctcttttaacaacagtcattggatttagggcccaccctaatcctgtgtgatcttatcttgatccttattaattaaacctgcaaatactctagttccaaataaagtcacattctcaggttccaggtggacatgaattccagggggaaatgattcaactcactacagacagctgggagggaggggccccttcctgggccccgtgctgaggccttgtgctctgtgaaggaacccaatgtgtttggctgctaaattaagggagttgcagagagagctgcagctggtgcgattgcattcaggttattttgggtgagtgataagcaatcaagatatgaaacaacagcaggctcggagactgcgagctgcacaggcagaaatgggctcttgcctggcttgatggcaaaccgttctgctccctttgggagatggcacagctctccagagctttgacctgacagtggctagaacctctctgtttttatctgagaaactttggcagaacaaatttccatgtgcacaagctgtcgggcacagtgggtctcaaatttccttgtgcaccaggggacttgttaaaatgcagattcctgggccccaccccagggcttgtgactcagcaggtctgcagttgagaccttagaatgtgcatttgaatgaggacctctcgccctgacccaagcctagtgattctgatggatatcagaccatagttcgagacatttagtggatttcagtcatacttgatttgttgggaggcctaaatcaaaaacctataggaggagactggggggcttcagatggagtttcacactcatcttacaggtgttaaaactgaggctcagaaagcttttttttgtttgtttgtttgagacagggtctggctctgtcacccgggctggagttcagtggcacaattacatcttactgcaacctcagcctcctgggctcaagccatcctcccacctcagcctcctaagtagctgggactacaggtctgtgccacccaggtgcaccaggactgcaggtggctaattaaaacattttttttcttttttgtataggcggggtttctctatgttgcccaggctgatcttgaacttctggactcaagtgatcctcccactttggcctcccaaagtgctgggattataggcatgagccaccctgcaggcccagacagcatttttaaggccttgaaactcttctgtataatactgtaatggtggatacctattgtgcatttgttaccatctgtaggactggataacacagagtgaaccctcaagtaaactatggacttcagttaataataatgtatcagtattggttcataaattgtaacaattgtgccacactaatgcaagatgttactcatcaagaaaactgaggagagagaaggggaggaagtaggtgggaacctctatactttctaccaacctaaaactgctctaaaaaataaaccacaggccggtcgcagtagctcacgcctgtaatcccagcaccttgggaggctgaggtgggcggatcacttgaggtcaggagttcaagaccagcctggccaacatggtgaaaccccatctctaccaaaaatacaaaaattagctgggcttggtggtgcatgcctgtaatcccaaactactcgggaggctgaggcagaattgcttgaacctgggaggtggaggttgcagtgagctgagatcacaccactgcactccagcctgggtgacagagtgagactccatctcaaaaaaacaaaaaaaacaaataccctgaggacacagagacattgggtcagacacccacagctaggaagtggtggagtcagattggaacccaagtaggcttgagcactgtacccagcttggattcaagggttgcccagccttccctcttcacgccagtctgagacccttactgctgactgtgtccatggtctctgttttctctcccacagaatggccctgctgtcaaggagctggggagtccttgactgggactggctagtcttgccacagccctggcctcgctggttactaaaactgccccaggttccctgagtctacatccctctaagcctcctgagaattctcactgccccaaggaaaaagtctagccttccttcttggcctggcattcaaaaccccttgtgttctctctaatctcatcagctcccactgcctcccctagctagtccttatgtcagtgtgggacaccagtcctgggatccaccgtaaggttcattctgcattcacaggttaaaggtcttgacaagtcctgcagtaaagagatccgttcctcatttaatccagaacttcccagatgtacttaaccgcaggacccattttctcccaacagcatgacacacatagccttttttgcccagtgcagcccagtgcacaggtcccgatattgcctctccccaagtaggcttggccttcttttagtgcccgtgcgtggaaggccctccattctcctctccattctccttggccttcaaggctctaccttaggcctccctccaggcagctgttctccatcatcccccctgggctgcaggccctctgtgggcagcatttagtgtgtggtttggcctccccttcccattgcccactgtgagcaaatacctgtgcgtgaatgaataatgagtgaaagatgtcccaggggcctgtcggtcacttctttgccccgaccaggccaatgtcatatggaaggtggcagagagcccagcaggaagcagaagtgggcggccctgggctgtacctttgagctgctctcctgaaaatctctattatttcagactcccagaccccaccccccgcttcatcctctggtgtcctcctaggccatccccactccggaattaaacctcagcccctcccacagagttttctcaaatctgtgaagtttcttcaaaaggcggtggaggtgctcagcagtgcaaggtggggggtggagggggtggggagtagagggagtgggggttccacgggtttgggtcttgcccagtgggcacatggcctgtgtaataggaaacaagtccattctcctgctgtggggggcagaggagctggcggggcgagggagggggagatgtgggctcaggtattcttggtggatgcgcttcgttctgtggctgatggggtggcttaaaagatcttaacagagagagatcaggaagccagactgcaaggtgggggacatttcctaagagcaagtgtaccctccattccctcttttgaggaacaaagagtatctttgctggggcctgagtcatccatgaaaacagacagcagcggtgtcccagggcagggcttgcctggcgtggattggggtggtgctgcccccagtgaggggcagcacaaggggagacagaaatggaggaatagcccccgtaagggcaagcccagtgtgcaccagtgcccagagctgcctgatggaggaacagctccgtaagggtgaacccagtgtgcacgggtgcccggagctgcctgcgtgaggctgggggctagtttggatgagggcatggctcaactttcacttggcacattgaaatagcttttgctgtctgctagggtgtggaaaactgtttttccatggccccaagcaatgctatagctacagctgaggagggaggaatctctccctgcctctcctcccaactcttggcttttgcttccttaaatttgaacaattccctaagatctaatgctgggaggctccccttccttcattacacagtgaactcatgtgctctatctgcattccccctaaatcctcctgagcttttaggtaagaggccgatgatttcacaatcggcagcagaggcctaaggccattccatcaaactgaagatggcagcaagttgtcctcacttcttcattgagcacccatgggtgtgtactggagcaagggtggtgccagggattctcctgctctggttcctcctgcggggtccctgctcagctgggcagctgccctcactctgggcgggtggcatgtgagtgtcaacagggcccctctcagtcaggggctcttggccattttttgtgccatggatcgcttctcaaaatcatattttcttttcttttcttttgagatggggtctcactccattacccaggctggagtgcagtggtgcaatcacagctcactgtagcctcgacctccctgggttcaggtgatcctcccacctcagcctcccaagtagctgggactataggcatgcaccaccatgcctggctaatttcagaataatattttcatacacataaaatatgtaggattacaaagtaagctagttatatttatatacagttgtcaaaatatttttaaaatgtataacgtgatactatgtgtataggtttctttattaacatattgaataaaaagatcgagggtaggcctattaaacaatggtaaactgaagagagatgagtgtaaacaatattttaagatagatacctgtggcaaactgtaaagggatatgaaaaactctgtaatttctattggcactgctgatacaactgcactttgctacctttgttcataaccaaggaaatagaaatgactgaaaataaagttgtattctattccaatcc

SEQ ID NO: 12816 - DNA, 8024 bp, Homo sapiens
cttggtatccccaccttcctgggctcacctctgccccactcaggtgtttaagacgtgcagcagagaggcgccatcctgacctggtgccacatcctagcccctttccttactggatcctcaaaccagaagaaaacctgaatctctgaggtcagttactctcttttgcctgcgtctagcctaaaatctggcttccaggaccccaccccaacttcagaatcaaggtaccttgcactggtgccactgatcccaaaggtccaaaactcctgcagcactcacaggcaagcgaccccgttccttaggctctcatggggtctcagggccagagtagggggtgggggagggaaaaggctggggaaaatatcagataccccagggcaggatggactgagggagacatggttggatcagtagacatgtccttatgatgtgggcaaggccatttcctttgaggagcaattctgtcaactctaggccaccgcatagcctcgcagccaagagcagggactctagaatcaggctgtacttgctttcacccagctctgcccttaccagctgtgttaccttgggcaaattacttagcctctctgtacctcgggttcctcatctctaaaatgaggataatcatattactgactcacaggcctcttaccaggattaagtgagttatataaaacacttaatgacgggcacatggcaaacacaagtgtgtattaaatgactcttttacatctaatgggctgactcctccattcattctccacacatttgctgttatattgccatgtgccagaaatgaaaaagacagattgcctgactgaaataatggcaggtgttgttgtgtgatgatggcaccccaccctcatctcagaatgatcttccaggctgtgcctgaggctgcaggactgcccgggagggcttggggcacagagtttgggggctgcagactccctagtgtgggcccccggcttgctgtaagcccctagcaaatttctttccttgttcaatagaccttctttttgacaaagtgaagcaggtggtccccgccccttccacagccccatgcctgggcaagagaggggttggacaagtcaggctgggcatccagagcccttgcagccatctcctccccccacctgcccaccttgctcctcagaggcctttgtggtttgagcaaagaatctccatcaggctgcacaggccaccagacaggtggcaagggccccaattagtcattgtcctcatagagccttaggaagtccacagaaactgtgttcaaaactgcacatttgggccaggtgcggtggctcacttctgtaatccaaacactttgggaggctgaggtgggcggaccacctgaggtcaggagttgaagaccagcctggccaacatggtgaaaccccgtctctactaaaaatacaaaaattagctaggagtggtggtgtgcacctgtagtcccagctactcaggaggctgaggcaagagaattgcttgaacctgggaggcggaggttgcagtgagctgagatggcgccactgcactccagcctaggcaatagagtgagactccatgtcaaaaacaaacaaaaatcctgcacatttgaacctgcgtggatatttggtattatagaattagtgctattaattttaggtttaagaatgtattgtgggccaggcgcggtggctcacgcctgtaatcccaacactttcggaggccgaggcgggtggttcacgaggtcaggagttcaagaccagcctggccaagatggtgaaaccccatctctattaaaaatacaaaaattagccgggtttggtggcaggcacctacaatcctagctaatcgggaggcggaggcagagaattgcttgaacccgggaggcggaggttgcagtgagccgagatggcaactgcactccgacagagtctcaaaaaatatatatatatagtattgtggatacgtacttttaaaaatccttacgttttagagatacaaaaatatttatgaataaaatgatatgacgcctgggttttgcttcaaaacgatggtgggagaggaatgtggatgaaataaaattgattatgagttgtggttgctggggaattggggtcacgggggttcattagaacctcctatcagatgtggttcagaagcctcagacctgggagctggctagaaatgcagaatctcggctccaccccaaacctactgagtcaggatctgtattttaatcaaataaaatgcccaggggattcctgagcacactgaagtgtgagaagcgctggcttactctgttcaattctttcctgcatgtttgacattttccataatgaagaggttgtggggttttgttctgctttcctgtgtgttcacagtcacagggagctcttcctacggagaccggggctggagggaactgggaagcactgcctccccgctcctgcttggacccaccagccccgccgctggcccgcgctcggctgggaggcaccggggtcccgctgggcagccccgaccccgtgcctgggccgcacctgccgcagtggctccgtcgggccgggcggaagcgcgggagcgcagggctggacaggcccgggcgtggcggccccggcgcacctgggcgagccggcaggtgggagcgtagcagcccggggcccccgccctcgcgcgggggaggagcgggcggcgcggggcgggcgcagcgggggtcggggcgctgggagcccgttgggccgcgaacgcagccgccacgctggggccgccgagatcgggtgcccgggatgagcctcatccggaaaaagggcttctacaagcaggacgtcaacaagacagcctgggagctgcccaagacctacgtgtccccgacgcacgtcggcagcggggcctatggctccgtgtggtgagacccctgggccgctggggggcggggggcgggcgccaggctctcccctttccgcccagcccgccctgggctggcccctcgccagcgccaccttgaccgcggacctcaaggcccagcgccctccccggggccacccagcggccatctcccttttctcaccgagtggctgagtgaggtctctgggggttgagttgggactgggcctggttctccaggactgtacacttgcaagaccccagagttcatcgggcagatcctcactgttacagacgagtacaccgaggccccaagagggggaggtggctcgccaagttgcagacagagtgagactcccgccctgccgtggatcccgtcgcaatgagacgttgctgcccctggcgctgtgcccctctctcagctcctgcctggcttcctactccctgccctgcgtcccgcggctcccccatattctaggtggtgggcctagtcccctctcagcccagctgcccagtgggaggggtcagggcggtctgggagatacggcccaggaggagagcctcgcctgctgaccggcctgtgcccgacagctcggccatcgacaagcggtcaggggagaaggtggccatcaagaagctgagccgaccctttcagtccgagatcttcgccaagcgcgcctaccgggagctgctgctgctgaagcacatgcagcatgagaacgtaggtggtggctgccccggggagggggtgggggctgccctggggagtcaggggcaggcgcaggcggggcctcccggtatggagagctcgggacagtctcctccctgctcccctgacggtgcctctcgcctcactattgaaaggagggggtgccgagaccttccctgcccactttccaggaagaggtcaaagggtatttttggcagaatgcactttgtgaggtacagactgtgttatcctacagaggaaattggcacaggggaactttgtaattggttccatgtctgagagcttgtggccagctgggactagaatcctagttagcgttgtgtccacgtgaccctgataacaatagcaatatacacatattgagcacttcctatgttctaagagctctgcatacactaacttgtctagtcctcatgatatatgagtactactgcccccatgtcacagacaggaaactaaagcacagcaaggctcacagattagatggttagtcagtagcagagctggggtttcaatctcggcagcgaggctcccggtctgagcacatgaccatcagattgtcttgtctgatagaagcagctgggaaaaccaggggcccagctcagggcctggcagccaggctttgctgcaggatacctagattggagggcagacatttcaaagaatgatttcaaaatgttatgtacattttaagcccatccttctccagcaaacccctcccctatggcctccagccagggtgatcttgcccttggctctgaaccagccctgtggcaggcaaggatggatgtggctggagacccaaggtcaggggcagggagtttgctggctgaaaagctccttctctgttccctcctttttcccttccaccctccccttatgctttcctgctgcctaggtgagttgagagtgggtttgtgttgcttgccctgacaccagacttgacagcaatgagcacacatcattctccccaccttcccttctccccagcctgactctctgtcatgatttattgcaaactccctccaaatccaggggattcctctaggcctctgccctttttactgcttccaagaaggttggagacatgcctcctgctggaggtggtgtattaggaaagggtggatggccctgtgcatggccagggcccaggaggaggtgggaggagaaggtagcgtctgtctagccctcacaggtgacttcttccccaggtcattgggctcctggatgtcttcaccccagcctcctccctgcgcaacttctatgacttgtgagttgggctgcactgggttctggggcatttgcaggccttacatgccgctggggagcaaggtgggggagggtctagggtttctattccgggtgtggcggggagagcctccttccctggcagtcctgtgcctttgcctgtcaagtgtgattctctctggaaagatgcttttagccaaaggcaggcaggaagaggcaggaaggactttgtggggtgcttgcctggcagggggcagtctgcacagctgctttgctttttacccagctttaacaccatgaagacacatctgccagtcctcacagggttagcaccaactcacctttcctggggacacagatgtgagtctggaccttggagctctttctagcatgaagcaaggattaagaagccttggctgcctctggctgatgggggtgtttgacagaatggcagaaaaccagaatatttagctgcaaaatgtatagctttgcctgtgcagtgtctgaatgagactggactatttggacaagatggagaagtcagtgtggcacgtggaggccagcagctggcttggtcaagctgaatctggactgaccctacaggcagcctcaagacctggggactttgagccgggaggtgatatgttcagatgggatttgggggatgcacactggcagcagcaagaaaggagtaggaagcagctcggaggcagagggggagagcctggaggtcagtgttagtgatctaaagtagggatctaaagcagaggtgatgggatgccaagagcagacttgaggccccatttgggaggcagggccgacacaatgttccatctgttggggtgcagtagctgagtgaggtggcagaggtggaggaatgggcaggttcctgcttgaaatacacggtagaggaagaacagatcttgggggaaagataacgaactccattttggacactttacttttaaagaaactgtgaacattccaatgtttaatcacagttgcaaataaatatgaacctcaggagacgaaggtctgggctagggatgtggatttgtgctggaataatcaccgatgggttatagctgacacccgggaacagataattgtagaatgtggtaagatagtattgattcagatatcaacatgaaagagaagatccaagaggatgagcagatggaagaagctgagagggcctgataggaggcagaggagagtcagcaaagaattgagagggagtttcagacttggtgaaaggttagatcagaagaaaagggagtcatggtgtgtttgtcgggtgttcactggtgaccttgagctgagcagtctggcagtaggagggaagcagaaaccaggttaactcaggactgggaggtaaggcagtgggatccaggagtgtggaccgccctttctagaagtttggtggtgagagagggagaaggggtggtcagttgaagaagcaaagtcaagggaatgtggttctagcacagagaggcttcaggaagcatgttgccaagatgaaagaaccagtgcccgagtggaggggaaagacacaggaggggactgggcatggagaggcccccaagggaggtgtgtggtccggcaggagagggctgccaaaatccagagtctcctggagatgcctccagcatgtcctttcaaaaacaacaacaacaacaacaacaaaaaacacaacctattacataattgtttaaggtaacattcattttaaaaaagttttaaatttattatattctagagatagggctgggttgcccagactggagtgcagtggcacaaacacagttcactgcagcctccaactcctaggctcaagccatcctcccgcctcagccccccaagtaggtgggactacagatgcatgccaccatgtccagctttttgttttgttttaatttttatagatatggggtctcactatgttactcatcctgatctcgaattcccggcctcaagtgatcctcccacctcagcctcttgagtagctaagactaaaggtgcatgccaccacacctggctaatttttttttttttttctgaaaggtggggtccaggccgggcatggtggctcacgcctgtaatcccagcactttgggaagccgaggcaggcagatcacctgaggtcaggagttcgagaccagcctggccaacatggcaaaaccccgtctctactaagaatacaaaaattagctgggcgttctggcgtgcacctgtagttgtagctactcagggaagctgaggcaggaaaatcgcttgaacctgggaggtggaggttgcagtgagccaagatcacgccactgcactctagcctgggcgacagagcaagactccatctcaaagaaaaaaagaaaggaagaaagaaagatgggtccctatgttgctcaggctggtcttaaactcttcgcctcaagcgatcgtccagcctccatctcccaaagcactgggattggaggtatgcccctggcctattttataatttttattattttttgtctttgtcctggtctttgcttttactgtaacagttacattttgctggccttatcctgttgtgcaatcccctaagaggctgcaggagcctccccatctccctcttccaccctcctggaaactgttgtattgtttccttcttggaaaggtagacatattgtttgtttgtggagccatctcagctgggcatgaccctctgagggatcaaatatttggacagaagccgaaggaaatactggcagatgtttctaactcctagctgtggctttccctggggtgtggaggagggcaaggagagagtacctttgaagagcgggaacacagttccatgtggctttcctgagcgcgctccaactgcagcgcttactccgagctctgccagctgggcggcccgccacagggagactgggagccaggagcccagaggcccgtgtggtgatctggctggctgaggtggagttgagtttttgcacactggagggtgtctctatgacccctgttctgccctgaggtccctcctctgagctctgacctggggctgggtgggacccggcactgttccaagaacccctcatgccttccagctacctggtgatgcccttcatgcagacggatctgcagaagatcatggggatggagttcagtgaggagaagatccagtacc

SEQ ID NO: 12817 - DNA, 499 bp, Homo sapiens
cttggtatccccaccttcctgggctcacctctgccccactcaggtgtttaagacgtgcagcagagaggcgccatcctgacctggtgccacatcctagcccctttccttactggatcctcaaaccagaagaaaacctgaatctctgaggacgtcaacaagacagcctgggagctgcccaagacctacgtgtccccgacgcacgtcggcagcggggcctatggctccgtgtgctcggccatcgacaagcggtcaggggagaaggtggccatcaagaagctgagccgaccctttcagtccgagatcttcgccaagcgcgcctaccgggagctgctgctgctgaagcacatgcagcatgagaacgtcattgggctcctggatgtcttcaccccagcctcctccctgcgcaacttctatgacttctacctggtgatgcccttcatgcagacggatctgcagaagatcatggggatggagttcagtgaggagaagatccagtacc

SEQ ID NO: 12818 - DNA, 5647 bp, Homo sapiens
ggctgagtgaggtctctgggggttgagttgggactgggcctggttctccaggactgtacacttgcaagaccccagagttcatcgggcagatcctcactgttacagacgagtacaccgaggccccaagagggggaggtggctcgccaagttgcagacagagtgagactcccgccctgccgtggatcccgtcgcaatgagacgttgctgcccctggcgctgtgcccctctctcagctcctgcctggcttcctactccctgccctgcgtcccgcggctcccccatattctaggtggtgggcctagtcccctctcagcccagctgcccagtgggaggggtcagggcggtctgggagatacggcccaggaggagagcctcgcctgctgaccggcctgtgcccgacagctcggccatcgacaagcggtcaggggagaaggtggccatcaagaagctgagccgaccctttcagtccgagatcttcgccaagcgcgcctaccgggagctgctgctgctgaagcacatgcagcatgagaacgtaggtggtggctgccccggggagggggtgggggctgccctggggagtcaggggcaggcgcaggcggggcctcccggtatggagagctcgggacagtctcctccctgctcccctgacggtgcctctcgcctcactattgaaaggagggggtgccgagaccttccctgcccactttccaggaagaggtcaaagggtatttttggcagaatgcactttgtgaggtacagactgtgttatcctacagaggaaattggcacaggggaactttgtaattggttccatgtctgagagcttgtggccagctgggactagaatcctagttagcgttgtgtccacgtgaccctgataacaatagcaatatacacatattgagcacttcctatgttctaagagctctgcatacactaacttgtctagtcctcatgatatatgagtactactgcccccatgtcacagacaggaaactaaagcacagcaaggctcacagattagatggttagtcagtagcagagctggggtttcaatctcggcagcgaggctcccggtctgagcacatgaccatcagattgtcttgtctgatagaagcagctgggaaaaccaggggcccagctcagggcctggcagccaggctttgctgcaggatacctagattggagggcagacatttcaaagaatgatttcaaaatgttatgtacattttaagcccatccttctccagcaaacccctcccctatggcctccagccagggtgatcttgcccttggctctgaaccagccctgtggcaggcaaggatggatgtggctggagacccaaggtcaggggcagggagtttgctggctgaaaagctccttctctgttccctcctttttcccttccaccctccccttatgctttcctgctgcctaggtgagttgagagtgggtttgtgttgcttgccctgacaccagacttgacagcaatgagcacacatcattctccccaccttcccttctccccagcctgactctctgtcatgatttattgcaaactccctccaaatccaggggattcctctaggcctctgccctttttactgcttccaagaaggttggagacatgcctcctgctggaggtggtgtattaggaaagggtggatggccctgtgcatggccagggcccaggaggaggtgggaggagaaggtagcgtctgtctagccctcacaggtgacttcttccccaggtcattgggctcctggatgtcttcaccccagcctcctccctgcgcaacttctatgacttgtgagttgggctgcactgggttctggggcatttgcaggccttacatgccgctggggagcaaggtgggggagggtctagggtttctattccgggtgtggcggggagagcctccttccctggcagtcctgtgcctttgcctgtcaagtgtgattctctctggaaagatgcttttagccaaaggcaggcaggaagaggcaggaaggactttgtggggtgcttgcctggcagggggcagtctgcacagctgctttgctttttacccagctttaacaccatgaagacacatctgccagtcctcacagggttagcaccaactcacctttcctggggacacagatgtgagtctggaccttggagctctttctagcatgaagcaaggattaagaagccttggctgcctctggctgatgggggtgtttgacagaatggcagaaaaccagaatatttagctgcaaaatgtatagctttgcctgtgcagtgtctgaatgagactggactatttggacaagatggagaagtcagtgtggcacgtggaggccagcagctggcttggtcaagctgaatctggactgaccctacaggcagcctcaagacctggggactttgagccgggaggtgatatgttcagatgggatttgggggatgcacactggcagcagcaagaaaggagtaggaagcagctcggaggcagagggggagagcctggaggtcagtgttagtgatctaaagtagggatctaaagcagaggtgatgggatgccaagagcagacttgaggccccatttgggaggcagggccgacacaatgttccatctgttggggtgcagtagctgagtgaggtggcagaggtggaggaatgggcaggttcctgcttgaaatacacggtagaggaagaacagatcttgggggaaagataacgaactccattttggacactttacttttaaagaaactgtgaacattccaatgtttaatcacagttgcaaataaatatgaacctcaggagacgaaggtctgggctagggatgtggatttgtgctggaataatcaccgatgggttatagctgacacccgggaacagataattgtagaatgtggtaagatagtattgattcagatatcaacatgaaagagaagatccaagaggatgagcagatggaagaagctgagagggcctgataggaggcagaggagagtcagcaaagaattgagagggagtttcagacttggtgaaaggttagatcagaagaaaagggagtcatggtgtgtttgtcgggtgttcactggtgaccttgagctgagcagtctggcagtaggagggaagcagaaaccaggttaactcaggactgggaggtaaggcagtgggatccaggagtgtggaccgccctttctagaagtttggtggtgagagagggagaaggggtggtcagttgaagaagcaaagtcaagggaatgtggttctagcacagagaggcttcaggaagcatgttgccaagatgaaagaaccagtgcccgagtggaggggaaagacacaggaggggactgggcatggagaggcccccaagggaggtgtgtggtccggcaggagagggctgccaaaatccagagtctcctggagatgcctccagcatgtcctttcaaaaacaacaacaacaacaacaacaaaaaacacaacctattacataattgtttaaggtaacattcattttaaaaaagttttaaatttattatattctagagatagggctgggttgcccagactggagtgcagtggcacaaacacagttcactgcagcctccaactcctaggctcaagccatcctcccgcctcagccccccaagtaggtgggactacagatgcatgccaccatgtccagctttttgttttgttttaatttttatagatatggggtctcactatgttactcatcctgatctcgaattcccggcctcaagtgatcctcccacctcagcctcttgagtagctaagactaaaggtgcatgccaccacacctggctaatttttttttttttttctgaaaggtggggtccaggccgggcatggtggctcacgcctgtaatcccagcactttgggaagccgaggcaggcagatcacctgaggtcaggagttcgagaccagcctggccaacatggcaaaaccccgtctctactaagaatacaaaaattagctgggcgttctggcgtgcacctgtagttgtagctactcagggaagctgaggcaggaaaatcgcttgaacctgggaggtggaggttgcagtgagccaagatcacgccactgcactctagcctgggcgacagagcaagactccatctcaaagaaaaaaagaaaggaagaaagaaagatgggtccctatgttgctcaggctggtcttaaactcttcgcctcaagcgatcgtccagcctccatctcccaaagcactgggattggaggtatgcccctggcctattttataatttttattattttttgtctttgtcctggtctttgcttttactgtaacagttacattttgctggccttatcctgttgtgcaatcccctaagaggctgcaggagcctccccatctccctcttccaccctcctggaaactgttgtattgtttccttcttggaaaggtagacatattgtttgtttgtggagccatctcagctgggcatgaccctctgagggatcaaatatttggacagaagccgaaggaaatactggcagatgtttctaactcctagctgtggctttccctggggtgtggaggagggcaaggagagagtacctttgaagagcgggaacacagttccatgtggctttcctgagcgcgctccaactgcagcgcttactccgagctctgccagctgggcggcccgccacagggagactgggagccaggagcccagaggcccgtgtggtgatctggctggctgaggtggagttgagtttttgcacactggagggtgtctctatgacccctgttctgccctgaggtccctcctctgagctctgacctggggctgggtgggacccggcactgttccaagaacccctcatgccttccagctacctggtgatgcccttcatgcagacggatctgcagaagatcatggggatggagttcagtgaggagaagatccagtacctggtgtatcagatgctcaaaggccttaaggtgggtggggacttggaggctggcagaggggacgccttgctgtctagacctgaggtttggggaggctggagggagcgcactgttacaggtcggccagcctgaagtgcctggtgtggaagctgggccatggactcacccttctctctctcccacatagtacatccactctgctggggtcgtgcacagggtgagtgctttctctgccatggtcctcagaggcccctgtcccatccctgggtatggggttctctggcaatcaaggagtgggaaagttggagggaggggacactgcccaggagcacagaatgtggagttttcacacccagccacggcccaggaaggcctgctcaaaagagtcactgtgtcccaggggacttcatggggaattgctgcagacaaagtgagccctgagctgagtgtttcaggcttcaagaatcaggaacattttagagctgggtgggccctgagagaacacctagtccaaccctcattttacacatgaagaaactgaggcccagaaggggaaggggcctggctgaggtcacacccctgggtggtggtggagctaggacaagctccatctctgcctcagcctagcatgcattctctgtcctccccccaggacctgaagccaggcaacctggctgtgaatga

SEQ ID NO: 12819 - DNA, 649 bp, Homo sapiens
ggctgagtgaggtctctgggggttgagttgggactgggcctggttctccaggactgtacacttgcaagaccccagagttcatcgggcagatcctcactgttacagacgagtacaccgaggccccaagagggggaggtggctcgccaagttgcagacagagtgagactcccgccctgccgtggatcccgtcgcaatgagacgttgctgcccctggcgctgtgcccctctctcagctcctgcctggcttcctactccctgccctgcgtcccgcggctcccccatattctagctcggccatcgacaagcggtcaggggagaaggtggccatcaagaagctgagccgaccctttcagtccgagatcttcgccaagcgcgcctaccgggagctgctgctgctgaagcacatgcagcatgagaacgtcattgggctcctggatgtcttcaccccagcctcctccctgcgcaacttctatgacttctacctggtgatgcccttcatgcagacggatctgcagaagatcatggggatggagttcagtgaggagaagatccagtacctggtgtatcagatgctcaaaggccttaagtacatccactctgctggggtcgtgcacagggacctgaagccaggcaacctggctgtgaatga

SEQ ID NO: 12820 - DNA, 11190 bp, Homo sapiens; identical to SEQ ID NO: 1215

SEQ ID NO: 12821 - DNA, 2057 bp, Homo sapiens
gcagtcgggcctcggtcgccacggtaacgcgcgcgggcaggtgtccgaccatgagcgtccgggtcgcacgggtagcgtgggtcaggggcttgggcgccagctaccgccgcggcgcctcgagcttcccggtgcctccgccgggcgcccagggtgtagcggagctgctgcgagatgcgaccggggcggaggaggaggcgccctgggcggcgacggagcggcgaatgccgggccagtgctccgtgctgctcttcccgggccagggcagccaggtggtgggcatgggccgcggtctgctcaactacccgcgcgtccgcgaactctacgccgccgcccgccgcgtgctgggctacgacctgctggaactgagcctgcacgggccgcaggagaccctggaccgcaccgtgcactgtcagcccgcgatcttcgtggcatcgctggccgctgtcgagaaactacatcacctgcagccctcggtgattgagaactgtgttgctgctgctggattcagtgtgggagagtttgcagccctagtgtttgccggagccatggaatttgctgaaggtttgtatgcagtgaaaatccgagctgaggccatgcaggaagcttcagaagctgtccccagtgggatgctgtctgtcctcggccagcctcagtccaagttcaacttcgcctgtttggaagcccgggaacactgcaagtctttaggcatagagaaccccgtatgtgaagtgtccaactacctctttccagattgcagggtgatttcaggacaccaagaggctctacggtttctccagaagaattcctctaagtttcatttcagacgcaccaggatgttgccggttagtggcgcattccacacccgcctcatggagccagccgtggagcccctgacgcaagctttaaaggcagtcgacattaagaagcctctggtttctgtctactccaacgtccacgcgcatagatacaggcatcccgggcacatccacaagctgctggcccagcagctggtctccccagtgaagtgggagcagacgatgcatgccatatacgaaaggaaaaagggcagggggttcccccaaactttcgaagtaggccctggcaggcagctgggagccatcctgaagagctgtaacatgcaggcctggaagtcctacagcgccgtggatgtgctgcagaccctcgaacatgtggacctggaccctcaggagcccccgagatgactgcagggggctcaaatgcgatgaccccctctgtcctcctgaggagaggctgtaggctgtgcctgtcgccccctaccttcctaatggctcctcctctgaggagtgaaagggatttgtttgcaacgtgctttgaaggccacataaaaagccctaaaaatgagtatttctttacatgacccagtccatttctcccccttggaaaaacgtttggacgttgggaagaatgatgccacagggctggtgtgtggggaagctagaatcctggccccgcctctgccagccctgcaccataggcaggtgtgccatctcagcgggaaggggaggactggctgctgcagcctgtcctgctctgtgagtgctgagaacatgctggtgtggcctcaatttcagccagtgccaggggagcccctccaccacccccagcctgccccccagggctcctttgtcacaaatctgaaaggttttagaacccagttggccttggcagttttgttcacctcctcacttgacagctgggagacagaggcccacatttatggacatacccaagagatatgtattgcctgctgtgtgctagagagtgagtgcgctctgttctggtagaaaggtccttgagtgaggtgcggggtgtggggagtgccaggtagggagggcgactgaggccctggtcctaggggtggaaccatggaggaacaccctggtcacccactgggactgcgggtctgcggggcgccagagggagcacagcacatacctgcctcggagctgacccctggctccatgccccgtcctcagagcagctcctgcgccaatattaagtatgagacattccaa

SEQ ID NO: 12822 - DNA, 10485 bp, Homo sapiens
gggcaggtgtccgaccatgagcgtccgggtcgcacgggtagcgtgggtcaggggcttgggcgccagctaccgccgcggcgcctcgagcttcccggtgcctccgccgggcgcccagggtgtagcggagctgctgcgagatgcgaccggggcggaggaggaggcgccctgggcggcgacggagcggcgaatgccgggccagtgctccgtgctgctcttcccgggccagggcagccaggtggtgggcatgggccgcggtctgctcaactacccgcgcgtccgcgaactctacgccgccgcccgccgcgtgctgggctacgacctgctggaactgagcctgcacgggccgcaggagaccctggaccgcaccgtgcactgtcagcccgcgatcttcgtggcatcgctggccgctgtcgagaaactacatcacctgcagccctcggtgaggcccgaggccccgtgacaggagggggaaggtgagctctgcctgagctcttggccctgccagaggcttccgcctgccattccgggggctcccacgtcttactcattcgatcgagtttttttttttgtttgtttttgtttttttttttgagacggagtctcgctctgtcgcccaggctagagtgcagtggcgcgatctcggctccgcctcccgagttcacgccattctcctgcctcagcctcccaagtagctgggactacaggcgcccgccaccatgcccggctaattttttgtatttttagtagagacggggtttcatcgtgttagtcaggatggtcttgatctcctgacctcgtgatctgcccgcctcggcctcccaaagtgctgggattacaggcatgagccaccgtgcccggcccgttttgttttgttttttgagacagagtcttgctctgtcacccaggctggagtgcaatggcgcagtcttggctcactgcaacctctgcctcccaggttcaagcagttctcctgcctcagcctccgcagtagctgggatcacaggtgcacaccaccacgcccggctaatttttttattctttacttaaatcctcccaggttcacccacctcggcctcccaaagtgctaggattacaggtatgagccactgcactggcctaaatgaaggaacattgagatgagttgagaatgtcacttcacttgaaggtggtggattgattgctattaatatttaataagacggtaaatgttaagctagcacttgagatcctttaccctatttcaccttcacaccaccttgtgaggttaatactgttatttgatggttgaggaatgcagactcagggatattaaaagaattagttaagtggtcctgttgaatcgtcatcataatattcattcactgcttaccctagtctgggtctgtgctaagcactgtatagacattatattcacataattctctcatccgccctttggggtaggccctgttcttccctcatttcacagatgagataaaaatgctcttggccgggcgaggtggctcacgcctataatgcctataatccagcacttcaggaggctgaggtgggtgcatcacgaggtcaggagttcaaaaccagcctggccaacatggtgaaaccccgtctctactaaaaatacaaaaattagccaagtgtggtggtggacacctgtaatcccagcaactcgggaggctgaggcaggagaattgcttgaacccgggaggcggacgttgcagtgagccgagatcacgccattgcactccagcctgggcaacaagagcaaaactccgcctcaaaaaaaaaaaagtcatgctcttaacttgtgcacaacgatatggcctgagagcctgctgcagggccatggcaagggaatccagagccctgggttggcgtcagtgtgaccatggacggagttgatggactgtaactaaccaggaaagctcctcctaaataaaggggcaggactcaatgattgtcaaggtcacttttgtgtgtcctcttccagctggtgcaccaagttcgtagaacctggctcactgagatgctgaacaccccgccagctctcaggtacagagccctggaactgggatccccaggagagtgagggctcacgttctgcatctgtccccacaggtgattgagaactgtgttgctgctgctggattcagtgtgggagagtttgcagccctagtgtttgccggagccatggaatttgctgaaggtacaggaaggagtttggttttatgcaaggctgtggtcttgggctcattaggggtaagggacactgccaaaaatgatactggacccactcaggtgatgggaagggagcacatggacaggggtgacattggcacatgaggacagggctttgctgtgattccttttcaagactgaaggattcattagggatttcccttatttttgtaatctcatgaaatctgcttgctgaactgtctaacccgctatcctgtgcactcatacctgcagcacctgcaacacgagagtatgtgttcagtagatattcgttgaattaaagagtaaataaatattggatctggagccatatcagttttacttcttaagatttttgctggccaggaaccatggcttacgtctgtaatcccagtgctttgggaggccaaggcaggaggaccacttgaggccaggagttccagaccatcttgggccacatagtgagaccttcatctctgcccccaacaaaaaacaaaaattacgttgggtgcagtgattcacacctgtaatgccagcactttgggaggcagaggcagatagatgtttgagcccaggagttttagaccaccctgggcaacatggtgaaaaccccatctctaccgaaaatacaaaaattagccaggcatgttggtgtgcgcctgtagtcccagctcgagtacttgggaggatgaggtgggaggattacctgaacccaggaggtcaaagctgcagtgagctgtgatcgtgccactgcattccagcctgggtgacagagtgacaccctgtcacacacacacacatacacaaaattagctgcacttagtggcatgcatctgtaattccagctactcaggaggctgagggaagatcacttgagcccctgagtctgaggctgcagtgagccacgattgtgccactgcactgcggcatgggtgacagagcaagaccctgtccaaaacaaacaaaaaagaatctagtatagaaacacgagaggttattgggactggagagggagaaatggagagtgcctacatagtggacatggagtgtttgaaactagagagagttggtggttgtacaacattatgaataccccaaataccactgaattatacacattaaagtggttaattatattttatgtgaatttcactgcagtgctttttttttaagcgttataacattattaaggaaagtttcataatttcacattttatgaaacaattttattacatgtatcattttatgtgtacataatgtgcagaattaggcttggtgtggtggctcacgcctgtaatcccagcccagcactttgggaggccaaggtgggtggatcacctaaggcaggagtttgagaccagcctgaccaacgtggtaaaaccccatctctactaaaaattcaaaaattatctgggtgtggtggcgtgcacctgtaatcttagctacttgggaggctgaggcacaagaatcacttgaaccaggaggcagaggttgcagtgagccgagattgtgccactgcactccagcttgggttagagaatgagactctgtgtcaaaaaaaaaaaaaaaagtgcagaattatagcatagttacacttttgtgttttctttttctttttcttttttgaggcagtatcttgctctgtcaccccagctgcagtgcagtggtgcagtcgtagctcactgcagcctcagcctcttggcctcaagtgatcctcccgcttcagtctccagactaactgggactacaggctcacaccatcatgcccagctaattttagaagtttttgtagagatggggtctcgctatgttgccagggctggtctggaactcctgactcaagtgatcctccagcttcagcctcctacagtgctgggattacttacaggcattagccactgtgcctggcctacttttttcccttgacattttacatagttttgaatgtctctgtgggaggatgtctgcgtgctctcctcccttttcttgtatgttttcttctacttcttgtcacaggctcttgttcatttgttttttaagagacagagttttcctctgtcttccagccttgagtgcagtgatgcaaccatagctcactgcagcctctaactcctgatctcaagcagtcctcctgccttagcctcctaagtacctgatgtcacaggctgtttatgtatttgtcctcctgttcttgtgtaagggagctaaaagtccagtacatagaagtgctaagtgaatgaagatatgtcaggatttgctccttagacctctctgttgacctgtgaaacactgtgcaggtcccttaatctcttctcagtctggtcatctcttctctctgcccaggaagcaggaccagggtgtcaggggtctggtagtttcaggccattcttatgtgtggctttgtagggatttttgagacagggtctcgctctgtcacccaggctggaatacagtggcatgaacacagctcactgtagcctcaacttcctgggctccagcaatcctcccacctcagcctcccaagtagctgggaccacaggcgcacactgccacgcccggctaatttttgtatttttggtagtgacagggttttaccatgttgtctagtctggtctcgaactcctgagctcaagtgatctgcctgccttggcctcccaaagtgccggaactacaggtgcgagccacagcgaccagccctcaggccactcttattatcattggcactgcctgccctctctccatgctcttgagccacactgaatcaggagtcataggttttcgttcatctgcattggctgtgtcaggttctccagctctaagtggggacagtaacacttgacttatgacaattatgtcactgaaattcatgtagtacagtagcccatgtctctgatggttcttttttgttgttcttgttttgagacagggtcttgctctgtcaccaggctggtgtgcagtggagcaatcatagcttactacagctgcagcctcaacctgctggtcacaagtgatccttccgtgtcagcctcccaagcatctgggactacaggcaggcaccaccatgcctggctaatttgtattttattttttgcagggacagggtctccctatgttgctcaggctggtgtcgagctccttgggctcaagccgtcctgcctcagcctcccaaagtgctgggattacaggcataagccaccatgcccggcctgatctctcttaataaactaactaataataattcccagctttcacaacagcccaggcagattagatattattatcctcattttactaactaaaaatttgaacctcaaggaggttgtgacttggctaaggcaatgtggcttccaccctgttcctctttaccttttaccagggtttctcaatagtggcactatttaaaaaaaaaaaaaaacagtggcgctattgggccaggtcatttgttttgttgggggcaaggggggctgacctgtgcagtgcagcatgttgagcagcatccctggactctacccactagacgtcagtggcactctcccctagtcagaacaaccggaaaacgtctccggacactgcccccggcctgttgagcaccactgtcctactccaaaccagctttatagcaggaagctccttgggttagtttgtatagtgccaagcacagcagcatacttttggtggtgagcgcttgtgcagtcgatggaggtgtgtggaactgtggccctgctggctggtggcagacaccagtgcccctgtctctagtgcagagtggagcttgggctttgtttctcaggcctggccttttctccttcattctgtgccctcatttttccaaatgcgcttctctctggccaggtttgtatgcagtgaaaatccgagctgaggccatgcaggaagcttcagaagctgtccccagtgggatgctgtctgtcctcggccagcctcagtccaagttcaacttcgcctgtttggaagcccgggaacactgcaagtctttaggcatagagaaccccgtatgtgaagtgtccaactacctctttccagattgcagggtgatttcaggacaccaagaggtgggtgttgatgggaactgccttcataggccagtccagtacggagggttggaactgctccacacccgtgaggcctagcagtctggcgggtgctgggtccagcccggtctttaggaagtattttggggccagggcagtgaggtagaccgagtgctgcaaagcaggcaggagcaagaatgctgccctgctccaccacgtgtagaatggggtctggaaccaaccagccagcccatgtctaaagtaaaggggcagggccagctgatctccagggcccttcccgtagtacattctgggcttctgaggagcctgtgatctggttgcttccttagagaaaagagatttgttttctgctagattgctctgcctgccctgctttttttaggtgtctgtttttgccctggagttcatttcctttccaccgtatttccttccatttgctacttccccaaacatttatcaagggctggggacgcacagactgattagccagggttcctgccgtcaaaggaagagccccgtgaatggatgactccaggccgaggggtgcagtgagggtctggctggctactcatgggcctaagagcaacccaggaggcagcagctggaggacgggcatgtgtttgccagcagggggcaccctgagcagagcggcaggagccccctacagaaagagcagtgggtgctgagtgcctggctcagggaatgctgagtgagcgcagattgcagcccgtgtgaggggctgctgcccgggccaggcatttctgtcttacttcatgtccctcacagcccatcctgtgctatatggaaggaagggattctttttttgtttgtttgtttgagacagggtctcactgtgttgcctaggctggagtatggtggcaccatcacggctcactgcagcctggacctcctgggctcaagtgttcctcctaccttagcctcctgagtggcttggattacagacacgggcaaccacacctggctaacttttgtatttttttgtagagacggggtttcaccgtgttgcccaagctggtcttgaactactgggctcaagggatccccccacctcagcctcccaagtagctgggactacagacacaggccaccacacccagctaaaggaagggattcttaatcacattttccacacaaggatgctgaggcagagagaggcaagtgcttggggatagtagaggcagaatgggaacctgagtctgtctcactctggagtctgtttccgccacttgaccgtgcttggctccccttcccctttgagggctcaccgtgtgccaggcgtcctcaactgcctcctctgaagtagtgagagctggcaggagcctcttatgactgttctgagatggtgggcaggtcaggtatggtggccccaggtcagtcttggagctagttaggcgttccctttaccagccttggaaggaagcccagaagtggctcaggaaggacttcccagtcagggcaggagtctccccagtaggctcccagacaggtgcacccagtctaggtgacaactcctaggttcatccttttgattttttttttttttttttttgttttttgagacaatgtcttactctgtcatccaggctggagtgcagtggcacgatcttggctcactgcaacctccacctcctgggttcaagtgattctcctgccttagcctcccaagtagctgggactacaggtgcatgccaccacacccagctaattttttgtatttttattagagacggggttttaccatgttggtcaggctggtcttgaacccctgacctcaggtgatctgcccacctcggcctcccaaagtgctgggattataggtgtgagccactgtgcccagcttccctttggtattcttggtagtgccacagcaaagagctcaggtgagggcaggggtaccccctcaggggggaagcccctttccaacaactgatgtgaaaaggctcctgggccctgctcgcccaatgcctgggccaaggactggccattggagaggagactgctggcccctgtgatggtgaccttgagccctgtggccctagcctgggacttgagagggctcagctgttgagccagagtccagagatcttacacggaaagcactttgagaccacagatgctccaggaagtgctactgagtagccatccccatacctgccagtcactcagacaatctaggtgtggagggaggggcttgggctccagagtctggaaggcccagaccaaagaggctcctggttcctgcggtccagcctcagtgggatggagccacatggagggtgatggtggaggggaagcacgggtgagtcagtacaggccaggttttgttgcagtgacaagtagcccacacctcagtggtcacagcacacaagcaccggtcccactcctggtctgtgctcgccaggctgggttctgcttttcagcccaggactcaggcaacaggaacagtctctagggaacactgacagactaaagcaggtggatgacttgaggccaggagttcaagaccagcctgaccaacatggtgaaaccccatctctactaaaacttagccaggcgtggtggtacatgcttatagtcccagctactcgggaggctgaggcaggagcattgcttgaacctgcgaggtggaggttgcagtgagccaagatcgcacctttgcactccagcctgggtgacagaacaagacttcatctcaaaaaataataaagacctttgcaagttctgttgcttgctcactgttgcaagggttttggagctattggctcgcccgaggccccttctgagctcaaatgccttcaggggaggtttttggcatcaagaggagagctctttccttctccagagaaacctcagatgaaagtgacaatatcctagaccctgcattgtgaaatggggcttgaattttagttctgaatttttattttgaagattatggaataaaaagcaaacagactggtcaaaaattatgaaaggagtgatagaattctcattgagatccgggtgcggcggctcatgcctgtaatcccagcactttgggaggccgaagagggtggatcacgaggtctggagatcagctaatacaaaaaattagccgggcgtggtggcgggcgcctgtagtcccagctacttgggaggctgaggcaggagaatggtgtgaacctgggaggcggagcttgcagtgagccaagattgtgccactgcactccagcctgggccacagagcgagacaccgtctcaaaaaaaaaaaaaaaagaattctcattgagaactaacacttcttagatagtgcgttttcctctaccagacactgttgcatgccttgtagggtttgctcttcctggcagcgttgtgaagtagatggaactgtgcttatttgaaggctgggacagaagagattccaggatgttaagtgaattgcctggggatggtgctgggacagacaggtcacatgtccacatctagcagctgtgggtctctttgtggtcaccctcccagtttggccctgtgaatggtcagatctgtaaaggcggatttctgggacattgctcggctgaaacctccttccttccccaggctctacggtttctccagaagaattcctctaagtttcatttcagacgcaccaggatgttgccggttagtggcgcattccacacccgcctcatggagccagccgtggagcccctgacgcaagctttaaaggcagtcgacattaagaagcctctggtttctgtctactccaacgtccacgcgcatagatacaggcatcccgggcacatccacaagctgctggcccagcagctggtctccccagtgaagtgggagcagacgatgcatgccatatacgaaaggaaaaagggcagggggttcccccaaactttcgaagtaggccctggcaggcagctgggagccatcctgaagagctgtaacatgcaggcctggaagtcctacagcgccgtggatgtgctgcagaccctcgaacatgtggacctggaccctcaggagcccccgagatgactgcagggggctcaaatgcgatgaccccctctgtcctcctgaggagaggctgtaggctgtgcctgtcgccccctaccttcctaatggctcctcctctgaggagtgaaagggatttgtttgcaacgtgctttgaaggccacataaaaagccctaaaaatgagta

SEQ ID NO: 12823 - DNA, 1134 bp, Homo sapiens
gggcaggtgtccgaccatgagcgtccgggtcgcacgggtagcgtgggtcaggggcttgggcgccagctaccgccgcggcgcctcgagcttcccggtgcctccgccgggcgcccagggtgtagcggagctgctgcgagatgcgaccggggcggaggaggaggcgccctgggcggcgacggagcggcgaatgccgggccagtgctccgtgctgctcttcccgggccagggcagccaggtggtgggcatgggccgcggtctgctcaactacccgcgcgtccgcgaactctacgccgccgcccgccgcgtgctgggctacgacctgctggaactgagcctgcacgggccgcaggagaccctggaccgcaccgtgcactgtcagcccgcgatcttcgtggcatcgctggccgctgtcgagaaactacatcacctgcagccctcggtgattgagaactgtgttgctgctgctggattcagtgtgggagagtttgcagccctagtgtttgccggagccatggaatttgctgaaggctctacggtttctccagaagaattcctctaagtttcatttcagacgcaccaggatgttgccggttagtggcgcattccacacccgcctcatggagccagccgtggagcccctgacgcaagctttaaaggcagtcgacattaagaagcctctggtttctgtctactccaacgtccacgcgcatagatacaggcatcccgggcacatccacaagctgctggcccagcagctggtctccccagtgaagtgggagcagacgatgcatgccatatacgaaaggaaaaagggcagggggttcccccaaactttcgaagtaggccctggcaggcagctgggagccatcctgaagagctgtaacatgcaggcctggaagtcctacagcgccgtggatgtgctgcagaccctcgaacatgtggacctggaccctcaggagcccccgagatgactgcagggggctcaaatgcgatgaccccctctgtcctcctgaggagaggctgtaggctgtgcctgtcgccccctaccttcctaatggctcctcctctgaggagtgaaagggatttgtttgcaacgtgctttgaaggccacataaaaagccctaaaaatgagta

SEQ ID NO: 12824 - DNA, 2225 bp, Homo sapiens
gagcttcccggtgcctccgccgggcgcccagggtgtagcggagctgctgcgagatgcgaccggggcggaggaggaggcgccctgggcggcgacggagcggcgaatgccgggccagtgctccgtgctgctcttcccgggccagggcagccaggtggtgggcatgggccgcggtctgctcaactacccgcgcgtccgcgaactctacgccgccgcccgccgcgtgctgggctacgacctgctggaactgagcctgcacgggccgcaggagaccctggaccgcaccgtgcactgtcagcccgcgatcttcgtggcatcgctggccgctgtcgagaaactacatcacctgcagccctcggtgaggcccgaggccccgtgacaggagggggaaggtgagctctgcctgagctcttggccctgccagaggcttccgcctgccattccgggggctcccacgtcttactcattcgatcgagtttttttttttgtttgtttttgtttttttttttgagacggagtctcgctctgtcgcccaggctagagtgcagtggcgcgatctcggctccgcctcccgagttcacgccattctcctgcctcagcctcccaagtagctgggactacaggcgcccgccaccatgcccggctaattttttgtatttttagtagagacggggtttcatcgtgttagtcaggatggtcttgatctcctgacctcgtgatctgcccgcctcggcctcccaaagtgctgggattacaggcatgagccaccgtgcccggcccgttttgttttgttttttgagacagagtcttgctctgtcacccaggctggagtgcaatggcgcagtcttggctcactgcaacctctgcctcccaggttcaagcagttctcctgcctcagcctccgcagtagctgggatcacaggtgcacaccaccacgcccggctaatttttttattctttacttaaatcctcccaggttcacccacctcggcctcccaaagtgctaggattacaggtatgagccactgcactggcctaaatgaaggaacattgagatgagttgagaatgtcacttcacttgaaggtggtggattgattgctattaatatttaataagacggtaaatgttaagctagcacttgagatcctttaccctatttcaccttcacaccaccttgtgaggttaatactgttatttgatggttgaggaatgcagactcagggatattaaaagaattagttaagtggtcctgttgaatcgtcatcataatattcattcactgcttaccctagtctgggtctgtgctaagcactgtatagacattatattcacataattctctcatccgccctttggggtaggccctgttcttccctcatttcacagatgagataaaaatgctcttggccgggcgaggtggctcacgcctataatgcctataatccagcacttcaggaggctgaggtgggtgcatcacgaggtcaggagttcaaaaccagcctggccaacatggtgaaaccccgtctctactaaaaatacaaaaattagccaagtgtggtggtggacacctgtaatcccagcaactcgggaggctgaggcaggagaattgcttgaacccgggaggcggacgttgcagtgagccgagatcacgccattgcactccagcctgggcaacaagagcaaaactccgcctcaaaaaaaaaaaagtcatgctcttaacttgtgcacaacgatatggcctgagagcctgctgcagggccatggcaagggaatccagagccctgggttggcgtcagtgtgaccatggacggagttgatggactgtaactaaccaggaaagctcctcctaaataaaggggcaggactcaatgattgtcaaggtcacttttgtgtgtcctcttccagctggtgcaccaagttcgtagaacctggctcactgagatgctgaacaccccgccagctctcaggtacagagccctggaactgggatccccaggagagtgagggctcacgttctgcatctgtccccacaggtgattgagaactgtgttgctgctgctggattcagtgtgggagagtttgcagccctagtgtttgccggagccatggaatttgctgaaggtacaggaaggagtttggttttatgcaaggctgtggtcttgggctcattaggggtaagggacactgccaaaaatgatactggacccactcaggtgatgggaaggga

SEQ ID NO: 12825 - DNA, 549 bp, Homo sapiens
gagcttcccggtgcctccgccgggcgcccagggtgtagcggagctgctgcgagatgcgaccggggcggaggaggaggcgccctgggcggcgacggagcggcgaatgccgggccagtgctccgtgctgctcttcccgggccagggcagccaggtggtgggcatgggccgcggtctgctcaactacccgcgcgtccgcgaactctacgccgccgcccgccgcgtgctgggctacgacctgctggaactgagcctgcacgggccgcaggagaccctggaccgcaccgtgcactgtcagcccgcgatcttcgtggcatcgctggccgctgtcgagaaactacatcacctgcagccctcggtgattgagaactgtgttgctgctgctggattcagtgtgggagagtttgcagccctagtgtttgccggagccatggaatttgctgaaggtacaggaaggagtttggttttatgcaaggctgtggtcttgggctcattaggggtaagggacactgccaaaaatgatactggacccactcaggtgatgggaaggga

SEQ ID NO: 12826 - DNA, 2135 bp, Homo sapiens
ctggccgctgtcgagaaactacatcacctgcagccctcggtgaggcccgaggccccgtgacaggagggggaaggtgagctctgcctgagctcttggccctgccagaggcttccgcctgccattccgggggctcccacgtcttactcattcgatcgagtttttttttttgtttgtttttgtttttttttttgagacggagtctcgctctgtcgcccaggctagagtgcagtggcgcgatctcggctccgcctcccgagttcacgccattctcctgcctcagcctcccaagtagctgggactacaggcgcccgccaccatgcccggctaattttttgtatttttagtagagacggggtttcatcgtgttagtcaggatggtcttgatctcctgacctcgtgatctgcccgcctcggcctcccaaagtgctgggattacaggcatgagccaccgtgcccggcccgttttgttttgttttttgagacagagtcttgctctgtcacccaggctggagtgcaatggcgcagtcttggctcactgcaacctctgcctcccaggttcaagcagttctcctgcctcagcctccgcagtagctgggatcacaggtgcacaccaccacgcccggctaatttttttattctttacttaaatcctcccaggttcacccacctcggcctcccaaagtgctaggattacaggtatgagccactgcactggcctaaatgaaggaacattgagatgagttgagaatgtcacttcacttgaaggtggtggattgattgctattaatatttaataagacggtaaatgttaagctagcacttgagatcctttaccctatttcaccttcacaccaccttgtgaggttaatactgttatttgatggttgaggaatgcagactcagggatattaaaagaattagttaagtggtcctgttgaatcgtcatcataatattcattcactgcttaccctagtctgggtctgtgctaagcactgtatagacattatattcacataattctctcatccgccctttggggtaggccctgttcttccctcatttcacagatgagataaaaatgctcttggccgggcgaggtggctcacgcctataatgcctataatccagcacttcaggaggctgaggtgggtgcatcacgaggtcaggagttcaaaaccagcctggccaacatggtgaaaccccgtctctactaaaaatacaaaaattagccaagtgtggtggtggacacctgtaatcccagcaactcgggaggctgaggcaggagaattgcttgaacccgggaggcggacgttgcagtgagccgagatcacgccattgcactccagcctgggcaacaagagcaaaactccgcctcaaaaaaaaaaaagtcatgctcttaacttgtgcacaacgatatggcctgagagcctgctgcagggccatggcaagggaatccagagccctgggttggcgtcagtgtgaccatggacggagttgatggactgtaactaaccaggaaagctcctcctaaataaaggggcaggactcaatgattgtcaaggtcacttttgtgtgtcctcttccagctggtgcaccaagttcgtagaacctggctcactgagatgctgaacaccccgccagctctcaggtacagagccctggaactgggatccccaggagagtgagggctcacgttctgcatctgtccccacaggtgattgagaactgtgttgctgctgctggattcagtgtgggagagtttgcagccctagtgtttgccggagccatggaatttgctgaaggtacaggaaggagtttggttttatgcaaggctgtggtcttgggctcattaggggtaagggacactgccaaaaatgatactggacccactcaggtgatgggaagggagcacatggacaggggtgacattggcacatgaggacagggctttgctgtgattccttttcaagactgaaggattcattagggatttcccttatttttgtaatctcatgaaatctgcttgctgaactgtctaacccgctatcctgtgcactcatacctgcagcacctgcaacacgagagtatgtgttcagtagatattcgttgaattaaagagtaaataaatattgga

SEQ ID NO: 12827 - DNA, 459 bp, Homo sapiens
ctggccgctgtcgagaaactacatcacctgcagccctcggtgattgagaactgtgttgctgctgctggattcagtgtgggagagtttgcagccctagtgtttgccggagccatggaatttgctgaaggtacaggaaggagtttggttttatgcaaggctgtggtcttgggctcattaggggtaagggacactgccaaaaatgatactggacccactcaggtgatgggaagggagcacatggacaggggtgacattggcacatgaggacagggctttgctgtgattccttttcaagactgaaggattcattagggatttcccttatttttgtaatctcatgaaatctgcttgctgaactgtctaacccgctatcctgtgcactcatacctgcagcacctgcaacacgagagtatgtgttcagtagatattcgttgaattaaagagtaaataaatattgga

SEQ ID NO: 12828 - DNA, 20543 bp, Homo sapiens
gctttccaaaatggcgcgggtgctgaaggctgcagccgcgaatgccgtaggtgaataccgggcaccggcgaccttcgccatgggacagggagcgtgggaacggcggtcgggggcggaggaggcctcggcgtggccaaagcaccttgatctaatgtcctcccccgggggcgcgttccacagcagctgctgtcacttaggcagagggtgccttccagaagcgccaccgcttagtagcggggattgccttgtgcatgagtcccatttccatccgagagctgtgcgccttgggctctgcaccttccagtatgtgggcgggagagtcgagggaacttgcccggcaggtcaggcagggcagggacagaagtaaatagaagcggatcggtaagttattttaccgcgcaccaataaagagactggggagaaaccagaaaggagagcacgttccgtaaaaacaacaactactagtcggccgaactccaagcgtgaccagctttctgttgggaacactcaaaggtcagtggtgtaaagaatacaaaaggagtggtttttccacgtgcactaatatatttatcgcgtacacagataaaagcatgtggatttggaaactttcttgagttctctcccccttcattttttttaaaatatgtacatagaatcagttatgacagaaataactgtaataattgtcacgttttctgactcactttctcctctttttatcctttttttttttctcttcctccttttatgagagggcaagtatttcccttaatctgagattccctattaggaagaaggtgccaagtggtaatgccccagagttactccgggacattcgtgataaatccttctagcaccagagcccacattcttaaccgtaaggcataccttcctcttaggtgatacacaagataggaacgtaaaactataaataaatgaatatttgggaaaaggcatttttatgtctatttttagaactgcacactttaatgattgacagtttgggaaaaagtatgacttccaacaggtcatatacatactgcaagaactcaatacagataaaggtgcatgtttgttttgtacttacatacacatcttggcataaaggaaaaatgaagacagtgtattccaaagattgcctttgatttgtcctattaagatacttgaagcttaatgtctccacttgtgtgtgtgtgtgtgtggttgaatatacataaagtaaaatttacctttttttttttttttgagacagagtctcactctgtcgcccaggctggagtgcagtggcgttagctcactgcaacctctgcctcccaggttcaagccattcttccgcctcagcctcccgagtagctgggattacaggcacccggcaccacgcccggctaattttttgcatttttagtggagacgagatttcaccatgttggccaggctggtttggaactcctggcctcaggtgatctgcccacctcgtcttcccaaagtgctgggattacaggcgtgagcccgtctctactaaaaatacaaaaattagccgggcgtggtagcacacgcctgttatcccgggtactcgggaggctgaggcaggataatcgcttgaacccgggaggcggaggttggcgtgagccaagatcgcgccactgcactccagcctgggcaaccaaagcgaaactccgtctcagaaaaaaaaaaaaaattgctttttaagactgaataatattccattgtgtgtgtataccacattttgtttatccattcgtctcttgatagacatttgggttatccccaccttttggctattgtaatacagctatgaacgtgggtgtacaaatacttctgaattcccgcttctttgggggtgtgtatactcataagtggaattgctggattacatggtaattctatgttatggcccctcttttaaggaacataaaacttcgccgaaaaacaaaagcacagaaaaatcagagtgaacacgtagaaaagttctgaaaatggaaattgaacctgttaggtgggagacaagaatgaccaacttacatgactgcataggtttactttcattaatcgtctgtaaatgggctaacagaaatgtaatctgtttacttactgtaatgaataaaaaaaattgatcatagtttgaaacaagttgaagatatatatatggtgctgtgaaattaactggtcaaatgtttaagagaaaacttaccagactaacttgaaagcacttctaatgaatgactttctaaatacgtatgtttcctcaaaccagatattcagtgaaaattcagacttatgttcggccaggcgcggtgactcacgcctgtaatcccagcactttgggaggctgaggaaggtggatcacctgaggtcaggagttcaagaccagcctggccaacatggcaaaacccatctctactaaaaatacaaaaattaaccgggcgtggtggcgcgctcctgtaatcccggctactccggaggctgaggcaggagaattgcttgaacctgggaagcagaggttgcactgagccaagattgcgccattgcactccagcctgggctacagagccagactcgtttcaaaaaaacaaacaaacttattacgtgttctaaaattagattatgtgaaggtcgcacaactttgcaaagatgcaaagaaatgaattgtacacttcaaatgggtgaactttatggtatataaattttaagtctgtttaaaaactattaagagataaagctgttaaaaaacctattacaagtgattattcacttttatagtactttttatacaaatttaacatctaatgtctttaaatagtaagtactcttaatgcatttgagtatagatccttgcagctaaacctttatgtattcagggacagtgtctaaaaagtgtgatctgaaataaatgcaaaatctgaactgaaagaaatgcaatgttgtttttaagtcaggacactaaaagtgattaacgagaattgatattgaaaggaagattggaatgagagttaacatacacatccgattttgatcttttacttgtataccagcttcctgacatgtgaaaatagtttctttaatctgtattcatctttacatgcgttttttattaacacttctgtttttaaatatcttatgcatttatttgcacatggttttacactgtagtatattcatgcaaagcaacctttattggaataatcacaaattaaacattgcagaattcaaaataatgcaattctgctgcactattctgaaatgggaggcagagaaatctaaaactaaagagctgtgaattcctgctagttggagggcaacctgaaataaaaatagctttaaaaaggtagcttcagtgttggtaatcattttcataatttatgcatttattaaaacatcacattgtataccttaaagatacaccgtttctattagtcatcatacctcaagctggaaaaaagtttctacaagtcaaaggagaaatataataattaagagttcaattcacaacaaacttttcaggaacacatttttattaaatataaagctctgtctctttttaactcctttattcagtgttctctacccagtttgcttggtctacacaatttcacctttggatttttattgttggatcttttttttttttttttttttttttggtaaaatgtacataacaaaaccctttaaaaatgtacagtttaggctgggcacagtagctcatgcctgtgatcccggcactttgggaggccgaggtgggcggatcacgaggtcaggagttcgagaccagcctggccaacatggtgaaaccctgtctctactaaaaatacaaaaattagccgggtgcggtggcatgcgcctgtaataccaattattcaggagactgaggcaggagaatcgcttgaacccggaaggtggaggttgcagtgagccgagatcacactattgcactccagcctgggtgaaagagcaagagttcgtctcaaaataaataaataataaagtacagtttaacagtaattattacattcactgggttagtgcaactatcacatttgtctatttcaaaacattttcactggcctagtgctgtgactcacatctgtagtcccagcactttgggaagccaaggtcggaggatcgcttgagcccaggagcaacatgggcagcctgggcaacatggtgaaaccccatctctacaaaacgtacaaaaattagccaggcatggtggctcatgcctatggttccagctactcaggaggctgaggtggaaggtattctttttttgcaatttagtttcaattgtacatttatgtatatgtgtactcggttgtaatccacttggatttcatgataacaatgaaacttactaagtttctaacttggtttgttgtgaatattagatagttggtgtaaaaaaataaatacagtgccagacagtaggtgcacagtaaattcaggccattcttgttgttaatgacatgcaatgactgtttgctaaatgaatggaatgcagagttatctgtggagatcaagaaactatctgatgaggacacagcgacagtgaattttaaaaatgctaaaaactgactggaatggtggcttacacctataatcccagcactttgggagaccgaggtgggtggatcacctgaggtcaggagtttgagaccagcctgaccaacatggtgaaaccccatctctactaaaaatgcaaaaattagggtgggcacagtggctcacatctctaatcctatcactttgggaggccgaggtgggtggatcacctgaggtcaggagttcgagaccagcctggccaatgaggcgaaaccccatctctactaaaaatacaacattagccgggcatgtggcaggtgcctgtaattccagctactcgggaggctgaggcaggagaatcgcttgaacctggggggcggaggttgcagtgagcccagatcgcgccacttcactccattctgggcgaaatagtgagactccgtctcaaaaaaaaaaaaaaatatatatatatatatatatatatttatatatatacacacacatacacacacacacaaattagctgggtatggtgacaggcacctgtaatcccagctacttgggaggctgaggccagtgaatcacttgaacccaggaggcagaggttgcagtgagctgagatcgcactgttgcactccagcactccggcctgggcaacagagcattaaagagtactgtatgtactcttttaatgtatatttatacctttaatgaacttattacaaaatataagacaaaaaattgggtacaggtagagaaattgcttgctcttattaaatatatgttgtttcattgtgaaatgcagagaatagcaagtaatgcttaatatgccactatttaagtgttaccagtaaatatgaattgttatgaaaaaatgttatcctgtgttttaaatctaactgcagctcagaattagcttttttattccagtcagttatttgaatgggcagagcagagtaattctgatgtaagtttttccatttatctcctggtttcatttcaataattaaaaagaacagatatataaataatgaatttttgcatgcattatttgtttagtttttaaaattcaatttagaagtgcgttaattctcaaaagaaggatatcaatggctgttcaatttttcagggcttttttccagacttcaagctcccattccaacagtaagagcttcttccacatcacagcccttggatcaagtgacaggttctgtgtggaacctgggtcgactcaaccatgtagccatagcagtgccagatttggaaaaggctgcagcattttataagaatattctgggggcccaggtaagtgaagcggtccctcttcctgaacatggagtatctgttgtttttgtcaacctgggaaataccaagatggaactgcttcatccattgggacgtgacagtccaattgcaggttttctgcagaaaaacaaggctggaggaatgcatcacatctgcatcgaggtattttaattattttaatgcctggtattttaaatctctcttttaaaaaatgtcttctactttttaagtctatttatggtcactgtcattagaaacttttgtaaagttctttaaggagaatgataatattcatcctcctcaaaggtggatccttacatacatttcttttccctttagaaaattctaacatataatattaatgtatttttttgaagtctggattcagtgaccactgtaagtgccaccaaagttagccacaatgtagagtctgctttagaattgatcatgtttgacctcccatgtaacaggaatacagctgttttcactgtcataaggcaattaggagaaacaaatgaaaagactttaaagctttcagtgtacatgctaagtattctttataactcttttctctctttaaaatgctaataacttcttcgttattacaaagtcaatacattttcaattactgtaatttttaagatcttctgaattgcacctgccaacaatttttaaaggaatgtgaagaaatgttagacaagaaaagtccattagagaacatttctatagatgttcatgttcagataactgccttttagaatatcagcaatgacaattatgcatcgatttaatttgctaggacaattctttttatagaaagaatgacataattgttaagccaaatttctttttcttttctttttttttttttttttgagacggagtcttactctgtcgcccaggctgaagtgcagtgtggcgtgatctcggctcactgcaacctctgcctcctgggttcaagtgattctcctgcctcagcctaccaggtagctgggattacaggcatgcgccaccatgcccggctaattgtgtatttttagtagagatgaggtttcaccatgttggtcaggctggtctcaaactcctgacctcaggtgattcacctacgtcagcctctcaaagtgctgggattataggcgtgagccaccttgcctggcctgttaggccaaatttctaatacagaggagaggtcatttgattctagagtgaattcaaggatgtattcagttcattattgcaaacatgtatgagaccctataatgtgtattctgccaagtacttgggatttagcagtgaataagacatgagtcatgtccatagtgaggagggtcagaaatttaaacacccaagtgcaatatactatgataagtagaattgatatatgtgactttgcagtagcacagatgaaggagattgattgctcctggcagattgagttgctgggaaggcctcacagagcataagttacaatgaatgtgaaggaattccctaggtgaacaaaaggagaaagttatttcaggcagagggaattgcatgtggaaaggcatagagttatcataacagctaacacttagtggctgggtgtggtggcttatgcctcgacatggcttggctgtgtccccacccaaatctcatcttgaattcccacatgttgtgggagggaccagtgggaggtaattgaatcatgggggcaggtctttccgtgctgttcttgtgatagtgaataagtttcacaagatctgacagttttataagggggattttccctgcccaatctgtctctctttgcctgctgccatccatgtaagatgtgacttgctcctccttgccttctgccatgagtgtgaggcctccccagccacgtggaactgtaaatcattaaacctgtttcttttgtaaattgcccagtctcgggtatgtctttatcaatagcgtgaaaatggactaatacacacctgtaatcttagcactttgggaggccaaggtgggcagattgctcgagcccaggagtttgagaccagcctgggccaaatggcaaaaccgtgtctctactaaaaatacaaaaagctagtcaggtgtggtggtatgcacctgtagtcccagctacttgggaggctgatgtgggagcatcacttgagcccaggaagtgctgaggtggaggttgtagtgagccgtgatcacaccactgcactctagcctgaatgaaagagcgagaccctgtctcaaaaaaaagaactaacatttagtgagtcctctagtagtatgtctacaaagtaactcaacacatactattttcttgaattttcatagctaccctgtgagggccctattatccccatttgacaggaaaggaaactgagacagagtagttaatttgcccatggtcatatcaatagcaggtatggggctgaatcccagattggttctgattccagggtctgcactcttacccatgatgccagttgccttcattatattaactgagttttaaatttgcggtggggaagctataagaccttaagcagggaactaaacaagtcctaatattagcctttattttatttttagggagttacttttggctgcaggtctttgtcagtggacctgagtgtttgtctaagccctaccccaccccccaggatgagaagcaggacctttgaatccactcccccctctcccacactgcactatcagtattccatcaagagagcccatgctttcaaaggagttcagctatgtgatttagttcagttaagtaaggaatagtggaagttcagtaatggcagattcaaaagcagagattataagggggacatgcaaatgtattggatataaaatgaaggtaggtaagaggagaaggtgtgaacagtggttagttaggtgctattttagtataatacccccatcatcattctctgccctccacaaaaaaattaagtggcttaacaagattttatttttctgttttcagtctaatattagctatcccaggctgatgggcagctctgctgtccatgacacatgacttacaaggttgctccaggcatcaccatttgccagccagagggaagggaagggaaggtggagtgggaatacctggcaagtggctttaaggagatgctctaggatcacttctgtccttatcccattggcccaagcttagttacatgacacacttctctgcaagggaggctggggaatgtagtctctagctaggcagttatgtgccctgctgaagcttgggggttgctgtaattaaaaggaggaaaaggagaaaggtactggaggccatcaatggatgccacgcttggtgatttttaaaaagtggtgtgtcacctgggcatggtggctcatgcttattacagcactttgggaggccgaggtgggcagattgcctgagctcaggagtttgagaccagcctgggcaacacggtgaaaccccatctctactaaaatacaaaaattagctggacgtggcggcgcacacctgtaattccagctacttgggaggctgaggcaggagaatcgtttgaacctgggaggcagaggttgcagtgagccaagatcatgccacttcactccagcctgggcaacagagcaagactccatctcaggaaaaaaaaaaaaaatgttgaaccactcatcagagaattggctttcccctctgtaatcacagggctactttctgtcctttttcaccaggatcttataaaacctctgacttagcatatatctgttggtgcatgctccatggtttttgttgactcacttgacgaaatgttcctttctcacatgtggattacgatctcaatagttaattagcatttttctgtcgaggttgagttggtttctactttttcttgtgaggtttactcatatttcttgtgtgtctttgcctctcactagaggaattttagagggcatcttgtcccatctcttctcttgctcaagtatggactgaatcacccactgttttctggcacagcttgtgtttgtgctcctaactgctgcctgcgatggcaagaggggggtcaccttccctgccttctgcgtgcctctgcttgaggagacaaagctggccgtgctttctctggagaacttagccagacagcacagtgtgtcacagtgaagactttaagggccaccagaaatacttactcaaatttgtattgagtttgtaaaaatatttaaatgcttccgtgttggttggtaaacagctgctgctctgtaacacctgagtaacattccttttccagaaggacccttttctgggacccttcagacacccttctccctctacaatttttttccttcagagagagggtctcactgtgtcacccatgctggagtgcagtggcacaatcattacgcactgcaacctggaactcctgagctcaagcgaccctcctacctcagcctcctgagtagctacggctacaggcagcacaccatcatgcccagctaatttttttttttttaagagacaaattcttgctatattgcccaggctggtctcaaactcttggctcaagcaatccttctacctcagcccttccaaagcactgggattacaggcatgaaccaccatgctcagccgcacaattctatctgattagtatctttgtattttcctgattgttaagtatttttggtatcactctgtccttcactgtacaagatgctggggatatgtggctgaacaagcagaaagttcctgtctacccagagcttgcctgcttgcttcatttattcacacatgctcctcattttccagagaggattaaaggtgactgactaaaacacagcctacaaagtacaaaaggataaacagaagtaatagtgctagttgcaacaaagaggaaatataagggatgattagcataccttactagtttagccaaatacagtcccacaccgcataacaatgtttcagtcagtgatgagtccacatgaggtcccataaggttatacactgtatttttattgtactttgtctgtgttgaaatgtgtttagacaccattgtgttacacttgcctacagttttcagtaacatgctgtacaggtttgtagccaaggaggaatagactgtaccctgtagcctaggtgtgtagtaggcgccaccatccaggtgtggtgatgttcgcacaacaatgaaattgcctagtgatgcatttctcaggactcgtacccatcaagtgacacatgactgtatttctttctacttaccaaaaacaaaaaaggaaataaacagtattgagtacctatgactcctccccattccttcccttcctgaagacttcaggtaggacagagcagaagagtcatttttgttgatggggagaaccagactggcctaaagcagggtgttgggatcctggcaaggtgaggagggcatccatgagtgagagctgcctgccccggggaagccagagactgagtgcccatgcatggggagttccagtgcaaggtgtccgagtctgagcagggtttgtgcgtttgtgcccaagggagcatcttgacttgcagtgtcagagtgaggagggcatcagcatgggaggccagcttagaactaaatgcttatgtcccctcaaaattcatatgtcgaaatcataaccccaaagtgatggtgttaggaggtggggccttagggagatgattcctgaggcctcattcatgagcagtaggcctatccctcatgaatgggattagtgtccttataaaagaggcctcagagacacccgttgccccttccgctacgggaggacagtgagaaggtgctgtctgtgaaccaccaatcccccaccagatgttgaatctgccagcacttagatcttggacttcccaggctctcaaactgacaaatttctgttttttctgagccacctagtttaggtattttgttctaacagcccgaatggactgagacacagctcagagcagggagctggagcccaaggatgttgagaagagcgtccacctgaggggcagcggcagcaaggagtgggagagccagagcagggtaggggcaccgacactgtggggagggcacgcccagcatggagggccagggctggtcctgtggggagtgcatcgttgcaggggaaaatggtgactaatgtggggagttgaagcccaggtgggataagctgggtgtcctcgcagggagtggcctggtatgggagcagggcctgagaagggtgaggcagatgttcacatggggtagggggcaggtatggggagtcagagccacacagggtgaggaggatgtgtatccactgggacgcttccgggcgggatgttgaatcccacaaaaggcaaggaggactgcagcacagggagtggcccagctcacatggggtaacaggcctctgtgcaggggtggtgtggcctggaattgtgagtgggagctcagatgggatgaagagggcagccccacggttggagcacatggagggtgatgagtgcagtgctgaggctgagggaggggctgcagaatcatagggaccggtgacagagaaggggctggttagatgagtaggtagtaaggatcatgggagcctggcttcccagtggcagacagagatgttggatttgatttcaaggtaatcttgaaattactgttgcaggctgctggggaaaagcacatgagaaaaatattaatagtatttaaaaactaagacaaaaggtagagaaatgcagcaattatagcagttttattttctgagtgattagacaatagatgactcattttcttgtttgtgcttttatatgttttgcagatcttttttgacagcatatattccttaggaaagaaaaaatttataacttcaaagtaacaggctagtgaggtaactcatttcctacatactgggtaatgtttgttcttcaatcaagaaaggaaaatattctcctttttaaaaaattttattctcattttggcttttcacaataaactagggaattaaaaaaatattttactatccactgtgaaaatttcagcagagacaagcatttgatggatactccacatagcccccactagactatatagtcattgtggaagcttaggtaacatgtgctcttctgaaataaatccaagaagactggaaccatctgaaccctatgtaaagtgagacagtgttaggcttgcataattcactcagcttttagcttttgaggagatacagttggaacaaatacaacaaatacttaatccagacttttcactttaactttcatggatttataccaatttgaggattgaagtcattcattatatcagcaccattacaactgtatataaaattaaagcttatgtttgttaaatctgtccaaatgtcatgtatagttaagaggggtacattattactttttcataaaatttggtcattgaggattacataccttaaggttagagttatttagcccaattacttggcttgaaataaacaagattgtattgccattttcagatggggaagctgaggaccaaagaggttatgagatgtacctgaagattgtgaattctggccgggtgcagtggctcacgcctgtaatcccagcactttgggaggccgaggcaggatcacctgaggtcaggagttggagaccagcttggccaacatggtgaaacctatctctactaaaaatataaaaattagccatggtggcacgcgcctgtaatcccagttactcgggaggccgaggcaggagaattccttgagcctgggaggcggaggttgcagtgaactgagatcgcaccactgcattctagcctggtaacagagcgagactccatctcaaaaaaaaaaaaaaaaagttttgaattctgattgtgacaatccaaacattttttattcgggttattgtcactcttaatttgcaggtgaaggggcagaatcaagataaactctcagatacagataaataccaaaaaaaagaaagaaagaaagaaaaaggaaatagctggtaagaagttgaagtgaaaagtaaagggccgggcatggtggctcacgcctgtaatcccagcacttttgggaggccgaggcgggtggatcacgaggtcaggagatcgagaccatcctggctaacacggtgaaaccctgtctctactaaaaatacaaaaaaattagccaggcgtggtggcgggcacctactacttgggaggctgaggcaggagaacggcatgaacccgggaggcagagcttgcagtgagctgagattgcaccactgcactccagcctgggccacagagcaagactccatctcaaaaaaaagaaaagtaaatagccccgattttcactagtggtatgcaaagtcttccagaactatatggtacactctgtaattgtttgaaggactataaaagcagttttaaaaaaccataaccccccccttttttaaattaatactttaagttctgggatacatgtgcagaacgtgcaggtttgttacataaggtacacatgtgccatagtggtttgctgcacccattaacccgtcgtctacattagatatttctcttactgttatccccccctttcccccaccccccaacaggccccggtatatgactccccaccctgtgtccatgtgttctcattcttcaactcccacttatgagtgagaacatgcagtgtttgaaaacctccctttttttaaaagatgggttattactgactgtgttactttcatccttacttagagggactgatttaatttcccaaatcaaattgctctgcatttcttacaactattgcatctactttcaattcagaaaattaagacattttaattttattctttttattactgccaaacaaagcattaggagtactcttaaaagaatcataaaatgtatagcaacactaacagaaggataaatatggtaaaagagctttaaaattgaagttagtgatagaaatagtaacagaagtagaagtagatgctagtgcaatgtcatttagacatttattagttttttgagacagggtctcactctgttacccaggctggagtgcagtggcaccatcatagctcacttcagcctcaacctgggctcaagcagtcctctcatctcagcctcctgagtagctaagactacaggtgtgtgccaccacacctgactgattgattgattatagagatggggcttcactatgtttcccaggctggtgtcaaactcctgggttcaagccatcctcccaccttggccccacctaagtgctgggattataggcatgaaccactgtgcccagcatgaaacactgtgcccaggcttgaagtaattcatgattgagggatattgaagaaggagtatactaaaacattgggttgcaatgtcaaaattatagatacttgtacttggatagaatgttccataaatgaaaatattcataatcacatgtagcataggagttatcaaaagggcactatggaaaaagtcatgattatatcatgaaattgttcaaacatatgagaagtagaaaaaaaatcatgtcagtactttcatcacccaggttcaacagttttcaagctcttgctacacgtcatctttttttcttttttccttaaattattttaaatgaacaacatgtcattttacccttactcagtttgggtctctaagaaatacaaaaataaccacggtgacatcatctttattttctggcacttcagtcaaaattaaagggaaatcttttggcaccatctatacacagctcataaattaaatttcccagattgatttacaaatgtctttttatagttgatttgctctaatcaggataaaaacaagatccactcattataaacagtggttaatctcatcagatgctttaaaaaaattatgaacatcttataatagtttgatacatttatcacaattagtgaaccaataccaattcattgttattagctaaagtctgtactttattctgattcctttagttcttacccagtgtcccttttctattccaggatcccatctaggatttcacatcacattttttttttttaattttattttaagttccaggatacaagtgtaggacatgcaggtttgctacataggtaaacgtatgccatggtggtttgctgcacctgacaatgcattacctagatattaagccttgtatgcattagctatttatcctgatgctctcccttcccccactcctccacccctagcacatcacatttagtcatcgtatctgctgaggctcctcttgcatgtggcagtttctcaaactttccttgtttttttgttttgttttgttttctaacctttttctaggatctcctttccttgtttctgatgaccttaacacttttgaagattactgttcagttattttgtaaactgtccctcagttgagatttgtgtgatatttttcttattagactcatgttattgattttgggaagaccatagaggtaaagtgtcattttcatcacatcatatcaaggattcatactatcaacatgacttactactgttgatattaaccttgatctcccaggtgaggaggtgttgtcaggtttctccactggaaagctgttctttttttctcctccatactatcctcttttggaaggaagtcattatgcaaggcccacacttaaggaatagagagttatatcagtatggacttgtggatatttattttatgacttgcattacaatctaatactactttttttcccctcagattgttccagctttggccattaggagctctttcagttgattcttatgtccctttgacataccccgatcatttttggttttgtgttttgtgtttgttttttaagcacttcctttctttttctggcactgtaagatactccaaattcatcttctatatgagatgctccaaattcatcttctttactctttgccctagccatataattagacatttcatctaggagccctggttcctactactggagaatggtattagaagccaagatctaggttctaagtgtgcttattgctactgggtgtgtcattggttcttgccctactgagccaggacaacagggagatatatatgtgtgtatactgtatatatacacatatctatacacatttctgtatataactatattatagaattcatgaaatgtcataaactcctcagagcatactgacgtctccagctctaatccattaccacatagaccacactagcctttatcttctcattccaacagtgagaaacttagctcccactatcagccatccatctacttcgttgttcaatttcggtatgatgtgtggtagttatatttgtcttctagggctgctataataaatgatcacaaacttagtggcttaaaacagaaattattcttttcacagttctagaaactagaattccaaaatcaagaggtaaaaaatatggaagaaaaagaaaacagaatagagcataagacagatgtaggacatggtcaaaagttctagcagaatatagttggagtcccagaaaaggaagagagagaaaatagaacagaagcagtaattgaaaaaatagttgacaaggacactaccaatctgatgtaaaacatcactctatggtttcaagaaagtcagcaaccccaagtagggcaaacagaaaactacaccaggccgggcaacagtggctcacgcctgtaatcccagcattgtgggaggccaagtcgggcagatcacttgagttcaggagttcgagaccagcctggccaacatggtgaaacccagtctctactaaaaatacaaaaattagccaggcatggtggcacatgcctataatcctagctactcaggaggctgaggcaggagaatcgcttgaacccaggaggcagaggctgcagtaagccaagatcatgccattgcactccagcctaggtgacagagtgagactctgtctcaaaaaaaaaaaaaaaaaaaaggcaggtgcagtggctcacgcctgtaatcccagcactttgggagtcagaggcgggcacatcacaaggtcaagagatcgagaccatcctggccaacatggtgaaaccccttctctactaaaaatataaaaattagctgggcatggtggcgtgtgcctgtagtcccagctactctggaggctgaggcaggagaattgcttgaaccctggaggcaggggttgcagtgagctgagatcgcactactacactccagcctgggtgacagagtgagactctgtctcaaaagaaagaaaaccacacctaagcacaccatagtcaaactgaaaatcaaagatgacaagaaaatcttaaaagcaatcaaagtaaaaaagacatattatagaatgacatgtaatgacactttttagttgctgacagaaaaaacctgccaatttagaaatctgattccggccaagttggtgtaaaagagatcagtttatcctccctgaaacaaacaagcaacctagacaaaatacatgacataatggatttctggcattggacatcaggcagcacaggaattgatttctgagagagggtaaacaaacaagatgagccctacaattacccagtttactggctgtagagagtttccagactgcagtgcaggaagggggaatccacgtggaacttagtggtctccctgagttgcggagataggagttggaagtctgaggaggccatggtgctagagttcacagctctctcctggaaaggagagctgcacagagagtgaactctaaagatctgtagtacctttcatgtcttcatcggagcttcgagtattgcacgcatgttaggaagctagaatagaaccccttgaaaggattagagggaataatccacacacagaggtggggatagttttttcttactagtcatagtaatttccgtaacattgggaagagtactcagaagggctttggcttggtagtgaggaaaattagtcctagactaaaagctgctccaatcccacctaacgcagcagaagaaaagcttaataatattgatatgaatttaaaaataagataaaattgacaatgtctgacatcagtgaggaccaattttcctcactaagtgggtcgagccgttcctgccacgagcttctagtgcatgttctattctgaaaaagatgagaattaaccagctacagtgcaagatgtcatgaaatgagctgtgttcagaatctaggcacgtgtgactttgacatatctatgaggtttaaaaaagaaatatcaggaatacaagtagaatatgtgccatatgaagaaatcatagcttatttatgtaacatttagtatcctcattagctgtttgactggttttagaattcagcatataatccttggctctttggaaataaaattgtataaatactaatatttattagatctgaatggtaggtacatgggtgttaaactagtctctgtgcttttgtgtgttttttttaattaaactagtgattttaattaaactagtgatttatgactgcctaggaatgtggccattcatatcataccttttcatccatttcttaggttcccagtctaagtgggtgactttccaagatagaggcagatcatttctccgtcaagtatagagagacacatctgctcctcctagagtgtccataagtatgaagaaaatagaaataacttagaagaggctgcaaaaacattaaagtttgaaatttttttgggtggggaataacattttgatggcaatttaatagtgattttcatgtgtgtcttgataatgtcaaaggtaataaccaggtgttttggcagggcaagttttggggatcagggaaacactcatatttgctaagtacctattatgccataaactgtactgaaagctttttatctgttacctcattttaatctgtagtcaatttatgtggtagacctcatttgcctgttatagatgaggacccagggttctcaggaaaaagcaatgtcttcaatctcactaatagtactgccagaataaactattataaagtatatcatacatgatttagattataagaagaaacatttactaatggtgaaaattctgagcattgtggttgcttacctagaaaaatttagtaacttctcttacttctctgaaaattttaagcttattttttatgatgatttaagaatggtcctgcccacaggcagaggagatagactgcatgagctctcaaagttttttctaagtcttatgatactataagttggtatttttatgatctcaaatgtgttcaatttatttccctttcttaaggtggataatattaatgcagctgtgatggatttgaaaaaaaagaagatccgcagtctaagtgaagaggtcaaaataggagcacatggaaaaccagtgatttttctccatcctaaagactgtggtggagtccttgtggaactggagcaagcttgatttatatttgcaagcaactaaattaattgacctgaaaaagcctatcaaatactatcaaaatgtactatgacattgagtccttcactgcttccatcatgtaaaagttcacagttaaagactgaattacagaaagattaaaatatatacatatataaatacataaatatgtatattatttagattaacaaacatatttgttaatttgaatttgaagaaaatcttgattactaattacttagggaacattattaaaatcatatagaaataaattattcctcttcta

SEQ ID NO: 12829 - DNA, 824 bp, Homo sapiens
gctttccaaaatggcgcgggtgctgaaggctgcagccgcgaatgccgtagggcttttttccagacttcaagctcccattccaacagtaagagcttcttccacatcacagcccttggatcaagtgacaggttctgtgtggaacctgggtcgactcaaccatgtagccatagcagtgccagatttggaaaaggctgcagcattttataagaatattctgggggcccaggtaagtgaagcggtccctcttcctgaacatggagtatctgttgtttttgtcaacctgggaaataccaagatggaactgcttcatccattgggacgtgacagtccaattgcaggttttctgcagaaaaacaaggctggaggaatgcatcacatctgcatcgaggtggataatattaatgcagctgtgatggatttgaaaaaaaagaagatccgcagtctaagtgaagaggtcaaaataggagcacatggaaaaccagtgatttttctccatcctaaagactgtggtggagtccttgtggaactggagcaagcttgatttatatttgcaagcaactaaattaattgacctgaaaaagcctatcaaatactatcaaaatgtactatgacattgagtccttcactgcttccatcatgtaaaagttcacagttaaagactgaattacagaaagattaaaatatatacatatataaatacataaatatgtatattatttagattaacaaacatatttgttaatttgaatttgaagaaaatcttgattactaattacttagggaacattattaaaatcatatagaaataaattattcctcttcta

SEQ ID NO: 12830 - DNA, 14768 bp, Homo sapiens
ctgggtcgactcaaccatgtagccatagcagtgccagatttggaaaaggctgcagcattttataagaatattctgggggcccaggtaagtgaagcggtccctcttcctgaacatggagtatctgttgtttttgtcaacctgggaaataccaagatggaactgcttcatccattgggacgtgacagtccaattgcaggttttctgcagaaaaacaaggctggaggaatgcatcacatctgcatcgaggtattttaattattttaatgcctggtattttaaatctctcttttaaaaaatgtcttctactttttaagtctatttatggtcactgtcattagaaacttttgtaaagttctttaaggagaatgataatattcatcctcctcaaaggtggatccttacatacatttcttttccctttagaaaattctaacatataatattaatgtatttttttgaagtctggattcagtgaccactgtaagtgccaccaaagttagccacaatgtagagtctgctttagaattgatcatgtttgacctcccatgtaacaggaatacagctgttttcactgtcataaggcaattaggagaaacaaatgaaaagactttaaagctttcagtgtacatgctaagtattctttataactcttttctctctttaaaatgctaataacttcttcgttattacaaagtcaatacattttcaattactgtaatttttaagatcttctgaattgcacctgccaacaatttttaaaggaatgtgaagaaatgttagacaagaaaagtccattagagaacatttctatagatgttcatgttcagataactgccttttagaatatcagcaatgacaattatgcatcgatttaatttgctaggacaattctttttatagaaagaatgacataattgttaagccaaatttctttttcttttctttttttttttttttttgagacggagtcttactctgtcgcccaggctgaagtgcagtgtggcgtgatctcggctcactgcaacctctgcctcctgggttcaagtgattctcctgcctcagcctaccaggtagctgggattacaggcatgcgccaccatgcccggctaattgtgtatttttagtagagatgaggtttcaccatgttggtcaggctggtctcaaactcctgacctcaggtgattcacctacgtcagcctctcaaagtgctgggattataggcgtgagccaccttgcctggcctgttaggccaaatttctaatacagaggagaggtcatttgattctagagtgaattcaaggatgtattcagttcattattgcaaacatgtatgagaccctataatgtgtattctgccaagtacttgggatttagcagtgaataagacatgagtcatgtccatagtgaggagggtcagaaatttaaacacccaagtgcaatatactatgataagtagaattgatatatgtgactttgcagtagcacagatgaaggagattgattgctcctggcagattgagttgctgggaaggcctcacagagcataagttacaatgaatgtgaaggaattccctaggtgaacaaaaggagaaagttatttcaggcagagggaattgcatgtggaaaggcatagagttatcataacagctaacacttagtggctgggtgtggtggcttatgcctcgacatggcttggctgtgtccccacccaaatctcatcttgaattcccacatgttgtgggagggaccagtgggaggtaattgaatcatgggggcaggtctttccgtgctgttcttgtgatagtgaataagtttcacaagatctgacagttttataagggggattttccctgcccaatctgtctctctttgcctgctgccatccatgtaagatgtgacttgctcctccttgccttctgccatgagtgtgaggcctccccagccacgtggaactgtaaatcattaaacctgtttcttttgtaaattgcccagtctcgggtatgtctttatcaatagcgtgaaaatggactaatacacacctgtaatcttagcactttgggaggccaaggtgggcagattgctcgagcccaggagtttgagaccagcctgggccaaatggcaaaaccgtgtctctactaaaaatacaaaaagctagtcaggtgtggtggtatgcacctgtagtcccagctacttgggaggctgatgtgggagcatcacttgagcccaggaagtgctgaggtggaggttgtagtgagccgtgatcacaccactgcactctagcctgaatgaaagagcgagaccctgtctcaaaaaaaagaactaacatttagtgagtcctctagtagtatgtctacaaagtaactcaacacatactattttcttgaattttcatagctaccctgtgagggccctattatccccatttgacaggaaaggaaactgagacagagtagttaatttgcccatggtcatatcaatagcaggtatggggctgaatcccagattggttctgattccagggtctgcactcttacccatgatgccagttgccttcattatattaactgagttttaaatttgcggtggggaagctataagaccttaagcagggaactaaacaagtcctaatattagcctttattttatttttagggagttacttttggctgcaggtctttgtcagtggacctgagtgtttgtctaagccctaccccaccccccaggatgagaagcaggacctttgaatccactcccccctctcccacactgcactatcagtattccatcaagagagcccatgctttcaaaggagttcagctatgtgatttagttcagttaagtaaggaatagtggaagttcagtaatggcagattcaaaagcagagattataagggggacatgcaaatgtattggatataaaatgaaggtaggtaagaggagaaggtgtgaacagtggttagttaggtgctattttagtataatacccccatcatcattctctgccctccacaaaaaaattaagtggcttaacaagattttatttttctgttttcagtctaatattagctatcccaggctgatgggcagctctgctgtccatgacacatgacttacaaggttgctccaggcatcaccatttgccagccagagggaagggaagggaaggtggagtgggaatacctggcaagtggctttaaggagatgctctaggatcacttctgtccttatcccattggcccaagcttagttacatgacacacttctctgcaagggaggctggggaatgtagtctctagctaggcagttatgtgccctgctgaagcttgggggttgctgtaattaaaaggaggaaaaggagaaaggtactggaggccatcaatggatgccacgcttggtgatttttaaaaagtggtgtgtcacctgggcatggtggctcatgcttattacagcactttgggaggccgaggtgggcagattgcctgagctcaggagtttgagaccagcctgggcaacacggtgaaaccccatctctactaaaatacaaaaattagctggacgtggcggcgcacacctgtaattccagctacttgggaggctgaggcaggagaatcgtttgaacctgggaggcagaggttgcagtgagccaagatcatgccacttcactccagcctgggcaacagagcaagactccatctcaggaaaaaaaaaaaaaatgttgaaccactcatcagagaattggctttcccctctgtaatcacagggctactttctgtcctttttcaccaggatcttataaaacctctgacttagcatatatctgttggtgcatgctccatggtttttgttgactcacttgacgaaatgttcctttctcacatgtggattacgatctcaatagttaattagcatttttctgtcgaggttgagttggtttctactttttcttgtgaggtttactcatatttcttgtgtgtctttgcctctcactagaggaattttagagggcatcttgtcccatctcttctcttgctcaagtatggactgaatcacccactgttttctggcacagcttgtgtttgtgctcctaactgctgcctgcgatggcaagaggggggtcaccttccctgccttctgcgtgcctctgcttgaggagacaaagctggccgtgctttctctggagaacttagccagacagcacagtgtgtcacagtgaagactttaagggccaccagaaatacttactcaaatttgtattgagtttgtaaaaatatttaaatgcttccgtgttggttggtaaacagctgctgctctgtaacacctgagtaacattccttttccagaaggacccttttctgggacccttcagacacccttctccctctacaatttttttccttcagagagagggtctcactgtgtcacccatgctggagtgcagtggcacaatcattacgcactgcaacctggaactcctgagctcaagcgaccctcctacctcagcctcctgagtagctacggctacaggcagcacaccatcatgcccagctaatttttttttttttaagagacaaattcttgctatattgcccaggctggtctcaaactcttggctcaagcaatccttctacctcagcccttccaaagcactgggattacaggcatgaaccaccatgctcagccgcacaattctatctgattagtatctttgtattttcctgattgttaagtatttttggtatcactctgtccttcactgtacaagatgctggggatatgtggctgaacaagcagaaagttcctgtctacccagagcttgcctgcttgcttcatttattcacacatgctcctcattttccagagaggattaaaggtgactgactaaaacacagcctacaaagtacaaaaggataaacagaagtaatagtgctagttgcaacaaagaggaaatataagggatgattagcataccttactagtttagccaaatacagtcccacaccgcataacaatgtttcagtcagtgatgagtccacatgaggtcccataaggttatacactgtatttttattgtactttgtctgtgttgaaatgtgtttagacaccattgtgttacacttgcctacagttttcagtaacatgctgtacaggtttgtagccaaggaggaatagactgtaccctgtagcctaggtgtgtagtaggcgccaccatccaggtgtggtgatgttcgcacaacaatgaaattgcctagtgatgcatttctcaggactcgtacccatcaagtgacacatgactgtatttctttctacttaccaaaaacaaaaaaggaaataaacagtattgagtacctatgactcctccccattccttcccttcctgaagacttcaggtaggacagagcagaagagtcatttttgttgatggggagaaccagactggcctaaagcagggtgttgggatcctggcaaggtgaggagggcatccatgagtgagagctgcctgccccggggaagccagagactgagtgcccatgcatggggagttccagtgcaaggtgtccgagtctgagcagggtttgtgcgtttgtgcccaagggagcatcttgacttgcagtgtcagagtgaggagggcatcagcatgggaggccagcttagaactaaatgcttatgtcccctcaaaattcatatgtcgaaatcataaccccaaagtgatggtgttaggaggtggggccttagggagatgattcctgaggcctcattcatgagcagtaggcctatccctcatgaatgggattagtgtccttataaaagaggcctcagagacacccgttgccccttccgctacgggaggacagtgagaaggtgctgtctgtgaaccaccaatcccccaccagatgttgaatctgccagcacttagatcttggacttcccaggctctcaaactgacaaatttctgttttttctgagccacctagtttaggtattttgttctaacagcccgaatggactgagacacagctcagagcagggagctggagcccaaggatgttgagaagagcgtccacctgaggggcagcggcagcaaggagtgggagagccagagcagggtaggggcaccgacactgtggggagggcacgcccagcatggagggccagggctggtcctgtggggagtgcatcgttgcaggggaaaatggtgactaatgtggggagttgaagcccaggtgggataagctgggtgtcctcgcagggagtggcctggtatgggagcagggcctgagaagggtgaggcagatgttcacatggggtagggggcaggtatggggagtcagagccacacagggtgaggaggatgtgtatccactgggacgcttccgggcgggatgttgaatcccacaaaaggcaaggaggactgcagcacagggagtggcccagctcacatggggtaacaggcctctgtgcaggggtggtgtggcctggaattgtgagtgggagctcagatgggatgaagagggcagccccacggttggagcacatggagggtgatgagtgcagtgctgaggctgagggaggggctgcagaatcatagggaccggtgacagagaaggggctggttagatgagtaggtagtaaggatcatgggagcctggcttcccagtggcagacagagatgttggatttgatttcaaggtaatcttgaaattactgttgcaggctgctggggaaaagcacatgagaaaaatattaatagtatttaaaaactaagacaaaaggtagagaaatgcagcaattatagcagttttattttctgagtgattagacaatagatgactcattttcttgtttgtgcttttatatgttttgcagatcttttttgacagcatatattccttaggaaagaaaaaatttataacttcaaagtaacaggctagtgaggtaactcatttcctacatactgggtaatgtttgttcttcaatcaagaaaggaaaatattctcctttttaaaaaattttattctcattttggcttttcacaataaactagggaattaaaaaaatattttactatccactgtgaaaatttcagcagagacaagcatttgatggatactccacatagcccccactagactatatagtcattgtggaagcttaggtaacatgtgctcttctgaaataaatccaagaagactggaaccatctgaaccctatgtaaagtgagacagtgttaggcttgcataattcactcagcttttagcttttgaggagatacagttggaacaaatacaacaaatacttaatccagacttttcactttaactttcatggatttataccaatttgaggattgaagtcattcattatatcagcaccattacaactgtatataaaattaaagcttatgtttgttaaatctgtccaaatgtcatgtatagttaagaggggtacattattactttttcataaaatttggtcattgaggattacataccttaaggttagagttatttagcccaattacttggcttgaaataaacaagattgtattgccattttcagatggggaagctgaggaccaaagaggttatgagatgtacctgaagattgtgaattctggccgggtgcagtggctcacgcctgtaatcccagcactttgggaggccgaggcaggatcacctgaggtcaggagttggagaccagcttggccaacatggtgaaacctatctctactaaaaatataaaaattagccatggtggcacgcgcctgtaatcccagttactcgggaggccgaggcaggagaattccttgagcctgggaggcggaggttgcagtgaactgagatcgcaccactgcattctagcctggtaacagagcgagactccatctcaaaaaaaaaaaaaaaaagttttgaattctgattgtgacaatccaaacattttttattcgggttattgtcactcttaatttgcaggtgaaggggcagaatcaagataaactctcagatacagataaataccaaaaaaaagaaagaaagaaagaaaaaggaaatagctggtaagaagttgaagtgaaaagtaaagggccgggcatggtggctcacgcctgtaatcccagcacttttgggaggccgaggcgggtggatcacgaggtcaggagatcgagaccatcctggctaacacggtgaaaccctgtctctactaaaaatacaaaaaaattagccaggcgtggtggcgggcacctactacttgggaggctgaggcaggagaacggcatgaacccgggaggcagagcttgcagtgagctgagattgcaccactgcactccagcctgggccacagagcaagactccatctcaaaaaaaagaaaagtaaatagccccgattttcactagtggtatgcaaagtcttccagaactatatggtacactctgtaattgtttgaaggactataaaagcagttttaaaaaaccataaccccccccttttttaaattaatactttaagttctgggatacatgtgcagaacgtgcaggtttgttacataaggtacacatgtgccatagtggtttgctgcacccattaacccgtcgtctacattagatatttctcttactgttatccccccctttcccccaccccccaacaggccccggtatatgactccccaccctgtgtccatgtgttctcattcttcaactcccacttatgagtgagaacatgcagtgtttgaaaacctccctttttttaaaagatgggttattactgactgtgttactttcatccttacttagagggactgatttaatttcccaaatcaaattgctctgcatttcttacaactattgcatctactttcaattcagaaaattaagacattttaattttattctttttattactgccaaacaaagcattaggagtactcttaaaagaatcataaaatgtatagcaacactaacagaaggataaatatggtaaaagagctttaaaattgaagttagtgatagaaatagtaacagaagtagaagtagatgctagtgcaatgtcatttagacatttattagttttttgagacagggtctcactctgttacccaggctggagtgcagtggcaccatcatagctcacttcagcctcaacctgggctcaagcagtcctctcatctcagcctcctgagtagctaagactacaggtgtgtgccaccacacctgactgattgattgattatagagatggggcttcactatgtttcccaggctggtgtcaaactcctgggttcaagccatcctcccaccttggccccacctaagtgctgggattataggcatgaaccactgtgcccagcatgaaacactgtgcccaggcttgaagtaattcatgattgagggatattgaagaaggagtatactaaaacattgggttgcaatgtcaaaattatagatacttgtacttggatagaatgttccataaatgaaaatattcataatcacatgtagcataggagttatcaaaagggcactatggaaaaagtcatgattatatcatgaaattgttcaaacatatgagaagtagaaaaaaaatcatgtcagtactttcatcacccaggttcaacagttttcaagctcttgctacacgtcatctttttttcttttttccttaaattattttaaatgaacaacatgtcattttacccttactcagtttgggtctctaagaaatacaaaaataaccacggtgacatcatctttattttctggcacttcagtcaaaattaaagggaaatcttttggcaccatctatacacagctcataaattaaatttcccagattgatttacaaatgtctttttatagttgatttgctctaatcaggataaaaacaagatccactcattataaacagtggttaatctcatcagatgctttaaaaaaattatgaacatcttataatagtttgatacatttatcacaattagtgaaccaataccaattcattgttattagctaaagtctgtactttattctgattcctttagttcttacccagtgtcccttttctattccaggatcccatctaggatttcacatcacattttttttttttaattttattttaagttccaggatacaagtgtaggacatgcaggtttgctacataggtaaacgtatgccatggtggtttgctgcacctgacaatgcattacctagatattaagccttgtatgcattagctatttatcctgatgctctcccttcccccactcctccacccctagcacatcacatttagtcatcgtatctgctgaggctcctcttgcatgtggcagtttctcaaactttccttgtttttttgttttgttttgttttctaacctttttctaggatctcctttccttgtttctgatgaccttaacacttttgaagattactgttcagttattttgtaaactgtccctcagttgagatttgtgtgatatttttcttattagactcatgttattgattttgggaagaccatagaggtaaagtgtcattttcatcacatcatatcaaggattcatactatcaacatgacttactactgttgatattaaccttgatctcccaggtgaggaggtgttgtcaggtttctccactggaaagctgttctttttttctcctccatactatcctcttttggaaggaagtcattatgcaaggcccacacttaaggaatagagagttatatcagtatggacttgtggatatttattttatgacttgcattacaatctaatactactttttttcccctcagattgttccagctttggccattaggagctctttcagttgattcttatgtccctttgacataccccgatcatttttggttttgtgttttgtgtttgttttttaagcacttcctttctttttctggcactgtaagatactccaaattcatcttctatatgagatgctccaaattcatcttctttactctttgccctagccatataattagacatttcatctaggagccctggttcctactactggagaatggtattagaagccaagatctaggttctaagtgtgcttattgctactgggtgtgtcattggttcttgccctactgagccaggacaacagggagatatatatgtgtgtatactgtatatatacacatatctatacacatttctgtatataactatattatagaattcatgaaatgtcataaactcctcagagcatactgacgtctccagctctaatccattaccacatagaccacactagcctttatcttctcattccaacagtgagaaacttagctcccactatcagccatccatctacttcgttgttcaatttcggtatgatgtgtggtagttatatttgtcttctagggctgctataataaatgatcacaaacttagtggcttaaaacagaaattattcttttcacagttctagaaactagaattccaaaatcaagaggtaaaaaatatggaagaaaaagaaaacagaatagagcataagacagatgtaggacatggtcaaaagttctagcagaatatagttggagtcccagaaaaggaagagagagaaaatagaacagaagcagtaattgaaaaaatagttgacaaggacactaccaatctgatgtaaaacatcactctatggtttcaagaaagtcagcaaccccaagtagggcaaacagaaaactacaccaggccgggcaacagtggctcacgcctgtaatcccagcattgtgggaggccaagtcgggcagatcacttgagttcaggagttcgagaccagcctggccaacatggtgaaacccagtctctactaaaaatacaaaaattagccaggcatggtggcacatgcctataatcctagctactcaggaggctgaggcaggagaatcgcttgaacccaggaggcagaggctgcagtaagccaagatcatgccattgcactccagcctaggtgacagagtgagactctgtctcaaaaaaaaaaaaaaaaaaaaggcaggtgcagtggctcacgcctgtaatcccagcactttgggagtcagaggcgggcacatcacaaggtcaagagatcgagaccatcctggccaacatggtgaaaccccttctctactaaaaatataaaaattagctgggcatggtggcgtgtgcctgtagtcccagctactctggaggctgaggcaggagaattgcttgaaccctggaggcaggggttgcagtgagctgagatcgcactactacactccagcctgggtgacagagtgagactctgtctcaaaagaaagaaaaccacacctaagcacaccatagtcaaactgaaaatcaaagatgacaagaaaatcttaaaagcaatcaaagtaaaaaagacatattatagaatgacatgtaatgacactttttagttgctgacagaaaaaacctgccaatttagaaatctgattccggccaagttggtgtaaaagagatcagtttatcctccctgaaacaaacaagcaacctagacaaaatacatgacataatggatttctggcattggacatcaggcagcacaggaattgatttctgagagagggtaaacaaacaagatgagccctacaattacccagtttactggctgtagagagtttccagactgcagtgcaggaagggggaatccacgtggaacttagtggtctccctgagttgcggagataggagttggaagtctgaggaggccatggtgctagagttcacagctctctcctggaaaggagagctgcacagagagtgaactctaaagatctgtagtacctttcatgtcttcatcggagcttcgagtattgcacgcatgttaggaagctagaatagaaccccttgaaaggattagagggaataatccacacacagaggtggggatagttttttcttactagtcatagtaatttccgtaacattgggaagagtactcagaagggctttggcttggtagtgaggaaaattagtcctagactaaaagctgctccaatcccacctaacgcagcagaagaaaagcttaataatattgatatgaatttaaaaataagataaaattgacaatgtctgacatcagtgaggaccaattttcctcactaagtgggtcgagccgttcctgccacgagcttctagtgcatgttctattctgaaaaagatgagaattaaccagctacagtgcaagatgtcatgaaatgagctgtgttcagaatctaggcacgtgtgactttgacatatctatgaggtttaaaaaagaaatatcaggaatacaagtagaatatgtgccatatgaagaaatcatagcttatttatgtaacatttagtatcctcattagctgtttgactggttttagaattcagcatataatccttggctctttggaaataaaattgtataaatactaatatttattagatctgaatggtaggtacatgggtgttaaactagtctctgtgcttttgtgtgttttttttaattaaactagtgattttaattaaactagtgatttatgactgcctaggaatgtggccattcatatcataccttttcatccatttcttaggttcccagtctaagtgggtgactttccaagatagaggcagatcatttctccgtcaagtatagagagacacatctgctcctcctagagtgtccataagtatgaagaaaatagaaataacttagaagaggctgcaaaaacattaaagtttgaaatttttttgggtggggaataacattttgatggcaatttaatagtgattttcatgtgtgtcttgataatgtcaaaggtaataaccaggtgttttggcagggcaagttttggggatcagggaaacactcatatttgctaagtacctattatgccataaactgtactgaaagctttttatctgttacctcattttaatctgtagtcaatttatgtggtagacctcatttgcctgttatagatgaggacccagggttctcaggaaaaagcaatgtcttcaatctcactaatagtactgccagaataaactattataaagtatatcatacatgatttagattataagaagaaacatttactaatggtgaaaattctgagcattgtggttgcttacctagaaaaatttagtaacttctcttacttctctgaaaattttaagcttattttttatgatgatttaagaatggtcctgcccacaggcagaggagatagactgcatgagctctcaaagttttttctaagtcttatgatactataagttggtatttttatgatctcaaatgtgttcaatttatttccctttcttaaggtggataatattaatgcagctgtgatggatttgaaaaaaaagaagatccgcagtctaagtgaagaggtcaaaataggagcacatggaaaaccagtgatttttctccatcctaaagactgtggtggagtccttgtggaactggagcaagcttgatttatatttgcaagcaactaaattaattgacctgaaaaagcctatcaaatactatcaaaatgtactatgacattgagtccttcactgcttccatcatgtaaaagttcacagttaaagactgaattacagaaagattaaaatatatacatatataaatacataaatatgtatattatttagattaacaaacatatttgttaatttgaatttgaagaaaatcttgattactaattacttagggaacattattaaaatcatatagaaataaattattcctcttctacaa

SEQ ID NO: 12831 - DNA, 523 bp, Homo sapiens
ctgggtcgactcaaccatgtagccatagcagtgccagatttggaaaaggctgcagcattttataagaatattctgggggcccaggtggataatattaatgcagctgtgatggatttgaaaaaaaagaagatccgcagtctaagtgaagaggtcaaaataggagcacatggaaaaccagtgatttttctccatcctaaagactgtggtggagtccttgtggaactggagcaagcttgatttatatttgcaagcaactaaattaattgacctgaaaaagcctatcaaatactatcaaaatgtactatgacattgagtccttcactgcttccatcatgtaaaagttcacagttaaagactgaattacagaaagattaaaatatatacatatataaatacataaatatgtatattatttagattaacaaacatatttgttaatttgaatttgaagaaaatcttgattactaattacttagggaacattattaaaatcatatagaaataaattattcctcttctacaa

SEQ ID NO: 12832 - DNA, 8571 bp, Homo sapiens
gggcagcggcagcaaggagtgggagagccagagcagggtaggggcaccgacactgtggggagggcacgcccagcatggagggccagggctggtcctgtggggagtgcatcgttgcaggggaaaatggtgactaatgtggggagttgaagcccaggtgggataagctgggtgtcctcgcagggagtggcctggtatgggagcagggcctgagaagggtgaggcagatgttcacatggggtagggggcaggtatggggagtcagagccacacagggtgaggaggatgtgtatccactgggacgcttccgggcgggatgttgaatcccacaaaaggcaaggaggactgcagcacagggagtggcccagctcacatggggtaacaggcctctgtgcaggggtggtgtggcctggaattgtgagtgggagctcagatgggatgaagagggcagccccacggttggagcacatggagggtgatgagtgcagtgctgaggctgagggaggggctgcagaatcatagggaccggtgacagagaaggggctggttagatgagtaggtagtaaggatcatgggagcctggcttcccagtggcagacagagatgttggatttgatttcaaggtaatcttgaaattactgttgcaggctgctggggaaaagcacatgagaaaaatattaatagtatttaaaaactaagacaaaaggtagagaaatgcagcaattatagcagttttattttctgagtgattagacaatagatgactcattttcttgtttgtgcttttatatgttttgcagatcttttttgacagcatatattccttaggaaagaaaaaatttataacttcaaagtaacaggctagtgaggtaactcatttcctacatactgggtaatgtttgttcttcaatcaagaaaggaaaatattctcctttttaaaaaattttattctcattttggcttttcacaataaactagggaattaaaaaaatattttactatccactgtgaaaatttcagcagagacaagcatttgatggatactccacatagcccccactagactatatagtcattgtggaagcttaggtaacatgtgctcttctgaaataaatccaagaagactggaaccatctgaaccctatgtaaagtgagacagtgttaggcttgcataattcactcagcttttagcttttgaggagatacagttggaacaaatacaacaaatacttaatccagacttttcactttaactttcatggatttataccaatttgaggattgaagtcattcattatatcagcaccattacaactgtatataaaattaaagcttatgtttgttaaatctgtccaaatgtcatgtatagttaagaggggtacattattactttttcataaaatttggtcattgaggattacataccttaaggttagagttatttagcccaattacttggcttgaaataaacaagattgtattgccattttcagatggggaagctgaggaccaaagaggttatgagatgtacctgaagattgtgaattctggccgggtgcagtggctcacgcctgtaatcccagcactttgggaggccgaggcaggatcacctgaggtcaggagttggagaccagcttggccaacatggtgaaacctatctctactaaaaatataaaaattagccatggtggcacgcgcctgtaatcccagttactcgggaggccgaggcaggagaattccttgagcctgggaggcggaggttgcagtgaactgagatcgcaccactgcattctagcctggtaacagagcgagactccatctcaaaaaaaaaaaaaaaaagttttgaattctgattgtgacaatccaaacattttttattcgggttattgtcactcttaatttgcaggtgaaggggcagaatcaagataaactctcagatacagataaataccaaaaaaaagaaagaaagaaagaaaaaggaaatagctggtaagaagttgaagtgaaaagtaaagggccgggcatggtggctcacgcctgtaatcccagcacttttgggaggccgaggcgggtggatcacgaggtcaggagatcgagaccatcctggctaacacggtgaaaccctgtctctactaaaaatacaaaaaaattagccaggcgtggtggcgggcacctactacttgggaggctgaggcaggagaacggcatgaacccgggaggcagagcttgcagtgagctgagattgcaccactgcactccagcctgggccacagagcaagactccatctcaaaaaaaagaaaagtaaatagccccgattttcactagtggtatgcaaagtcttccagaactatatggtacactctgtaattgtttgaaggactataaaagcagttttaaaaaaccataaccccccccttttttaaattaatactttaagttctgggatacatgtgcagaacgtgcaggtttgttacataaggtacacatgtgccatagtggtttgctgcacccattaacccgtcgtctacattagatatttctcttactgttatccccccctttcccccaccccccaacaggccccggtatatgactccccaccctgtgtccatgtgttctcattcttcaactcccacttatgagtgagaacatgcagtgtttgaaaacctccctttttttaaaagatgggttattactgactgtgttactttcatccttacttagagggactgatttaatttcccaaatcaaattgctctgcatttcttacaactattgcatctactttcaattcagaaaattaagacattttaattttattctttttattactgccaaacaaagcattaggagtactcttaaaagaatcataaaatgtatagcaacactaacagaaggataaatatggtaaaagagctttaaaattgaagttagtgatagaaatagtaacagaagtagaagtagatgctagtgcaatgtcatttagacatttattagttttttgagacagggtctcactctgttacccaggctggagtgcagtggcaccatcatagctcacttcagcctcaacctgggctcaagcagtcctctcatctcagcctcctgagtagctaagactacaggtgtgtgccaccacacctgactgattgattgattatagagatggggcttcactatgtttcccaggctggtgtcaaactcctgggttcaagccatcctcccaccttggccccacctaagtgctgggattataggcatgaaccactgtgcccagcatgaaacactgtgcccaggcttgaagtaattcatgattgagggatattgaagaaggagtatactaaaacattgggttgcaatgtcaaaattatagatacttgtacttggatagaatgttccataaatgaaaatattcataatcacatgtagcataggagttatcaaaagggcactatggaaaaagtcatgattatatcatgaaattgttcaaacatatgagaagtagaaaaaaaatcatgtcagtactttcatcacccaggttcaacagttttcaagctcttgctacacgtcatctttttttcttttttccttaaattattttaaatgaacaacatgtcattttacccttactcagtttgggtctctaagaaatacaaaaataaccacggtgacatcatctttattttctggcacttcagtcaaaattaaagggaaatcttttggcaccatctatacacagctcataaattaaatttcccagattgatttacaaatgtctttttatagttgatttgctctaatcaggataaaaacaagatccactcattataaacagtggttaatctcatcagatgctttaaaaaaattatgaacatcttataatagtttgatacatttatcacaattagtgaaccaataccaattcattgttattagctaaagtctgtactttattctgattcctttagttcttacccagtgtcccttttctattccaggatcccatctaggatttcacatcacattttttttttttaattttattttaagttccaggatacaagtgtaggacatgcaggtttgctacataggtaaacgtatgccatggtggtttgctgcacctgacaatgcattacctagatattaagccttgtatgcattagctatttatcctgatgctctcccttcccccactcctccacccctagcacatcacatttagtcatcgtatctgctgaggctcctcttgcatgtggcagtttctcaaactttccttgtttttttgttttgttttgttttctaacctttttctaggatctcctttccttgtttctgatgaccttaacacttttgaagattactgttcagttattttgtaaactgtccctcagttgagatttgtgtgatatttttcttattagactcatgttattgattttgggaagaccatagaggtaaagtgtcattttcatcacatcatatcaaggattcatactatcaacatgacttactactgttgatattaaccttgatctcccaggtgaggaggtgttgtcaggtttctccactggaaagctgttctttttttctcctccatactatcctcttttggaaggaagtcattatgcaaggcccacacttaaggaatagagagttatatcagtatggacttgtggatatttattttatgacttgcattacaatctaatactactttttttcccctcagattgttccagctttggccattaggagctctttcagttgattcttatgtccctttgacataccccgatcatttttggttttgtgttttgtgtttgttttttaagcacttcctttctttttctggcactgtaagatactccaaattcatcttctatatgagatgctccaaattcatcttctttactctttgccctagccatataattagacatttcatctaggagccctggttcctactactggagaatggtattagaagccaagatctaggttctaagtgtgcttattgctactgggtgtgtcattggttcttgccctactgagccaggacaacagggagatatatatgtgtgtatactgtatatatacacatatctatacacatttctgtatataactatattatagaattcatgaaatgtcataaactcctcagagcatactgacgtctccagctctaatccattaccacatagaccacactagcctttatcttctcattccaacagtgagaaacttagctcccactatcagccatccatctacttcgttgttcaatttcggtatgatgtgtggtagttatatttgtcttctagggctgctataataaatgatcacaaacttagtggcttaaaacagaaattattcttttcacagttctagaaactagaattccaaaatcaagaggtaaaaaatatggaagaaaaagaaaacagaatagagcataagacagatgtaggacatggtcaaaagttctagcagaatatagttggagtcccagaaaaggaagagagagaaaatagaacagaagcagtaattgaaaaaatagttgacaaggacactaccaatctgatgtaaaacatcactctatggtttcaagaaagtcagcaaccccaagtagggcaaacagaaaactacaccaggccgggcaacagtggctcacgcctgtaatcccagcattgtgggaggccaagtcgggcagatcacttgagttcaggagttcgagaccagcctggccaacatggtgaaacccagtctctactaaaaatacaaaaattagccaggcatggtggcacatgcctataatcctagctactcaggaggctgaggcaggagaatcgcttgaacccaggaggcagaggctgcagtaagccaagatcatgccattgcactccagcctaggtgacagagtgagactctgtctcaaaaaaaaaaaaaaaaaaaaggcaggtgcagtggctcacgcctgtaatcccagcactttgggagtcagaggcgggcacatcacaaggtcaagagatcgagaccatcctggccaacatggtgaaaccccttctctactaaaaatataaaaattagctgggcatggtggcgtgtgcctgtagtcccagctactctggaggctgaggcaggagaattgcttgaaccctggaggcaggggttgcagtgagctgagatcgcactactacactccagcctgggtgacagagtgagactctgtctcaaaagaaagaaaaccacacctaagcacaccatagtcaaactgaaaatcaaagatgacaagaaaatcttaaaagcaatcaaagtaaaaaagacatattatagaatgacatgtaatgacactttttagttgctgacagaaaaaacctgccaatttagaaatctgattccggccaagttggtgtaaaagagatcagtttatcctccctgaaacaaacaagcaacctagacaaaatacatgacataatggatttctggcattggacatcaggcagcacaggaattgatttctgagagagggtaaacaaacaagatgagccctacaattacccagtttactggctgtagagagtttccagactgcagtgcaggaagggggaatccacgtggaacttagtggtctccctgagttgcggagataggagttggaagtctgaggaggccatggtgctagagttcacagctctctcctggaaaggagagctgcacagagagtgaactctaaagatctgtagtacctttcatgtcttcatcggagcttcgagtattgcacgcatgttaggaagctagaatagaaccccttgaaaggattagagggaataatccacacacagaggtggggatagttttttcttactagtcatagtaatttccgtaacattgggaagagtactcagaagggctttggcttggtagtgaggaaaattagtcctagactaaaagctgctccaatcccacctaacgcagcagaagaaaagcttaataatattgatatgaatttaaaaataagataaaattgacaatgtctgacatcagtgaggaccaattttcctcactaagtgggtcgagccgttcctgccacgagcttctagtgcatgttctattctgaaaaagatgagaattaaccagctacagtgcaagatgtcatgaaatgagctgtgttcagaatctaggcacgtgtgactttgacatatctatgaggtttaaaaaagaaatatcaggaatacaagtagaatatgtgccatatgaagaaatcatagcttatttatgtaacatttagtatcctcattagctgtttgactggttttagaattcagcatataatccttggctctttggaaataaaattgtataaatactaatatttattagatctgaatggtaggtacatgggtgttaaactagtctctgtgcttttgtgtgttttttttaattaaactagtgattttaattaaactagtgatttatgactgcctaggaatgtggccattcatatcataccttttcatccatttcttaggttcccagtctaagtgggtgactttccaagatagaggcagatcatttctccgtcaagtatagagagacacatctgctcctcctagagtgtccataagtatgaagaaaatagaaataacttagaagaggctgcaaaaacattaaagtttgaaatttttttgggtggggaataacattttgatggcaatttaatagtgattttcatgtgtgtcttgataatgtcaaaggtaataaccaggtgttttggcagggcaagttttggggatcagggaaacactcatatttgctaagtacctattatgccataaactgtactgaaagctttttatctgttacctcattttaatctgtagtcaatttatgtggtagacctcatttgcctgttatagatgaggacccagggttctcaggaaaaagcaatgtcttcaatctcactaatagtactgccagaataaactattataaagtatatcatacatgatttagattataagaagaaacatttactaatggtgaaaattctgagcattgtggttgcttacctagaaaaatttagtaacttctcttacttctctgaaaattttaagcttattttttatgatgatttaagaatggtcctgcccacaggcagaggagatagactgcatgagctctcaaagttttttctaagtcttatgatactataagttggtatttttatgatctcaaatgtgttcaatttatttccctttcttaaggtggataatattaatgcagctgtgatggatttgaaaaaaaagaagatccgcagtctaagtgaagaggtcaaaataggagcacatggaaaaccagtgatttttctccatcctaaagactgtggtggagtccttgtggaactggagcaagcttgatttatatttgcaagcaactaaattaattgacctgaaaaagcctatcaaatactatcaaaatgtactatgacattgagtccttcactgcttccatcatgtaaaagttcacagttaaagactgaattacagaaagattaaaatatatacatatataaa

SEQ ID NO: 12833 - DNA, 633 bp, Homo sapiens
gggcagcggcagcaaggagtgggagagccagagcaggatcttttttgacagcatatattccttaggaaagaaaaaatttataacttcaaagtaacaggctagtgagatggggaagctgaggaccaaagaggttatgagatgtacctgaagattgtgaattctggccgggtgcagtggctcacgcctgtaatcccagcactttgggaggccgaggcaggatcacctgaggttcccagtctaagtgggtgactttccaagatagaggcagatcatttctccgtcaagtatagagagacacatctgctcctcctagagtgtccataagtggataatattaatgcagctgtgatggatttgaaaaaaaagaagatccgcagtctaagtgaagaggtcaaaataggagcacatggaaaaccagtgatttttctccatcctaaagactgtggtggagtccttgtggaactggagcaagcttgatttatatttgcaagcaactaaattaattgacctgaaaaagcctatcaaatactatcaaaatgtactatgacattgagtccttcactgcttccatcatgtaaaagttcacagttaaagactgaattacagaaagattaaaatatatacatatataaa

SEQ ID NO: 12834 - DNA, 6034 bp, Homo sapiens
gtggcgggttgctttccaaaatggcgcgggtgctgaaggctgcagccgcgaatgccgtaggtgaataccgggcaccggcgaccttcgccatgggacagggagcgtgggaacggcggtcgggggcggaggaggcctcggcgtggccaaagcaccttgatctaatgtcctcccccgggggcgcgttccacagcagctgctgtcacttaggcagagggtgccttccagaagcgccaccgcttagtagcggggattgccttgtgcatgagtcccatttccatccgagagctgtgcgccttgggctctgcaccttccagtatgtgggcgggagagtcgagggaacttgcccggcaggtcaggcagggcagggacagaagtaaatagaagcggatcggtaagttattttaccgcgcaccaataaagagactggggagaaaccagaaaggagagcacgttccgtaaaaacaacaactactagtcggccgaactccaagcgtgaccagctttctgttgggaacactcaaaggtcagtggtgtaaagaatacaaaaggagtggtttttccacgtgcactaatatatttatcgcgtacacagataaaagcatgtggatttggaaactttcttgagttctctcccccttcattttttttaaaatatgtacatagaatcagttatgacagaaataactgtaataattgtcacgttttctgactcactttctcctctttttatcctttttttttttctcttcctccttttatgagagggcaagtatttcccttaatctgagattccctattaggaagaaggtgccaagtggtaatgccccagagttactccgggacattcgtgataaatccttctagcaccagagcccacattcttaaccgtaaggcataccttcctcttaggtgatacacaagataggaacgtaaaactataaataaatgaatatttgggaaaaggcatttttatgtctatttttagaactgcacactttaatgattgacagtttgggaaaaagtatgacttccaacaggtcatatacatactgcaagaactcaatacagataaaggtgcatgtttgttttgtacttacatacacatcttggcataaaggaaaaatgaagacagtgtattccaaagattgcctttgatttgtcctattaagatacttgaagcttaatgtctccacttgtgtgtgtgtgtgtgtggttgaatatacataaagtaaaatttacctttttttttttttttgagacagagtctcactctgtcgcccaggctggagtgcagtggcgttagctcactgcaacctctgcctcccaggttcaagccattcttccgcctcagcctcccgagtagctgggattacaggcacccggcaccacgcccggctaattttttgcatttttagtggagacgagatttcaccatgttggccaggctggtttggaactcctggcctcaggtgatctgcccacctcgtcttcccaaagtgctgggattacaggcgtgagcccgtctctactaaaaatacaaaaattagccgggcgtggtagcacacgcctgttatcccgggtactcgggaggctgaggcaggataatcgcttgaacccgggaggcggaggttggcgtgagccaagatcgcgccactgcactccagcctgggcaaccaaagcgaaactccgtctcagaaaaaaaaaaaaaattgctttttaagactgaataatattccattgtgtgtgtataccacattttgtttatccattcgtctcttgatagacatttgggttatccccaccttttggctattgtaatacagctatgaacgtgggtgtacaaatacttctgaattcccgcttctttgggggtgtgtatactcataagtggaattgctggattacatggtaattctatgttatggcccctcttttaaggaacataaaacttcgccgaaaaacaaaagcacagaaaaatcagagtgaacacgtagaaaagttctgaaaatggaaattgaacctgttaggtgggagacaagaatgaccaacttacatgactgcataggtttactttcattaatcgtctgtaaatgggctaacagaaatgtaatctgtttacttactgtaatgaataaaaaaaattgatcatagtttgaaacaagttgaagatatatatatggtgctgtgaaattaactggtcaaatgtttaagagaaaacttaccagactaacttgaaagcacttctaatgaatgactttctaaatacgtatgtttcctcaaaccagatattcagtgaaaattcagacttatgttcggccaggcgcggtgactcacgcctgtaatcccagcactttgggaggctgaggaaggtggatcacctgaggtcaggagttcaagaccagcctggccaacatggcaaaacccatctctactaaaaatacaaaaattaaccgggcgtggtggcgcgctcctgtaatcccggctactccggaggctgaggcaggagaattgcttgaacctgggaagcagaggttgcactgagccaagattgcgccattgcactccagcctgggctacagagccagactcgtttcaaaaaaacaaacaaacttattacgtgttctaaaattagattatgtgaaggtcgcacaactttgcaaagatgcaaagaaatgaattgtacacttcaaatgggtgaactttatggtatataaattttaagtctgtttaaaaactattaagagataaagctgttaaaaaacctattacaagtgattattcacttttatagtactttttatacaaatttaacatctaatgtctttaaatagtaagtactcttaatgcatttgagtatagatccttgcagctaaacctttatgtattcagggacagtgtctaaaaagtgtgatctgaaataaatgcaaaatctgaactgaaagaaatgcaatgttgtttttaagtcaggacactaaaagtgattaacgagaattgatattgaaaggaagattggaatgagagttaacatacacatccgattttgatcttttacttgtataccagcttcctgacatgtgaaaatagtttctttaatctgtattcatctttacatgcgttttttattaacacttctgtttttaaatatcttatgcatttatttgcacatggttttacactgtagtatattcatgcaaagcaacctttattggaataatcacaaattaaacattgcagaattcaaaataatgcaattctgctgcactattctgaaatgggaggcagagaaatctaaaactaaagagctgtgaattcctgctagttggagggcaacctgaaataaaaatagctttaaaaaggtagcttcagtgttggtaatcattttcataatttatgcatttattaaaacatcacattgtataccttaaagatacaccgtttctattagtcatcatacctcaagctggaaaaaagtttctacaagtcaaaggagaaatataataattaagagttcaattcacaacaaacttttcaggaacacatttttattaaatataaagctctgtctctttttaactcctttattcagtgttctctacccagtttgcttggtctacacaatttcacctttggatttttattgttggatcttttttttttttttttttttttttggtaaaatgtacataacaaaaccctttaaaaatgtacagtttaggctgggcacagtagctcatgcctgtgatcccggcactttgggaggccgaggtgggcggatcacgaggtcaggagttcgagaccagcctggccaacatggtgaaaccctgtctctactaaaaatacaaaaattagccgggtgcggtggcatgcgcctgtaataccaattattcaggagactgaggcaggagaatcgcttgaacccggaaggtggaggttgcagtgagccgagatcacactattgcactccagcctgggtgaaagagcaagagttcgtctcaaaataaataaataataaagtacagtttaacagtaattattacattcactgggttagtgcaactatcacatttgtctatttcaaaacattttcactggcctagtgctgtgactcacatctgtagtcccagcactttgggaagccaaggtcggaggatcgcttgagcccaggagcaacatgggcagcctgggcaacatggtgaaaccccatctctacaaaacgtacaaaaattagccaggcatggtggctcatgcctatggttccagctactcaggaggctgaggtggaaggtattctttttttgcaatttagtttcaattgtacatttatgtatatgtgtactcggttgtaatccacttggatttcatgataacaatgaaacttactaagtttctaacttggtttgttgtgaatattagatagttggtgtaaaaaaataaatacagtgccagacagtaggtgcacagtaaattcaggccattcttgttgttaatgacatgcaatgactgtttgctaaatgaatggaatgcagagttatctgtggagatcaagaaactatctgatgaggacacagcgacagtgaattttaaaaatgctaaaaactgactggaatggtggcttacacctataatcccagcactttgggagaccgaggtgggtggatcacctgaggtcaggagtttgagaccagcctgaccaacatggtgaaaccccatctctactaaaaatgcaaaaattagggtgggcacagtggctcacatctctaatcctatcactttgggaggccgaggtgggtggatcacctgaggtcaggagttcgagaccagcctggccaatgaggcgaaaccccatctctactaaaaatacaacattagccgggcatgtggcaggtgcctgtaattccagctactcgggaggctgaggcaggagaatcgcttgaacctggggggcggaggttgcagtgagcccagatcgcgccacttcactccattctgggcgaaatagtgagactccgtctcaaaaaaaaaaaaaaatatatatatatatatatatatatttatatatatacacacacatacacacacacacaaattagctgggtatggtgacaggcacctgtaatcccagctacttgggaggctgaggccagtgaatcacttgaacccaggaggcagaggttgcagtgagctgagatcgcactgttgcactccagcactccggcctgggcaacagagcattaaagagtactgtatgtactcttttaatgtatatttatacctttaatgaacttattacaaaatataagacaaaaaattgggtacaggtagagaaattgcttgctcttattaaatatatgttgtttcattgtgaaatgcagagaatagcaagtaatgcttaatatgccactatttaagtgttaccagtaaatatgaattgttatgaaaaaatgttatcctgtgttttaaatctaactgcagctcagaattagcttttttattccagtcagttatttgaatgggcagagcagagtaattctgatgtaagtttttccatttatctcctggtttcatttcaataattaaaaagaacagatatataaataatgaatttttgcatgcattatttgtttagtttttaaaattcaatttagaagtgcgttaattctcaaaagaaggatatcaatggctgttcaatttttcagggcttttttccagacttcaagctcccattccaacagtaagagcttcttccacatcacagcccttggatcaagtgacaggttctgtgtggaacctgggtcgactcaaccatgtagccatagcagtgccagatttggaaaaggctgcagcattttataagaatattctgggggcccaggtaagtgaagcggtccctcttcctgaacatggagtatctgttgtttttgtcaacctgggaaataccaagatggaactgcttcatccattgggacgtgacagtccaattgcaggttttctgcagaaaaacaaggctggaggaatgcatcacatctgcatcgag

SEQ ID NO: 12835 - DNA, 499 bp, Homo sapiens
gtggcgggttgctttccaaaatggcgcgggtgctgaaggctgcagccgcgaatgccgtagactggggagaaaccagaaaggagagcacgttccgtaaaaacaacaactactagtcggccgaactccaagcgtgaccagctttctgttgggaacactcaaagggcttttttccagacttcaagctcccattccaacagtaagagcttcttccacatcacagcccttggatcaagtgacaggttctgtgtggaacctgggtcgactcaaccatgtagccatagcagtgccagatttggaaaaggctgcagcattttataagaatattctgggggcccaggtaagtgaagcggtccctcttcctgaacatggagtatctgttgtttttgtcaacctgggaaataccaagatggaactgcttcatccattgggacgtgacagtccaattgcaggttttctgcagaaaaacaaggctggaggaatgcatcacatctgcatcgag

SEQ ID NO: 12836 - DNA, 6009 bp, Homo sapiens
gcgggtgctgaaggctgcagccgcgaatgccgtaggtgaataccgggcaccggcgaccttcgccatgggacagggagcgtgggaacggcggtcgggggcggaggaggcctcggcgtggccaaagcaccttgatctaatgtcctcccccgggggcgcgttccacagcagctgctgtcacttaggcagagggtgccttccagaagcgccaccgcttagtagcggggattgccttgtgcatgagtcccatttccatccgagagctgtgcgccttgggctctgcaccttccagtatgtgggcgggagagtcgagggaacttgcccggcaggtcaggcagggcagggacagaagtaaatagaagcggatcggtaagttattttaccgcgcaccaataaagagactggggagaaaccagaaaggagagcacgttccgtaaaaacaacaactactagtcggccgaactccaagcgtgaccagctttctgttgggaacactcaaaggtcagtggtgtaaagaatacaaaaggagtggtttttccacgtgcactaatatatttatcgcgtacacagataaaagcatgtggatttggaaactttcttgagttctctcccccttcattttttttaaaatatgtacatagaatcagttatgacagaaataactgtaataattgtcacgttttctgactcactttctcctctttttatcctttttttttttctcttcctccttttatgagagggcaagtatttcccttaatctgagattccctattaggaagaaggtgccaagtggtaatgccccagagttactccgggacattcgtgataaatccttctagcaccagagcccacattcttaaccgtaaggcataccttcctcttaggtgatacacaagataggaacgtaaaactataaataaatgaatatttgggaaaaggcatttttatgtctatttttagaactgcacactttaatgattgacagtttgggaaaaagtatgacttccaacaggtcatatacatactgcaagaactcaatacagataaaggtgcatgtttgttttgtacttacatacacatcttggcataaaggaaaaatgaagacagtgtattccaaagattgcctttgatttgtcctattaagatacttgaagcttaatgtctccacttgtgtgtgtgtgtgtgtggttgaatatacataaagtaaaatttacctttttttttttttttgagacagagtctcactctgtcgcccaggctggagtgcagtggcgttagctcactgcaacctctgcctcccaggttcaagccattcttccgcctcagcctcccgagtagctgggattacaggcacccggcaccacgcccggctaattttttgcatttttagtggagacgagatttcaccatgttggccaggctggtttggaactcctggcctcaggtgatctgcccacctcgtcttcccaaagtgctgggattacaggcgtgagcccgtctctactaaaaatacaaaaattagccgggcgtggtagcacacgcctgttatcccgggtactcgggaggctgaggcaggataatcgcttgaacccgggaggcggaggttggcgtgagccaagatcgcgccactgcactccagcctgggcaaccaaagcgaaactccgtctcagaaaaaaaaaaaaaattgctttttaagactgaataatattccattgtgtgtgtataccacattttgtttatccattcgtctcttgatagacatttgggttatccccaccttttggctattgtaatacagctatgaacgtgggtgtacaaatacttctgaattcccgcttctttgggggtgtgtatactcataagtggaattgctggattacatggtaattctatgttatggcccctcttttaaggaacataaaacttcgccgaaaaacaaaagcacagaaaaatcagagtgaacacgtagaaaagttctgaaaatggaaattgaacctgttaggtgggagacaagaatgaccaacttacatgactgcataggtttactttcattaatcgtctgtaaatgggctaacagaaatgtaatctgtttacttactgtaatgaataaaaaaaattgatcatagtttgaaacaagttgaagatatatatatggtgctgtgaaattaactggtcaaatgtttaagagaaaacttaccagactaacttgaaagcacttctaatgaatgactttctaaatacgtatgtttcctcaaaccagatattcagtgaaaattcagacttatgttcggccaggcgcggtgactcacgcctgtaatcccagcactttgggaggctgaggaaggtggatcacctgaggtcaggagttcaagaccagcctggccaacatggcaaaacccatctctactaaaaatacaaaaattaaccgggcgtggtggcgcgctcctgtaatcccggctactccggaggctgaggcaggagaattgcttgaacctgggaagcagaggttgcactgagccaagattgcgccattgcactccagcctgggctacagagccagactcgtttcaaaaaaacaaacaaacttattacgtgttctaaaattagattatgtgaaggtcgcacaactttgcaaagatgcaaagaaatgaattgtacacttcaaatgggtgaactttatggtatataaattttaagtctgtttaaaaactattaagagataaagctgttaaaaaacctattacaagtgattattcacttttatagtactttttatacaaatttaacatctaatgtctttaaatagtaagtactcttaatgcatttgagtatagatccttgcagctaaacctttatgtattcagggacagtgtctaaaaagtgtgatctgaaataaatgcaaaatctgaactgaaagaaatgcaatgttgtttttaagtcaggacactaaaagtgattaacgagaattgatattgaaaggaagattggaatgagagttaacatacacatccgattttgatcttttacttgtataccagcttcctgacatgtgaaaatagtttctttaatctgtattcatctttacatgcgttttttattaacacttctgtttttaaatatcttatgcatttatttgcacatggttttacactgtagtatattcatgcaaagcaacctttattggaataatcacaaattaaacattgcagaattcaaaataatgcaattctgctgcactattctgaaatgggaggcagagaaatctaaaactaaagagctgtgaattcctgctagttggagggcaacctgaaataaaaatagctttaaaaaggtagcttcagtgttggtaatcattttcataatttatgcatttattaaaacatcacattgtataccttaaagatacaccgtttctattagtcatcatacctcaagctggaaaaaagtttctacaagtcaaaggagaaatataataattaagagttcaattcacaacaaacttttcaggaacacatttttattaaatataaagctctgtctctttttaactcctttattcagtgttctctacccagtttgcttggtctacacaatttcacctttggatttttattgttggatcttttttttttttttttttttttttggtaaaatgtacataacaaaaccctttaaaaatgtacagtttaggctgggcacagtagctcatgcctgtgatcccggcactttgggaggccgaggtgggcggatcacgaggtcaggagttcgagaccagcctggccaacatggtgaaaccctgtctctactaaaaatacaaaaattagccgggtgcggtggcatgcgcctgtaataccaattattcaggagactgaggcaggagaatcgcttgaacccggaaggtggaggttgcagtgagccgagatcacactattgcactccagcctgggtgaaagagcaagagttcgtctcaaaataaataaataataaagtacagtttaacagtaattattacattcactgggttagtgcaactatcacatttgtctatttcaaaacattttcactggcctagtgctgtgactcacatctgtagtcccagcactttgggaagccaaggtcggaggatcgcttgagcccaggagcaacatgggcagcctgggcaacatggtgaaaccccatctctacaaaacgtacaaaaattagccaggcatggtggctcatgcctatggttccagctactcaggaggctgaggtggaaggtattctttttttgcaatttagtttcaattgtacatttatgtatatgtgtactcggttgtaatccacttggatttcatgataacaatgaaacttactaagtttctaacttggtttgttgtgaatattagatagttggtgtaaaaaaataaatacagtgccagacagtaggtgcacagtaaattcaggccattcttgttgttaatgacatgcaatgactgtttgctaaatgaatggaatgcagagttatctgtggagatcaagaaactatctgatgaggacacagcgacagtgaattttaaaaatgctaaaaactgactggaatggtggcttacacctataatcccagcactttgggagaccgaggtgggtggatcacctgaggtcaggagtttgagaccagcctgaccaacatggtgaaaccccatctctactaaaaatgcaaaaattagggtgggcacagtggctcacatctctaatcctatcactttgggaggccgaggtgggtggatcacctgaggtcaggagttcgagaccagcctggccaatgaggcgaaaccccatctctactaaaaatacaacattagccgggcatgtggcaggtgcctgtaattccagctactcgggaggctgaggcaggagaatcgcttgaacctggggggcggaggttgcagtgagcccagatcgcgccacttcactccattctgggcgaaatagtgagactccgtctcaaaaaaaaaaaaaaatatatatatatatatatatatatttatatatatacacacacatacacacacacacaaattagctgggtatggtgacaggcacctgtaatcccagctacttgggaggctgaggccagtgaatcacttgaacccaggaggcagaggttgcagtgagctgagatcgcactgttgcactccagcactccggcctgggcaacagagcattaaagagtactgtatgtactcttttaatgtatatttatacctttaatgaacttattacaaaatataagacaaaaaattgggtacaggtagagaaattgcttgctcttattaaatatatgttgtttcattgtgaaatgcagagaatagcaagtaatgcttaatatgccactatttaagtgttaccagtaaatatgaattgttatgaaaaaatgttatcctgtgttttaaatctaactgcagctcagaattagcttttttattccagtcagttatttgaatgggcagagcagagtaattctgatgtaagtttttccatttatctcctggtttcatttcaataattaaaaagaacagatatataaataatgaatttttgcatgcattatttgtttagtttttaaaattcaatttagaagtgcgttaattctcaaaagaaggatatcaatggctgttcaatttttcagggcttttttccagacttcaagctcccattccaacagtaagagcttcttccacatcacagcccttggatcaagtgacaggttctgtgtggaacctgggtcgactcaaccatgtagccatagcagtgccagatttggaaaaggctgcagcattttataagaatattctgggggcccaggtaagtgaagcggtccctcttcctgaacatggagtatctgttgtttttgtcaacctgggaaataccaagatggaactgcttcatccattgggacgtgacagtccaattgcaggttttctgcagaaaaacaaggctggaggaatgcatcacatctgcatcgag

SEQ ID NO: 12837 - DNA, 836 bp, Homo sapiens
gcgggtgctgaaggctgcagccgcgaatgccgtaggtgaataccgggcaccggcgaccttcgccatgggacagggagcgtgggaacggcggtcgggggcggaggaggcctcggcgtggccaaagcaccttgatctaatgtcctcccccgggggcgcgttccacagcagctgctgtcacttaggcagagggtgccttccagaagcgccaccgcttagtagcggggattgccttgtgcatgagtcccatttccatccgagagctgtgcgccttgggctctgcaccttccagtatgtgggcgggagagtcgagggaacttgcccggcaggtcaggcagggcagggacagaagtaaatagaagcggatcggtaagttattttaccgcgcaccaataaagagactggggagaaaccagaaaggagagcacgttccgtaaaaacaacaactactagtcggccgaactccaagcgtgaccagctttctgttgggaacactcaaagggcttttttccagacttcaagctcccattccaacagtaagagcttcttccacatcacagcccttggatcaagtgacaggttctgtgtggaacctgggtcgactcaaccatgtagccatagcagtgccagatttggaaaaggctgcagcattttataagaatattctgggggcccaggtaagtgaagcggtccctcttcctgaacatggagtatctgttgtttttgtcaacctgggaaataccaagatggaactgcttcatccattgggacgtgacagtccaattgcaggttttctgcagaaaaacaaggctggaggaatgcatcacatctgcatcgag

SEQ ID NO: 12838 - DNA, 8187 bp, Homo sapiens
atacgtgcttaatcctggtgcagggggcgagcatggccgctccgcgaggtgagccattggctggggtgtcggcgagtgtgttcgtggagcgcgtcctggggacgactcccggcattatcggccaggttgagtccgctcctggcattccgcggaaagatgggtgggtgccgggcagaggtgtggccacctgcgatggggattgacctccgaggggagggggcccttctagacgtcgtgccgtgggataggtaccttctgctccctccccgccaccctgcctcagatcagcacaaggtccttactgctgcccatctgacagttgggaacatcgaggcctgcagcggaggggggtctcatccaacagcctacaaaacccttatttgactctgtccccagtgagcacccccagctcttgcctggtttcccgggacactagggtggggcctgaggagtggagtggcagctgaccctgtctgtgcccctagtattcccactttcctgtgcggtgcagcagtatgcctgggggaagatgggttccaacagcgaagtggcgcggctgttggccagcagtgatccactggcccagatcgcagaggacaagccttatgcagaggtgagccccgggctgtatttcagcccactttacccgcaggtcaggagaaagggcctgaggcaagtcataagaatcagctgggaagggtgaggcagcaaggagggaggagacccacttggctcttcaggctaatggactagatagtgttatcaaaaagaagagaggttttgtcataataggctgggatttccagcactctccttcccccaaccactcttagcacttagtgaattttaattcagccctctttgacaattaagtttttttactttgactatttttttgcatttttattaacctaaaatatttctcctgcctatttagtggagaaaaagccaaagcataggaaggctttcgcctctgcttctgaaactggaagatgtatgttaacccctgaaagaatcatttaagagtcatagtttttctgctaccttgacagtgcagatgtcattctcctctttggacagacaaagaagatacatctaaagaagggaaataactagtccaagtcttcatagatggctagaggccgagtctggacaagggcctgggtctactgcctccctgtatgtccatgatggcatgaacatttgtatccagacctgggaggcctttcccaggactcagttgccctgtggggagcacagcataacggattgggacaggccaactcagggtggcaggtttcttcccccttcccctcccaagtttcctgtctttccagttgtggatggggactcacccccgaggggatgccaagatccttgacaaccgcatctcacagaagaccctaagccagtggattgctgagaaccaggacagcttgggctcaaaggtcaaggacacctttaatggcaacctgcccttcctcttcaaagtgctctcagttgaaacacccctgtccatccaggcacaccctaacaaggtaaaggacagagtgcggtgcagaggtcagggtacagaagggcttatgctaaggccctcccgtgacttttactgccacttttaccccacccatgccaggctcctgcccaaggccaaatccaggctgacaactcccaatttagctctgcaaagccagatggtagtgacacatgcagcaactaagtctaagcaaacagctcaccggcctgtgccaggggagtttctctaagctcattccaaggggcttgttcctggtcttccctcatccaacccatgtctattcatatctgccatttactcatctgctttcaggaagagttcaacttgcaaggcagggcaggtaccctcagccccacccccatggagtctccctacacaagccggagtcccatcctaagcaactgtggatcaaaactcctttttttttttttctgagacttgagtcttgctctgtcgcccaggctggagtgcagtggcgcgatctcggctcactgcaacctcctcctcccaattcaagcaattcttctgcttcagcctcgcaaatagctgggactacaggcacgcgccaccacacccagctaatttttgtatttttagtagagatggggtttcaccatgttggccaggctggtcttgaactcctgccctcgtaatccgctcgcctcagcctcccaaagtgctgggattacaggcgtgagccaccatgcccagccaaaactccttatttctagatacacaaagtaagacccagagaagggagggatttaccaaagccacacagcttgttagtgtcagagcttggtctggtatttgggtttcctgattcacaggccaagcctcttaaagtctgccccagcttttccctgatttgccccggggttgcccctgatttgcccctgccctgggttggctgagccccaagtttctgcaacatgctttgactgggctccttgccagaggtaggtagtcactgccatcctgcaactggggagggtggacagcaggggctaggtggcactggtgtacctgctaggtaatggctgtaccctcaccatcctcctcttcccctggccaccccacaggagctggcagagaagctgcacctccaggctccgcagcactaccccgatgccaaccacaagccagagatggccattgccctcacccccttccagggcttgtgtggcttccggccagttgaggagattgtaacctttctaaagagtaagttgggcagaatgctgaaggcatgcgtactgggccagggatacctggggaaccaagatgataggaacagtggctgagaacgggtcacatgtcacaggaactgaagggcctcatgaagcagtttttggagccagtgagccaggccagtgagaccaggctcaggtgtggtagtcaagggctggtggtgagtgattggtttccactgcaaagtttacttagcattgccggctctttggttagggctgggatggaaaggtgtcctccaactccccacttgtgtgggttccatcttaccattcctgatatgggccctgggccttgccttcctgtagaggtgcctgagtttcagttcctgattggagatgaggcagcaacacacctgaagcagaccatgagccatgactcccaggctgtggcctcctctctgcagagctgtttctcccacctgatgaagagtgagaagaaggtggtggtggaacagctcaacctgttggtgaagcggatctcccagcaaggtggacacagttatattcctggttgggtgcaatgctctggcctgggcttcccagcagacaccagactctggggacagttctcaacccccttgcccaagtggaacactaaaaggggccccacttagatgacctgttggcaacttagcattgcttgcctagtctttgtggagcagggcccttcttagttgagtgctgcttcccaactggtcatcttctccagatggttggaggcagactggcatagaggactcttaggatgccttccacctaggcattctgagattttccctagccctgcagctgccctccatggatggacttgtatctcggggctaaagaggcaggaaggggacacgagcatcctccctctcctggaaaggactgatgcctccagcactcagtcatttgatctttcctttaccttctgtgtgcccaaccttgtgctaagaagagttcaggaaatgactgtgatgggtgtggtcactgtcaccctaaaggtggggagtcaacacaagcagtaagaaacccaaaacagaacagactcccagcaatgagcttatgtggtgcaggcgatgaggtctcagcttcttagcctggcagccacaaccccttctctaggtggcccagagctctctttttattttacctctacaggtttcccattacctttgagccttagggcattatttatttgacccaagcatatttttttctgttcagtgtgtgtgtgtgtgtgtgtgtgtgtgtgtgtgtgtgtgtgtgtgtgtgtgtgtgtgtgtgtgtgtgtggtctctttctgttgccccaggctggagtgcagtggtgcgatcttggctcactgcagcctctgcctcccgggttcaagcaattctcctgcttcagcctcctgagtagctgggattacaggcatgtgccaccacatctggttaagtttttatattttagtagagacggagtttcaccatgttgcctaggcgggtctcgaactcctgagctcaggcaattcacctgcctcagcctcccaaagtgctaggattacaggtgtgagccaccacgccaggccccttgcctcactttaaagaagcctggctgggcacggtggctcacacctgtaatcctaacactttgggaggttgaggcggccgtatcacttgaggtcaggaattcaagaccagcctggccaacatggtggaaccccatctctactaaagatacaaaaattagccaggcgaggcagaggttgtggtgagcctagatcatgccactgcacttcagccggggcaatagagtgagactctgtctcaaaaaaaaaaaaaaaatgctgggcatggtggtgtgtgcctgtaatcccagctactcaggaggctgaggcgcaagaatcacttgaacccaggaggtggaggttgcagtgagtctagattgcaccactgcacttcagcctgggagacagagcaagactccgattcggaaaaaaaaaaaagaaaaagaaaaagaaaaaaaatttaaaaattaaagaagtccacccttgccactctacccaggctgagctcattttcccttgtcgtttccaggacacattttggccctcagcgcattctgcctcatgctctctggagcagaccgagagagattctctgagacatagaactttcttttttttttttgagacggagtctcgctgtgtcacccaggctggagtgcagtggtgcaatctcgatcactgcaacctccgcctcccgggttcaagcgattctcctgtctcagcctcccgagtagctgggattacaggcacgtgccaccacacctggctttttttttttttttttttgtatttttagtagagatggggtttcaccatgttggtcaaactggtctcgaactcctgacctcgtgatccgcctgccttggcctcccaaagtcctgagatgacaggtgtgagccaccgcgcccagctgagacacagaactttcagtgctaaaaactagaaagtcgccgggtgcggtggctcacacctgtattcccagcactttgggaggcctaggtgggaggatcccttgagttcaggagttcgagaccagcctgggcaatatagcgaccccctctctctgcaaataataaaaaacttagccgggcatggtggcatgcacgtgtggttctcgctactcaggaggctgaggtaggaggattgcttggtcctggacagttgaggctgcagtgaggtatgatcgtgccactgcactccagcctgggtgacagcgagaccccgtctcaaaaaaaaaaaagggaaagctcgggcatgttggttacccttcatgaaactcttttgcgttatctccctagattttgagctccaagggcagtggttctcatacaggggacatttggctgttgtctggagccattttttgattgtcaaaacccagataggggttgctagtggcatcttgtgggtggaggccagggaagctgctacacatccatcagtacacaggacagcccccacaataaagaattacctagcccaaatgtcagtagcgccaaggctgagaaatcccatcctgaaaggaccatactctagctcttttagtggctagtatagtcctgggcatatgaatagtcaagatatgatgaaagatggtatttgtatggactggagtatcaagcaaggctcgacccccaaagggctggaggcgtggccagaaggacagggccactttggcttctggattcctgtggcagggaccttttcctaggactccctggccaatgtggggctatgaacagcactgagtatccccctaagtgaccttggggtgctctgtgaccctcagcggctgccggaaacaacatggaggacatctttggggagcttttgctacagctgcaccagcagtacccaggtgatatcggctgctttgccatctacttcctgaacctgcttaccctgaagcctggggaggccatgtttctggaggccaacgtaccccatgcctacctgaaaggaggtgagccacatttcagcagtgagccccactgccatccctgctgggccctgtttccctatctggacaaaggaaggagaagggtggtcaaggagacccccaaggaccttgcagctctgacctctgagggttcctgggctcagcaagcaacagctggtagggatgatgaatgcatttagcattgaacacgccttgaatcctgacaccaaccctgtgatgccatgctactctgattttaagtcctgccagtcagtgtgggaaccacaatttgaacgcaggctatattggatcaaagctgttgttctgtcacagcctttgtatgtctgtcctacctaccagggatttttacactaaaatatgcatgttgccatggaaggatgccacctttcgactgttggctgcttatccacacatgcctcatgcacaggattctggggtagaagtgggagactacagagttggggctccccaacccccaggggttaacatgactcccctctgacaataatgggtgacctgtcacctgtttttggtatttgatatcttaaccccattctcccagagaatacaattcatggaaatttttacctaacttggcatggggttcatggagctcaggttaggaggcccagaactggagagctaaggcatacttcatcagcttagcacatgacgactgtctctccagactgcgtggagtgcatggcgtgttcagacaacacagttcgtgctggcctgacacccaagttcattgatgtgccaaccctgtgtgaaatgctcagctatacccctagctccagcaaggacaggctctttctcccaacacggagtcaggaagacccctacctctcaatctatgacccccctgtaccagacttcaccattatgaagacggaggtgagtgaggggctatgatgggtgtccttcgtgtgccatgaaaatctctggcaagggtcacgatgtggaggacacctggggctgggtttcctgtcaagcccacttggcggagggtggccccagggcctgcccattccttcctgtaccagggaccaggcctctatgctgactgagcctgggttgtgcgagaaggtggcagagctctccctcgtgccctggggactgtcctgggcccatgagctgatgagagcagagtctgagctgcactgccttatcatttcttcctgcccaggtccctggctctgtcactgaatacaaggtcttggcactggactctgccagcatcctcctgatggtacaggggacagtaatagccagcacacccacaacccagacaccaatccctctgcaacgtggtggcgtgctcttcattggggccaatgagagtgtctcactgaagcttactgagccgaaggacctgctgatattccgtgcctgctgtctgctgtaaaggctgcagcctccccagctctcctctgccagccaccctaaattccagccaacctcacctcctcgggcccagctcaagcccccttccttgctctggaccccttaggtataccctggaagagctggggtgggggaggagggagcgtgaaggtagtgactcctgaacacacccaggtggaaccatctttggggaggagaggcccgtgtgaggggtctgatactccctttgtcttccctctctactcctcgctacacctgagccaggctcttgccaactctgttccagcctatggctttaggctagctgttaaatatgtgacccagcattagctcagcatctgtcagagcaagagaccaggtaatttctaagaacagggttctagcgatgggactgcccatttcctcagctgcagaggaggaaagggaaagggtaggcctgtagactaacgctgtttacacccttgttctgtcaaagcaattaaagatcacttgtgttgag

SEQ ID NO: 12839 - DNA, 1619 bp, Homo sapiens
atacgtgcttaatcctggtgcagggggcgagcatggccgctccgcgagtattcccactttcctgtgcggtgcagcagtatgcctgggggaagatgggttccaacagcgaagtggcgcggctgttggccagcagtgatccactggcccagatcgcagaggacaagccttatgcagagttgtggatggggactcacccccgaggggatgccaagatccttgacaaccgcatctcacagaagaccctaagccagtggattgctgagaaccaggacagcttgggctcaaaggtcaaggacacctttaatggcaacctgcccttcctcttcaaagtgctctcagttgaaacacccctgtccatccaggcacaccctaacaaggagctggcagagaagctgcacctccaggctccgcagcactaccccgatgccaaccacaagccagagatggccattgccctcacccccttccagggcttgtgtggcttccggccagttgaggagattgtaacctttctaaagacggctgccggaaacaacatggaggacatctttggggagcttttgctacagctgcaccagcagtacccaggtgatatcggctgctttgccatctacttcctgaacctgcttaccctgaagcctggggaggccatgtttctggaggccaacgtaccccatgcctacctgaaaggagactgcgtggagtgcatggcgtgttcagacaacacagttcgtgctggcctgacacccaagttcattgatgtgccaaccctgtgtgaaatgctcagctatacccctagctccagcaaggacaggctctttctcccaacacggagtcaggaagacccctacctctcaatctatgacccccctgtaccagacttcaccattatgaagacggaggtccctggctctgtcactgaatacaaggtcttggcactggactctgccagcatcctcctgatggtacaggggacagtaatagccagcacacccacaacccagacaccaatccctctgcaacgtggtggcgtgctcttcattggggccaatgagagtgtctcactgaagcttactgagccgaaggacctgctgatattccgtgcctgctgtctgctgtaaaggctgcagcctccccagctctcctctgccagccaccctaaattccagccaacctcacctcctcgggcccagctcaagcccccttccttgctctggaccccttaggtataccctggaagagctggggtgggggaggagggagcgtgaaggtagtgactcctgaacacacccaggtggaaccatctttggggaggagaggcccgtgtgaggggtctgatactccctttgtcttccctctctactcctcgctacacctgagccaggctcttgccaactctgttccagcctatggctttaggctagctgttaaatatgtgacccagcattagctcagcatctgtcagagcaagagaccaggtaatttctaagaacagggttctagcgatgggactgcccatttcctcagctgcagaggaggaaagggaaagggtaggcctgtagactaacgctgtttacacccttgttctgtcaaagcaattaaagatcacttgtgttgag

SEQ ID NO: 12840 - DNA, 12178 bp, Homo sapiens
atacgtgcttaatcctggtgcagggggcgagcatggccgctccgcgaggtgagccattggctggggtgtcggcgagtgtgttcgtggagcgcgtcctggggacgactcccggcattatcggccaggttgagtccgctcctggcattccgcggaaagatgggtgggtgccgggcagaggtgtggccacctgcgatggggattgacctccgaggggagggggcccttctagacgtcgtgccgtgggataggtaccttctgctccctccccgccaccctgcctcagatcagcacaaggtccttactgctgcccatctgacagttgggaacatcgaggcctgcagcggaggggggtctcatccaacagcctacaaaacccttatttgactctgtccccagtgagcacccccagctcttgcctggtttcccgggacactagggtggggcctgaggagtggagtggcagctgaccctgtctgtgcccctagtattcccactttcctgtgcggtgcagcagtatgcctgggggaagatgggttccaacagcgaagtggcgcggctgttggccagcagtgatccactggcccagatcgcagaggacaagccttatgcagaggtgagccccgggctgtatttcagcccactttacccgcaggtcaggagaaagggcctgaggcaagtcataagaatcagctgggaagggtgaggcagcaaggagggaggagacccacttggctcttcaggctaatggactagatagtgttatcaaaaagaagagaggttttgtcataataggctgggatttccagcactctccttcccccaaccactcttagcacttagtgaattttaattcagccctctttgacaattaagtttttttactttgactatttttttgcatttttattaacctaaaatatttctcctgcctatttagtggagaaaaagccaaagcataggaaggctttcgcctctgcttctgaaactggaagatgtatgttaacccctgaaagaatcatttaagagtcatagtttttctgctaccttgacagtgcagatgtcattctcctctttggacagacaaagaagatacatctaaagaagggaaataactagtccaagtcttcatagatggctagaggccgagtctggacaagggcctgggtctactgcctccctgtatgtccatgatggcatgaacatttgtatccagacctgggaggcctttcccaggactcagttgccctgtggggagcacagcataacggattgggacaggccaactcagggtggcaggtttcttcccccttcccctcccaagtttcctgtctttccagttgtggatggggactcacccccgaggggatgccaagatccttgacaaccgcatctcacagaagaccctaagccagtggattgctgagaaccaggacagcttgggctcaaaggtcaaggacacctttaatggcaacctgcccttcctcttcaaagtgctctcagttgaaacacccctgtccatccaggcacaccctaacaaggtaaaggacagagtgcggtgcagaggtcagggtacagaagggcttatgctaaggccctcccgtgacttttactgccacttttaccccacccatgccaggctcctgcccaaggccaaatccaggctgacaactcccaatttagctctgcaaagccagatggtagtgacacatgcagcaactaagtctaagcaaacagctcaccggcctgtgccaggggagtttctctaagctcattccaaggggcttgttcctggtcttccctcatccaacccatgtctattcatatctgccatttactcatctgctttcaggaagagttcaacttgcaaggcagggcaggtaccctcagccccacccccatggagtctccctacacaagccggagtcccatcctaagcaactgtggatcaaaactcctttttttttttttctgagacttgagtcttgctctgtcgcccaggctggagtgcagtggcgcgatctcggctcactgcaacctcctcctcccaattcaagcaattcttctgcttcagcctcgcaaatagctgggactacaggcacgcgccaccacacccagctaatttttgtatttttagtagagatggggtttcaccatgttggccaggctggtcttgaactcctgccctcgtaatccgctcgcctcagcctcccaaagtgctgggattacaggcgtgagccaccatgcccagccaaaactccttatttctagatacacaaagtaagacccagagaagggagggatttaccaaagccacacagcttgttagtgtcagagcttggtctggtatttgggtttcctgattcacaggccaagcctcttaaagtctgccccagcttttccctgatttgccccggggttgcccctgatttgcccctgccctgggttggctgagccccaagtttctgcaacatgctttgactgggctccttgccagaggtaggtagtcactgccatcctgcaactggggagggtggacagcaggggctaggtggcactggtgtacctgctaggtaatggctgtaccctcaccatcctcctcttcccctggccaccccacaggagctggcagagaagctgcacctccaggctccgcagcactaccccgatgccaaccacaagccagagatggccattgccctcacccccttccagggcttgtgtggcttccggccagttgaggagattgtaacctttctaaagagtaagttgggcagaatgctgaaggcatgcgtactgggccagggatacctggggaaccaagatgataggaacagtggctgagaacgggtcacatgtcacaggaactgaagggcctcatgaagcagtttttggagccagtgagccaggccagtgagaccaggctcaggtgtggtagtcaagggctggtggtgagtgattggtttccactgcaaagtttacttagcattgccggctctttggttagggctgggatggaaaggtgtcctccaactccccacttgtgtgggttccatcttaccattcctgatatgggccctgggccttgccttcctgtagaggtgcctgagtttcagttcctgattggagatgaggcagcaacacacctgaagcagaccatgagccatgactcccaggctgtggcctcctctctgcagagctgtttctcccacctgatgaagagtgagaagaaggtggtggtggaacagctcaacctgttggtgaagcggatctcccagcaaggtggacacagttatattcctggttgggtgcaatgctctggcctgggcttcccagcagacaccagactctggggacagttctcaacccccttgcccaagtggaacactaaaaggggccccacttagatgacctgttggcaacttagcattgcttgcctagtctttgtggagcagggcccttcttagttgagtgctgcttcccaactggtcatcttctccagatggttggaggcagactggcatagaggactcttaggatgccttccacctaggcattctgagattttccctagccctgcagctgccctccatggatggacttgtatctcggggctaaagaggcaggaaggggacacgagcatcctccctctcctggaaaggactgatgcctccagcactcagtcatttgatctttcctttaccttctgtgtgcccaaccttgtgctaagaagagttcaggaaatgactgtgatgggtgtggtcactgtcaccctaaaggtggggagtcaacacaagcagtaagaaacccaaaacagaacagactcccagcaatgagcttatgtggtgcaggcgatgaggtctcagcttcttagcctggcagccacaaccccttctctaggtggcccagagctctctttttattttacctctacaggtttcccattacctttgagccttagggcattatttatttgacccaagcatatttttttctgttcagtgtgtgtgtgtgtgtgtgtgtgtgtgtgtgtgtgtgtgtgtgtgtgtgtgtgtgtgtgtgtgtgtgtggtctctttctgttgccccaggctggagtgcagtggtgcgatcttggctcactgcagcctctgcctcccgggttcaagcaattctcctgcttcagcctcctgagtagctgggattacaggcatgtgccaccacatctggttaagtttttatattttagtagagacggagtttcaccatgttgcctaggcgggtctcgaactcctgagctcaggcaattcacctgcctcagcctcccaaagtgctaggattacaggtgtgagccaccacgccaggccccttgcctcactttaaagaagcctggctgggcacggtggctcacacctgtaatcctaacactttgggaggttgaggcggccgtatcacttgaggtcaggaattcaagaccagcctggccaacatggtggaaccccatctctactaaagatacaaaaattagccaggcgaggcagaggttgtggtgagcctagatcatgccactgcacttcagccggggcaatagagtgagactctgtctcaaaaaaaaaaaaaaaatgctgggcatggtggtgtgtgcctgtaatcccagctactcaggaggctgaggcgcaagaatcacttgaacccaggaggtggaggttgcagtgagtctagattgcaccactgcacttcagcctgggagacagagcaagactccgattcggaaaaaaaaaaaagaaaaagaaaaagaaaaaaaatttaaaaattaaagaagtccacccttgccactctacccaggctgagctcattttcccttgtcgtttccaggacacattttggccctcagcgcattctgcctcatgctctctggagcagaccgagagagattctctgagacatagaactttcttttttttttttgagacggagtctcgctgtgtcacccaggctggagtgcagtggtgcaatctcgatcactgcaacctccgcctcccgggttcaagcgattctcctgtctcagcctcccgagtagctgggattacaggcacgtgccaccacacctggctttttttttttttttttttgtatttttagtagagatggggtttcaccatgttggtcaaactggtctcgaactcctgacctcgtgatccgcctgccttggcctcccaaagtcctgagatgacaggtgtgagccaccgcgcccagctgagacacagaactttcagtgctaaaaactagaaagtcgccgggtgcggtggctcacacctgtattcccagcactttgggaggcctaggtgggaggatcccttgagttcaggagttcgagaccagcctgggcaatatagcgaccccctctctctgcaaataataaaaaacttagccgggcatggtggcatgcacgtgtggttctcgctactcaggaggctgaggtaggaggattgcttggtcctggacagttgaggctgcagtgaggtatgatcgtgccactgcactccagcctgggtgacagcgagaccccgtctcaaaaaaaaaaaagggaaagctcgggcatgttggttacccttcatgaaactcttttgcgttatctccctagattttgagctccaagggcagtggttctcatacaggggacatttggctgttgtctggagccattttttgattgtcaaaacccagataggggttgctagtggcatcttgtgggtggaggccagggaagctgctacacatccatcagtacacaggacagcccccacaataaagaattacctagcccaaatgtcagtagcgccaaggctgagaaatcccatcctgaaaggaccatactctagctcttttagtggctagtatagtcctgggcatatgaatagtcaagatatgatgaaagatggtatttgtatggactggagtatcaagcaaggctcgacccccaaagggctggaggcgtggccagaaggacagggccactttggcttctggattcctgtggcagggaccttttcctaggactccctggccaatgtggggctatgaacagcactgagtatccccctaagtgaccttggggtgctctgtgaccctcagcggctgccggaaacaacatggaggacatctttggggagcttttgctacagctgcaccagcagtacccaggtgatatcggctgctttgccatctacttcctgaacctgcttaccctgaagcctggggaggccatgtttctggaggccaacgtaccccatgcctacctgaaaggaggtgagccacatttcagcagtgagccccactgccatccctgctgggccctgtttccctatctggacaaaggaaggagaagggtggtcaaggagacccccaaggaccttgcagctctgacctctgagggttcctgggctcagcaagcaacagctggtagggatgatgaatgcatttagcattgaacacgccttgaatcctgacaccaaccctgtgatgccatgctactctgattttaagtcctgccagtcagtgtgggaaccacaatttgaacgcaggctatattggatcaaagctgttgttctgtcacagcctttgtatgtctgtcctacctaccagggatttttacactaaaatatgcatgttgccatggaaggatgccacctttcgactgttggctgcttatccacacatgcctcatgcacaggattctggggtagaagtgggagactacagagttggggctccccaacccccaggggttaacatgactcccctctgacaataatgggtgacctgtcacctgtttttggtatttgatatcttaaccccattctcccagagaatacaattcatggaaatttttacctaacttggcatggggttcatggagctcaggttaggaggcccagaactggagagctaaggcatacttcatcagcttagcacatgacgactgtctctccagactgcgtggagtgcatggcgtgttcagacaacacagttcgtgctggcctgacacccaagttcattgatgtgccaaccctgtgtgaaatgctcagctatacccctagctccagcaaggacaggctctttctcccaacacggagtcaggaagacccctacctctcaatctatgacccccctgtaccagacttcaccattatgaagacggaggtgagtgaggggctatgatgggtgtccttcgtgtgccatgaaaatctctggcaagggtcacgatgtggaggacacctggggctgggtttcctgtcaagcccacttggcggagggtggccccagggcctgcccattccttcctgtaccagggaccaggcctctatgctgactgagcctgggttgtgcgagaaggtggcagagctctccctcgtgccctggggactgtcctgggcccatgagctgatgagagcagagtctgagctgcactgccttatcatttcttcctgcccaggtccctggctctgtcactgaatacaaggtcttggcactggactctgccagcatcctcctgatggtacaggggacagtaatagccagcacacccacaacccagacaccaatccctctgcaacgtggtggcgtgctcttcattggggccaatgagagtgtctcactgaagcttactgagccgaaggacctgctgatattccgtgcctgctgtctgctgtaaaggctgcagcctccccagctctcctctgccagccaccctaaattccagccaacctcacctcctcgggcccagctcaagcccccttccttgctctggaccccttaggtataccctggaagagctggggtgggggaggagggagcgtgaaggtagtgactcctgaacacacccaggtggaaccatctttggggaggagaggcccgtgtgaggggtctgatactccctttgtcttccctctctactcctcgctacacctgagccaggctcttgccaactctgttccagcctatggctttaggctagctgttaaatatgtgacccagcattagctcagcatctgtcagagcaagagaccaggtaatttctaagaacagggttctagcgatgggactgcccatttcctcagctgcagaggaggaaagggaaagggtaggcctgtagactaacgctgtttacacccttgttctgtcaaagcaattaaagatcacttgtgttgaggctgtggggtaatgagcactcagcctttggggtacctgttcctaaagtgggccaaaagagccctccctacatgatgccccagtttttgctttattcctatttcatacagcttctcgggggagtgagcaggctacactccagaacaccggtatgggaaggagtgggagaggaagccagctttggcctcacaggcacagcttgcaagcaggccttgggtctgcccagaggcacagcttgcaagcagccctacagagaaggtgactcaaaggatacaccagtcaccagtgcaagactcttcgctcctgtttttctcttttttttttttttgagacggagtctcggtctgtagcccaggctggagtgcagtggcacgatctcggctcattgcaagctccgcctcccgggttcacgccactcttctgcctcagcctcccaagtagctgggaccacaggcgcccaccaccacgcccagccaatttttttggtatttttagtagagatggggtttcactgtgttagccaggatggtctcgatcttctgacctcgtgatccgcccacctcagcctcccaaagtgctgggattacaggcgtgagccaccacgcctggcccggctcctgtttttcaactggccctagaggaggggtccgcaaaccaggctggcaggccagttctggccatacctgttcatttccatactgtctggctgctttcaagccacagtggcaaagttgaagagttgcactagactgtacggcctgcaaaactgaaaccattgactgtcaaccacttctctacaacatactcaactgttgcagattacagggactcaggaaccgaattagacaattttcatggcgaggagaagcccagttagctttcctaaacgggcaggaagtgtgaaggagggaatctcctgatgccctgctccaggggtggcacacacctgcaagaggctgtcggctgtctgctgctgctgaggtttctgacctgcaatcgtagatcctgtcaccacagactaatcacttagtccactggctccttcctgtgggataaaggtttaaattcatgcaaaagaatctttctgggcttctgcccacactagagtccctatacaatggagttccaggaaaccaccttcaaaaatctcctgggttttcttgcctccaaattttcttcagctaaaaaacaataaagatgagctggaaagaaaaggtctgctaaagggaacccattctacagaagtgacttgcaagagcctatttcactcatgccgtccagtgaaacaggcccgaaagtgatgcccagtgggaacagcagaaaggggagggagtttccagaaggaattgctgtagtcagctgttaagctatttcttcatttcaggatatccaggatattcttaacttttatttttttgagacggagtctcgcactgtctcccgggctggagtgcagtggcgcgatagctcactgcaacctccgcccactgggttcaagcgattcttctgcctcagctcctgagtagctgggactacaggcgcctgccaccacacccagctaagtttttgtatttttagtagagacggggtttcagtagagacggggtgacaggatctacaattccaggtaaggtcaggttggtctcaaactcctgaccttgtgatttgcttgcctcagcctctgaaagtgctgggattacaagcatgagccattgtgcctggccaaggcctttaaaatccactgcaacacagacacagctcaactagtgtgattgcatttattcttataaatgtacagagctgtagaagtgcaagccaagagttctatagagtagtacataaacaccatatggtaccactcctgctgggaggtaagcctggatacacccctctcctcaggaaactgtcacctgcagaacacacagcactcagaattaaggcagtttggccctgggcacattggtggtattttggtatgtggccactggccctaaacaactgaccatttctaccctgcctcactgcactgtcccaccaggtccctccagctttttctacaaggtaacaccctcctacatggggtcagccagctcagaaacctcttcttcagggacagttgcagctgaatatgccagagctgattattacaacaacgatgcagagggccttggttttggggtcctgccaccctcacccctagaagctgctaaacacccaggccattctgccctgaccacctccccaacagagatgtaggtctatacttaccttccacagccacctcccagcacacactgggtccctctacctgtgttgctgtctttctttacactgtgctacatttgatccctttccacatgtgcacttcacctctgcagacacaagaaaggcctggacatggtctctgcagatggggaaggggttctggatggagatgttcttgagctctacaagcatttgcacaaagtgctcagaatgttggccactgcatagagctgcagagtcccattccagaacagagtaaccatctgcctctcttcccaagaccccaagctggcatgactctggtctctgtcctatctctctgctgtgatgctcctagctagtagagtaagtcagcccccagatactgtatattcctctcaaccttccatggtttgagaaaaacacaaagatagatgtccatcaggcactcacaggattaccatcgtaaggatggttgtcagacaaataacaaataaggccgtatctttttattagacttgctcatcttctagtcaccccttgtggtagagcgaaaagagtgtgttgtccctctcatgcctctggtggtcacaggacactgagtaaagcaagagactggatactttcccatgtagaacctataccccaatcccgactattgggctgggaaccctgtctatgcccattcaaagctcaccatgtgggaggactgcttgggcctgggaggttgaggctgcagtgagctgtgattacaccactgcactccagcctgggtgacagagaccctgtctccaacaaaacaaagcagaacgctcaccatggttctgagttaagccaaaaaacaaaacaaaacctgttggaaaaattctagaaagaggcttggtatagagtatagcaagatatactctccaatttgtgggtagggggtgtcacagcagaaattatgcctatttctgctgtttgggctgggggctgaaagaggctgtgtcacacccagaggtctgcttaaagcccaatcctgagtatccagtaaggcccatgctgtgaccagaagaatctggcaatagaatggtccatgctggagtgaagggaggccctctacactggtggactgatttcctcaggcaagggtctaggagctggcttaggtctctcttacccttcctgtctgtaagcctcagtctaggacaaagcccacacagctgtatacccactctcacgagtccattgctacttctcaaaagtttaaaaagtaaacaataggaaggcaccggactgctccctgtagctccctctgctggtaataataaaaactgcaggcttctggggccagccccagtaccttcgacctaatctttagctcaaagactgggtgaagaaactcacccagaccaaggaaatacaaataaataaatatgaacatgtcagagcagtttttctctaactagggaagggcaaaccagaatcactaaactcacccggacggttggaccagttggggatgccccaggtccagggattctggaagccaggatcctgctgtatcattaagcaacctgctatgatccctgtcatagttagacaggtgcaacctgaagagggacaaaaggactcactttatgctgtcttgaaggtcaagcctgcaaaccatcttagagctaggaagaatagagcaaacggaatttctcgaactggtctcaaacagtttcttttttggattgccagctataataaaccataaagtgcta

SEQ ID NO: 12841 - DNA, 5793 bp, Homo sapiens
atacgtgcttaatcctggtgcagggggcgagcatggccgctccgcgagtattcccactttcctgtgcggtgcagcagtatgcctgggggaagatgggttccaacagcgaagtggcgcggctgttggccagcagtgatccactggcccagatcgcagaggacaagccttatgcagagttgtggatggggactcacccccgaggggatgccaagatccttgacaaccgcatctcacagaagaccctaagccagtggattgctgagaaccaggacagcttgggctcaaaggtcaaggacacctttaatggcaacctgcccttcctcttcaaagtgctctcagttgaaacacccctgtccatccaggcacaccctaacaaggagctggcagagaagctgcacctccaggctccgcagcactaccccgatgccaaccacaagccagagatggccattgccctcacccccttccagggcttgtgtggcttccggccagttgaggagattgtaacctttctaaagaaggtgcctgagtttcagttcctgattggagatgaggcagcaacacacctgaagcagaccatgagccatgactcccaggctgtggcctcctctctgcagagctgtttctcccacctgatgaagagtgagaagaaggtggtggtggaacagctcaacctgttggtgaagcggatctcccagcaagcggctgccggaaacaacatggaggacatctttggggagcttttgctacagctgcaccagcagtacccaggtgatatcggctgctttgccatctacttcctgaacctgcttaccctgaagcctggggaggccatgtttctggaggccaacgtaccccatgcctacctgaaaggagactgcgtggagtgcatggcgtgttcagacaacacagttcgtgctggcctgacacccaagttcattgatgtgccaaccctgtgtgaaatgctcagctatacccctagctccagcaaggacaggctctttctcccaacacggagtcaggaagacccctacctctcaatctatgacccccctgtaccagacttcaccattatgaagacggaggtccctggctctgtcactgaatacaaggtcttggcactggactctgccagcatcctcctgatggtacaggggacagtaatagccagcacacccacaacccagacaccaatccctctgcaacgtggtggcgtgctcttcattggggccaatgagagtgtctcactgaagcttactgagccgaaggacctgctgatattccgtgcctgctgtctgctgtaaaggctgcagcctccccagctctcctctgccagccaccctaaattccagccaacctcacctcctcgggcccagctcaagcccccttccttgctctggaccccttaggtataccctggaagagctggggtgggggaggagggagcgtgaaggtagtgactcctgaacacacccaggtggaaccatctttggggaggagaggcccgtgtgaggggtctgatactccctttgtcttccctctctactcctcgctacacctgagccaggctcttgccaactctgttccagcctatggctttaggctagctgttaaatatgtgacccagcattagctcagcatctgtcagagcaagagaccaggtaatttctaagaacagggttctagcgatgggactgcccatttcctcagctgcagaggaggaaagggaaagggtaggcctgtagactaacgctgtttacacccttgttctgtcaaagcaattaaagatcacttgtgttgaggctgtggggtaatgagcactcagcctttggggtacctgttcctaaagtgggccaaaagagccctccctacatgatgccccagtttttgctttattcctatttcatacagcttctcgggggagtgagcaggctacactccagaacaccggtatgggaaggagtgggagaggaagccagctttggcctcacaggcacagcttgcaagcaggccttgggtctgcccagaggcacagcttgcaagcagccctacagagaaggtgactcaaaggatacaccagtcaccagtgcaagactcttcgctcctgtttttctcttttttttttttttgagacggagtctcggtctgtagcccaggctggagtgcagtggcacgatctcggctcattgcaagctccgcctcccgggttcacgccactcttctgcctcagcctcccaagtagctgggaccacaggcgcccaccaccacgcccagccaatttttttggtatttttagtagagatggggtttcactgtgttagccaggatggtctcgatcttctgacctcgtgatccgcccacctcagcctcccaaagtgctgggattacaggcgtgagccaccacgcctggcccggctcctgtttttcaactggccctagaggaggggtccgcaaaccaggctggcaggccagttctggccatacctgttcatttccatactgtctggctgctttcaagccacagtggcaaagttgaagagttgcactagactgtacggcctgcaaaactgaaaccattgactgtcaaccacttctctacaacatactcaactgttgcagattacagggactcaggaaccgaattagacaattttcatggcgaggagaagcccagttagctttcctaaacgggcaggaagtgtgaaggagggaatctcctgatgccctgctccaggggtggcacacacctgcaagaggctgtcggctgtctgctgctgctgaggtttctgacctgcaatcgtagatcctgtcaccacagactaatcacttagtccactggctccttcctgtgggataaaggtttaaattcatgcaaaagaatctttctgggcttctgcccacactagagtccctatacaatggagttccaggaaaccaccttcaaaaatctcctgggttttcttgcctccaaattttcttcagctaaaaaacaataaagatgagctggaaagaaaaggtctgctaaagggaacccattctacagaagtgacttgcaagagcctatttcactcatgccgtccagtgaaacaggcccgaaagtgatgcccagtgggaacagcagaaaggggagggagtttccagaaggaattgctgtagtcagctgttaagctatttcttcatttcaggatatccaggatattcttaacttttatttttttgagacggagtctcgcactgtctcccgggctggagtgcagtggcgcgatagctcactgcaacctccgcccactgggttcaagcgattcttctgcctcagctcctgagtagctgggactacaggcgcctgccaccacacccagctaagtttttgtatttttagtagagacggggtttcagtagagacggggtgacaggatctacaattccaggtaaggtcaggttggtctcaaactcctgaccttgtgatttgcttgcctcagcctctgaaagtgctgggattacaagcatgagccattgtgcctggccaaggcctttaaaatccactgcaacacagacacagctcaactagtgtgattgcatttattcttataaatgtacagagctgtagaagtgcaagccaagagttctatagagtagtacataaacaccatatggtaccactcctgctgggaggtaagcctggatacacccctctcctcaggaaactgtcacctgcagaacacacagcactcagaattaaggcagtttggccctgggcacattggtggtattttggtatgtggccactggccctaaacaactgaccatttctaccctgcctcactgcactgtcccaccaggtccctccagctttttctacaaggtaacaccctcctacatggggtcagccagctcagaaacctcttcttcagggacagttgcagctgaatatgccagagctgattattacaacaacgatgcagagggccttggttttggggtcctgccaccctcacccctagaagctgctaaacacccaggccattctgccctgaccacctccccaacagagatgtaggtctatacttaccttccacagccacctcccagcacacactgggtccctctacctgtgttgctgtctttctttacactgtgctacatttgatccctttccacatgtgcacttcacctctgcagacacaagaaaggcctggacatggtctctgcagatggggaaggggttctggatggagatgttcttgagctctacaagcatttgcacaaagtgctcagaatgttggccactgcatagagctgcagagtcccattccagaacagagtaaccatctgcctctcttcccaagaccccaagctggcatgactctggtctctgtcctatctctctgctgtgatgctcctagctagtagagtaagtcagcccccagatactgtatattcctctcaaccttccatggtttgagaaaaacacaaagatagatgtccatcaggcactcacaggattaccatcgtaaggatggttgtcagacaaataacaaataaggccgtatctttttattagacttgctcatcttctagtcaccccttgtggtagagcgaaaagagtgtgttgtccctctcatgcctctggtggtcacaggacactgagtaaagcaagagactggatactttcccatgtagaacctataccccaatcccgactattgggctgggaaccctgtctatgcccattcaaagctcaccatgtgggaggactgcttgggcctgggaggttgaggctgcagtgagctgtgattacaccactgcactccagcctgggtgacagagaccctgtctccaacaaaacaaagcagaacgctcaccatggttctgagttaagccaaaaaacaaaacaaaacctgttggaaaaattctagaaagaggcttggtatagagtatagcaagatatactctccaatttgtgggtagggggtgtcacagcagaaattatgcctatttctgctgtttgggctgggggctgaaagaggctgtgtcacacccagaggtctgcttaaagcccaatcctgagtatccagtaaggcccatgctgtgaccagaagaatctggcaatagaatggtccatgctggagtgaagggaggccctctacactggtggactgatttcctcaggcaagggtctaggagctggcttaggtctctcttacccttcctgtctgtaagcctcagtctaggacaaagcccacacagctgtatacccactctcacgagtccattgctacttctcaaaagtttaaaaagtaaacaataggaaggcaccggactgctccctgtagctccctctgctggtaataataaaaactgcaggcttctggggccagccccagtaccttcgacctaatctttagctcaaagactgggtgaagaaactcacccagaccaaggaaatacaaataaataaatatgaacatgtcagagcagtttttctctaactagggaagggcaaaccagaatcactaaactcacccggacggttggaccagttggggatgccccaggtccagggattctggaagccaggatcctgctgtatcattaagcaacctgctatgatccctgtcatagttagacaggtgcaacctgaagagggacaaaaggactcactttatgctgtcttgaaggtcaagcctgcaaaccatcttagagctaggaagaatagagcaaacggaatttctcgaactggtctcaaacagtttcttttttggattgccagctataataaaccataaagtgcta

SEQ ID NO: 12842 - DNA, 8036 bp, Homo sapiens
atacgtgcttaatcctggtgcagggggcgagcatggccgctccgcgaggtgagccattggctggggtgtcggcgagtgtgttcgtggagcgcgtcctggggacgactcccggcattatcggccaggttgagtccgctcctggcattccgcggaaagatgggtgggtgccgggcagaggtgtggccacctgcgatggggattgacctccgaggggagggggcccttctagacgtcgtgccgtgggataggtaccttctgctccctccccgccaccctgcctcagatcagcacaaggtccttactgctgcccatctgacagttgggaacatcgaggcctgcagcggaggggggtctcatccaacagcctacaaaacccttatttgactctgtccccagtgagcacccccagctcttgcctggtttcccgggacactagggtggggcctgaggagtggagtggcagctgaccctgtctgtgcccctagtattcccactttcctgtgcggtgcagcagtatgcctgggggaagatgggttccaacagcgaagtggcgcggctgttggccagcagtgatccactggcccagatcgcagaggacaagccttatgcagaggtgagccccgggctgtatttcagcccactttacccgcaggtcaggagaaagggcctgaggcaagtcataagaatcagctgggaagggtgaggcagcaaggagggaggagacccacttggctcttcaggctaatggactagatagtgttatcaaaaagaagagaggttttgtcataataggctgggatttccagcactctccttcccccaaccactcttagcacttagtgaattttaattcagccctctttgacaattaagtttttttactttgactatttttttgcatttttattaacctaaaatatttctcctgcctatttagtggagaaaaagccaaagcataggaaggctttcgcctctgcttctgaaactggaagatgtatgttaacccctgaaagaatcatttaagagtcatagtttttctgctaccttgacagtgcagatgtcattctcctctttggacagacaaagaagatacatctaaagaagggaaataactagtccaagtcttcatagatggctagaggccgagtctggacaagggcctgggtctactgcctccctgtatgtccatgatggcatgaacatttgtatccagacctgggaggcctttcccaggactcagttgccctgtggggagcacagcataacggattgggacaggccaactcagggtggcaggtttcttcccccttcccctcccaagtttcctgtctttccagttgtggatggggactcacccccgaggggatgccaagatccttgacaaccgcatctcacagaagaccctaagccagtggattgctgagaaccaggacagcttgggctcaaaggtcaaggacacctttaatggcaacctgcccttcctcttcaaagtgctctcagttgaaacacccctgtccatccaggcacaccctaacaaggtaaaggacagagtgcggtgcagaggtcagggtacagaagggcttatgctaaggccctcccgtgacttttactgccacttttaccccacccatgccaggctcctgcccaaggccaaatccaggctgacaactcccaatttagctctgcaaagccagatggtagtgacacatgcagcaactaagtctaagcaaacagctcaccggcctgtgccaggggagtttctctaagctcattccaaggggcttgttcctggtcttccctcatccaacccatgtctattcatatctgccatttactcatctgctttcaggaagagttcaacttgcaaggcagggcaggtaccctcagccccacccccatggagtctccctacacaagccggagtcccatcctaagcaactgtggatcaaaactcctttttttttttttctgagacttgagtcttgctctgtcgcccaggctggagtgcagtggcgcgatctcggctcactgcaacctcctcctcccaattcaagcaattcttctgcttcagcctcgcaaatagctgggactacaggcacgcgccaccacacccagctaatttttgtatttttagtagagatggggtttcaccatgttggccaggctggtcttgaactcctgccctcgtaatccgctcgcctcagcctcccaaagtgctgggattacaggcgtgagccaccatgcccagccaaaactccttatttctagatacacaaagtaagacccagagaagggagggatttaccaaagccacacagcttgttagtgtcagagcttggtctggtatttgggtttcctgattcacaggccaagcctcttaaagtctgccccagcttttccctgatttgccccggggttgcccctgatttgcccctgccctgggttggctgagccccaagtttctgcaacatgctttgactgggctccttgccagaggtaggtagtcactgccatcctgcaactggggagggtggacagcaggggctaggtggcactggtgtacctgctaggtaatggctgtaccctcaccatcctcctcttcccctggccaccccacaggagctggcagagaagctgcacctccaggctccgcagcactaccccgatgccaaccacaagccagagatggccattgccctcacccccttccagggcttgtgtggcttccggccagttgaggagattgtaacctttctaaagagtaagttgggcagaatgctgaaggcatgcgtactgggccagggatacctggggaaccaagatgataggaacagtggctgagaacgggtcacatgtcacaggaactgaagggcctcatgaagcagtttttggagccagtgagccaggccagtgagaccaggctcaggtgtggtagtcaagggctggtggtgagtgattggtttccactgcaaagtttacttagcattgccggctctttggttagggctgggatggaaaggtgtcctccaactccccacttgtgtgggttccatcttaccattcctgatatgggccctgggccttgccttcctgtagaggtgcctgagtttcagttcctgattggagatgaggcagcaacacacctgaagcagaccatgagccatgactcccaggctgtggcctcctctctgcagagctgtttctcccacctgatgaagagtgagaagaaggtggtggtggaacagctcaacctgttggtgaagcggatctcccagcaaggtggacacagttatattcctggttgggtgcaatgctctggcctgggcttcccagcagacaccagactctggggacagttctcaacccccttgcccaagtggaacactaaaaggggccccacttagatgacctgttggcaacttagcattgcttgcctagtctttgtggagcagggcccttcttagttgagtgctgcttcccaactggtcatcttctccagatggttggaggcagactggcatagaggactcttaggatgccttccacctaggcattctgagattttccctagccctgcagctgccctccatggatggacttgtatctcggggctaaagaggcaggaaggggacacgagcatcctccctctcctggaaaggactgatgcctccagcactcagtcatttgatctttcctttaccttctgtgtgcccaaccttgtgctaagaagagttcaggaaatgactgtgatgggtgtggtcactgtcaccctaaaggtggggagtcaacacaagcagtaagaaacccaaaacagaacagactcccagcaatgagcttatgtggtgcaggcgatgaggtctcagcttcttagcctggcagccacaaccccttctctaggtggcccagagctctctttttattttacctctacaggtttcccattacctttgagccttagggcattatttatttgacccaagcatatttttttctgttcagtgtgtgtgtgtgtgtgtgtgtgtgtgtgtgtgtgtgtgtgtgtgtgtgtgtgtgtgtgtgtgtgtgtggtctctttctgttgccccaggctggagtgcagtggtgcgatcttggctcactgcagcctctgcctcccgggttcaagcaattctcctgcttcagcctcctgagtagctgggattacaggcatgtgccaccacatctggttaagtttttatattttagtagagacggagtttcaccatgttgcctaggcgggtctcgaactcctgagctcaggcaattcacctgcctcagcctcccaaagtgctaggattacaggtgtgagccaccacgccaggccccttgcctcactttaaagaagcctggctgggcacggtggctcacacctgtaatcctaacactttgggaggttgaggcggccgtatcacttgaggtcaggaattcaagaccagcctggccaacatggtggaaccccatctctactaaagatacaaaaattagccaggcgaggcagaggttgtggtgagcctagatcatgccactgcacttcagccggggcaatagagtgagactctgtctcaaaaaaaaaaaaaaaatgctgggcatggtggtgtgtgcctgtaatcccagctactcaggaggctgaggcgcaagaatcacttgaacccaggaggtggaggttgcagtgagtctagattgcaccactgcacttcagcctgggagacagagcaagactccgattcggaaaaaaaaaaaagaaaaagaaaaagaaaaaaaatttaaaaattaaagaagtccacccttgccactctacccaggctgagctcattttcccttgtcgtttccaggacacattttggccctcagcgcattctgcctcatgctctctggagcagaccgagagagattctctgagacatagaactttcttttttttttttgagacggagtctcgctgtgtcacccaggctggagtgcagtggtgcaatctcgatcactgcaacctccgcctcccgggttcaagcgattctcctgtctcagcctcccgagtagctgggattacaggcacgtgccaccacacctggctttttttttttttttttttgtatttttagtagagatggggtttcaccatgttggtcaaactggtctcgaactcctgacctcgtgatccgcctgccttggcctcccaaagtcctgagatgacaggtgtgagccaccgcgcccagctgagacacagaactttcagtgctaaaaactagaaagtcgccgggtgcggtggctcacacctgtattcccagcactttgggaggcctaggtgggaggatcccttgagttcaggagttcgagaccagcctgggcaatatagcgaccccctctctctgcaaataataaaaaacttagccgggcatggtggcatgcacgtgtggttctcgctactcaggaggctgaggtaggaggattgcttggtcctggacagttgaggctgcagtgaggtatgatcgtgccactgcactccagcctgggtgacagcgagaccccgtctcaaaaaaaaaaaagggaaagctcgggcatgttggttacccttcatgaaactcttttgcgttatctccctagattttgagctccaagggcagtggttctcatacaggggacatttggctgttgtctggagccattttttgattgtcaaaacccagataggggttgctagtggcatcttgtgggtggaggccagggaagctgctacacatccatcagtacacaggacagcccccacaataaagaattacctagcccaaatgtcagtagcgccaaggctgagaaatcccatcctgaaaggaccatactctagctcttttagtggctagtatagtcctgggcatatgaatagtcaagatatgatgaaagatggtatttgtatggactggagtatcaagcaaggctcgacccccaaagggctggaggcgtggccagaaggacagggccactttggcttctggattcctgtggcagggaccttttcctaggactccctggccaatgtggggctatgaacagcactgagtatccccctaagtgaccttggggtgctctgtgaccctcagcggctgccggaaacaacatggaggacatctttggggagcttttgctacagctgcaccagcagtacccaggtgatatcggctgctttgccatctacttcctgaacctgcttaccctgaagcctggggaggccatgtttctggaggccaacgtaccccatgcctacctgaaaggaggtgagccacatttcagcagtgagccccactgccatccctgctgggccctgtttccctatctggacaaaggaaggagaagggtggtcaaggagacccccaaggaccttgcagctctgacctctgagggttcctgggctcagcaagcaacagctggtagggatgatgaatgcatttagcattgaacacgccttgaatcctgacaccaaccctgtgatgccatgctactctgattttaagtcctgccagtcagtgtgggaaccacaatttgaacgcaggctatattggatcaaagctgttgttctgtcacagcctttgtatgtctgtcctacctaccagggatttttacactaaaatatgcatgttgccatggaaggatgccacctttcgactgttggctgcttatccacacatgcctcatgcacaggattctggggtagaagtgggagactacagagttggggctccccaacccccaggggttaacatgactcccctctgacaataatgggtgacctgtcacctgtttttggtatttgatatcttaaccccattctcccagagaatacaattcatggaaatttttacctaacttggcatggggttcatggagctcaggttaggaggcccagaactggagagctaaggcatacttcatcagcttagcacatgacgactgtctctccagactgcgtggagtgcatggcgtgttcagacaacacagttcgtgctggcctgacacccaagttcattgatgtgccaaccctgtgtgaaatgctcagctatacccctagctccagcaaggacaggctctttctcccaacacggagtcaggaagacccctacctctcaatctatgacccccctgtaccagacttcaccattatgaagacggaggtgagtgaggggctatgatgggtgtccttcgtgtgccatgaaaatctctggcaagggtcacgatgtggaggacacctggggctgggtttcctgtcaagcccacttggcggagggtggccccagggcctgcccattccttcctgtaccagggaccaggcctctatgctgactgagcctgggttgtgcgagaaggtggcagagctctccctcgtgccctggggactgtcctgggcccatgagctgatgagagcagagtctgagctgcactgccttatcatttcttcctgcccaggtccctggctctgtcactgaatacaaggtcttggcactggactctgccagcatcctcctgatggtacaggggacagtaatagccagcacacccacaacccagacaccaatccctctgcaacgtggtggcgtgctcttcattggggccaatgagagtgtctcactgaagcttactgagccgaaggacctgctgatattccgtgcctgctgtctgctgtaaaggctgcagcctccccagctctcctctgccagccaccctaaattccagccaacctcacctcctcgggcccagctcaagcccccttccttgctctggaccccttaggtataccctggaagagctggggtgggggaggagggagcgtgaaggtagtgactcctgaacacacccaggtggaaccatctttggggaggagaggcccgtgtgaggggtctgatactccctttgtcttccctctctactcctcgctacacctgagccaggctcttgccaactctgttccagcctatggctttaggctagctgttaaatatgtgacccagcattagctcagcatctgtcagagc

SEQ ID NO: 12843 - DNA, 1523 bp, Homo sapiens
atacgtgcttaatcctggtgcagggggcgagcatggccgctccgcgagttgtggatggggactcacccccgaggggatgccaagatccttgacaaccgcatctcacagaagaccctaagccagtggattgctgagaaccaggacagcttgggctcaaaggtcaaggacacctttaatggcaacctgcccttcctcttcaaagtgctctcagttgaaacacccctgtccatccaggcacaccctaacaaggagctggcagagaagctgcacctccaggctccgcagcactaccccgatgccaaccacaagccagagatggccattgccctcacccccttccagggcttgtgtggcttccggccagttgaggagattgtaacctttctaaagaaggtgcctgagtttcagttcctgattggagatgaggcagcaacacacctgaagcagaccatgagccatgactcccaggctgtggcctcctctctgcagagctgtttctcccacctgatgaagagtgagaagaaggtggtggtggaacagctcaacctgttggtgaagcggatctcccagcaagcggctgccggaaacaacatggaggacatctttggggagcttttgctacagctgcaccagcagtacccaggtgatatcggctgctttgccatctacttcctgaacctgcttaccctgaagcctggggaggccatgtttctggaggccaacgtaccccatgcctacctgaaaggagactgcgtggagtgcatggcgtgttcagacaacacagttcgtgctggcctgacacccaagttcattgatgtgccaaccctgtgtgaaatgctcagctatacccctagctccagcaaggacaggctctttctcccaacacggagtcaggaagacccctacctctcaatctatgacccccctgtaccagacttcaccattatgaagacggaggtccctggctctgtcactgaatacaaggtcttggcactggactctgccagcatcctcctgatggtacaggggacagtaatagccagcacacccacaacccagacaccaatccctctgcaacgtggtggcgtgctcttcattggggccaatgagagtgtctcactgaagcttactgagccgaaggacctgctgatattccgtgcctgctgtctgctgtaaaggctgcagcctccccagctctcctctgccagccaccctaaattccagccaacctcacctcctcgggcccagctcaagcccccttccttgctctggaccccttaggtataccctggaagagctggggtgggggaggagggagcgtgaaggtagtgactcctgaacacacccaggtggaaccatctttggggaggagaggcccgtgtgaggggtctgatactccctttgtcttccctctctactcctcgctacacctgagccaggctcttgccaactctgttccagcctatggctttaggctagctgttaaatatgtgacccagcattagctcagcatctgtcagagc

SEQ ID NO: 12844 - DNA, 6147 bp, Homo sapiens
atacgtgcttaatcctggtgcagggggcgagcatggccgctccgcgaggtgagccattggctggggtgtcggcgagtgtgttcgtggagcgcgtcctggggacgactcccggcattatcggccaggttgagtccgctcctggcattccgcggaaagatgggtgggtgccgggcagaggtgtggccacctgcgatggggattgacctccgaggggagggggcccttctagacgtcgtgccgtgggataggtaccttctgctccctccccgccaccctgcctcagatcagcacaaggtccttactgctgcccatctgacagttgggaacatcgaggcctgcagcggaggggggtctcatccaacagcctacaaaacccttatttgactctgtccccagtgagcacccccagctcttgcctggtttcccgggacactagggtggggcctgaggagtggagtggcagctgaccctgtctgtgcccctagtattcccactttcctgtgcggtgcagcagtatgcctgggggaagatgggttccaacagcgaagtggcgcggctgttggccagcagtgatccactggcccagatcgcagaggacaagccttatgcagaggtgagccccgggctgtatttcagcccactttacccgcaggtcaggagaaagggcctgaggcaagtcataagaatcagctgggaagggtgaggcagcaaggagggaggagacccacttggctcttcaggctaatggactagatagtgttatcaaaaagaagagaggttttgtcataataggctgggatttccagcactctccttcccccaaccactcttagcacttagtgaattttaattcagccctctttgacaattaagtttttttactttgactatttttttgcatttttattaacctaaaatatttctcctgcctatttagtggagaaaaagccaaagcataggaaggctttcgcctctgcttctgaaactggaagatgtatgttaacccctgaaagaatcatttaagagtcatagtttttctgctaccttgacagtgcagatgtcattctcctctttggacagacaaagaagatacatctaaagaagggaaataactagtccaagtcttcatagatggctagaggccgagtctggacaagggcctgggtctactgcctccctgtatgtccatgatggcatgaacatttgtatccagacctgggaggcctttcccaggactcagttgccctgtggggagcacagcataacggattgggacaggccaactcagggtggcaggtttcttcccccttcccctcccaagtttcctgtctttccagttgtggatggggactcacccccgaggggatgccaagatccttgacaaccgcatctcacagaagaccctaagccagtggattgctgagaaccaggacagcttgggctcaaaggtcaaggacacctttaatggcaacctgcccttcctcttcaaagtgctctcagttgaaacacccctgtccatccaggcacaccctaacaaggtaaaggacagagtgcggtgcagaggtcagggtacagaagggcttatgctaaggccctcccgtgacttttactgccacttttaccccacccatgccaggctcctgcccaaggccaaatccaggctgacaactcccaatttagctctgcaaagccagatggtagtgacacatgcagcaactaagtctaagcaaacagctcaccggcctgtgccaggggagtttctctaagctcattccaaggggcttgttcctggtcttccctcatccaacccatgtctattcatatctgccatttactcatctgctttcaggaagagttcaacttgcaaggcagggcaggtaccctcagccccacccccatggagtctccctacacaagccggagtcccatcctaagcaactgtggatcaaaactcctttttttttttttctgagacttgagtcttgctctgtcgcccaggctggagtgcagtggcgcgatctcggctcactgcaacctcctcctcccaattcaagcaattcttctgcttcagcctcgcaaatagctgggactacaggcacgcgccaccacacccagctaatttttgtatttttagtagagatggggtttcaccatgttggccaggctggtcttgaactcctgccctcgtaatccgctcgcctcagcctcccaaagtgctgggattacaggcgtgagccaccatgcccagccaaaactccttatttctagatacacaaagtaagacccagagaagggagggatttaccaaagccacacagcttgttagtgtcagagcttggtctggtatttgggtttcctgattcacaggccaagcctcttaaagtctgccccagcttttccctgatttgccccggggttgcccctgatttgcccctgccctgggttggctgagccccaagtttctgcaacatgctttgactgggctccttgccagaggtaggtagtcactgccatcctgcaactggggagggtggacagcaggggctaggtggcactggtgtacctgctaggtaatggctgtaccctcaccatcctcctcttcccctggccaccccacaggagctggcagagaagctgcacctccaggctccgcagcactaccccgatgccaaccacaagccagagatggccattgccctcacccccttccagggcttgtgtggcttccggccagttgaggagattgtaacctttctaaagagtaagttgggcagaatgctgaaggcatgcgtactgggccagggatacctggggaaccaagatgataggaacagtggctgagaacgggtcacatgtcacaggaactgaagggcctcatgaagcagtttttggagccagtgagccaggccagtgagaccaggctcaggtgtggtagtcaagggctggtggtgagtgattggtttccactgcaaagtttacttagcattgccggctctttggttagggctgggatggaaaggtgtcctccaactccccacttgtgtgggttccatcttaccattcctgatatgggccctgggccttgccttcctgtagaggtgcctgagtttcagttcctgattggagatgaggcagcaacacacctgaagcagaccatgagccatgactcccaggctgtggcctcctctctgcagagctgtttctcccacctgatgaagagtgagaagaaggtggtggtggaacagctcaacctgttggtgaagcggatctcccagcaaggtggacacagttatattcctggttgggtgcaatgctctggcctgggcttcccagcagacaccagactctggggacagttctcaacccccttgcccaagtggaacactaaaaggggccccacttagatgacctgttggcaacttagcattgcttgcctagtctttgtggagcagggcccttcttagttgagtgctgcttcccaactggtcatcttctccagatggttggaggcagactggcatagaggactcttaggatgccttccacctaggcattctgagattttccctagccctgcagctgccctccatggatggacttgtatctcggggctaaagaggcaggaaggggacacgagcatcctccctctcctggaaaggactgatgcctccagcactcagtcatttgatctttcctttaccttctgtgtgcccaaccttgtgctaagaagagttcaggaaatgactgtgatgggtgtggtcactgtcaccctaaaggtggggagtcaacacaagcagtaagaaacccaaaacagaacagactcccagcaatgagcttatgtggtgcaggcgatgaggtctcagcttcttagcctggcagccacaaccccttctctaggtggcccagagctctctttttattttacctctacaggtttcccattacctttgagccttagggcattatttatttgacccaagcatatttttttctgttcagtgtgtgtgtgtgtgtgtgtgtgtgtgtgtgtgtgtgtgtgtgtgtgtgtgtgtgtgtgtgtgtgtgtggtctctttctgttgccccaggctggagtgcagtggtgcgatcttggctcactgcagcctctgcctcccgggttcaagcaattctcctgcttcagcctcctgagtagctgggattacaggcatgtgccaccacatctggttaagtttttatattttagtagagacggagtttcaccatgttgcctaggcgggtctcgaactcctgagctcaggcaattcacctgcctcagcctcccaaagtgctaggattacaggtgtgagccaccacgccaggccccttgcctcactttaaagaagcctggctgggcacggtggctcacacctgtaatcctaacactttgggaggttgaggcggccgtatcacttgaggtcaggaattcaagaccagcctggccaacatggtggaaccccatctctactaaagatacaaaaattagccaggcgaggcagaggttgtggtgagcctagatcatgccactgcacttcagccggggcaatagagtgagactctgtctcaaaaaaaaaaaaaaaatgctgggcatggtggtgtgtgcctgtaatcccagctactcaggaggctgaggcgcaagaatcacttgaacccaggaggtggaggttgcagtgagtctagattgcaccactgcacttcagcctgggagacagagcaagactccgattcggaaaaaaaaaaaagaaaaagaaaaagaaaaaaaatttaaaaattaaagaagtccacccttgccactctacccaggctgagctcattttcccttgtcgtttccaggacacattttggccctcagcgcattctgcctcatgctctctggagcagaccgagagagattctctgagacatagaactttcttttttttttttgagacggagtctcgctgtgtcacccaggctggagtgcagtggtgcaatctcgatcactgcaacctccgcctcccgggttcaagcgattctcctgtctcagcctcccgagtagctgggattacaggcacgtgccaccacacctggctttttttttttttttttttgtatttttagtagagatggggtttcaccatgttggtcaaactggtctcgaactcctgacctcgtgatccgcctgccttggcctcccaaagtcctgagatgacaggtgtgagccaccgcgcccagctgagacacagaactttcagtgctaaaaactagaaagtcgccgggtgcggtggctcacacctgtattcccagcactttgggaggcctaggtgggaggatcccttgagttcaggagttcgagaccagcctgggcaatatagcgaccccctctctctgcaaataataaaaaacttagccgggcatggtggcatgcacgtgtggttctcgctactcaggaggctgaggtaggaggattgcttggtcctggacagttgaggctgcagtgaggtatgatcgtgccactgcactccagcctgggtgacagcgagaccccgtctcaaaaaaaaaaaagggaaagctcgggcatgttggttacccttcatgaaactcttttgcgttatctccctagattttgagctccaagggcagtggttctcatacaggggacatttggctgttgtctggagccattttttgattgtcaaaacccagataggggttgctagtggcatcttgtgggtggaggccagggaagctgctacacatccatcagtacacaggacagcccccacaataaagaattacctagcccaaatgtcagtagcgccaaggctgagaaatcccatcctgaaaggaccatactctagctcttttagtggctagtatagtcctgggcatatgaatagtcaagatatgatgaaagatggtatttgtatggactggagtatcaagcaaggctcgacccccaaagggctggaggcgtggccagaaggacagggccactttggcttctggattcctgtggcagggaccttttcctaggactccctggccaatgtggggctatgaacagcactgagtatccccctaagtgaccttggggtgctctgtgaccctcagcggctgccggaaacaacatggaggacatctttgggga

SEQ ID NO: 12845 - DNA, 851 bp, Homo sapiens
atacgtgcttaatcctggtgcagggggcgagcatggccgctccgcgaggtgagccattggctggggtgtcggcgagtgtgttcgtggagcgcgtcctggggacgactcccggcattatcggccaggttgagtccgctcctggcattccgcggaaagatggtattcccactttcctgtgcggtgcagcagtatgcctgggggaagatgggttccaacagcgaagtggcgcggctgttggccagcagtgatccactggcccagatcgcagaggacaagccttatgcagagttgtggatggggactcacccccgaggggatgccaagatccttgacaaccgcatctcacagaagaccctaagccagtggattgctgagaaccaggacagcttgggctcaaaggtcaaggacacctttaatggcaacctgcccttcctcttcaaagtgctctcagttgaaacacccctgtccatccaggcacaccctaacaaggagctggcagagaagctgcacctccaggctccgcagcactaccccgatgccaaccacaagccagagatggccattgccctcacccccttccagggcttgtgtggcttccggccagttgaggagattgtaacctttctaaagaaggtgcctgagtttcagttcctgattggagatgaggcagcaacacacctgaagcagaccatgagccatgactcccaggctgtggcctcctctctgcagagctgtttctcccacctgatgaagagtgagaagaaggtggtggtggaacagctcaacctgttggtgaagcggatctcccagcaagcggctgccggaaacaacatggaggacatctttgggga

SEQ ID NO: 12846 - DNA, 6486 bp, Homo sapiens
atcctggtgcagggggcgagcatggccgctccgcgaggtgagccattggctggggtgtcggcgagtgtgttcgtggagcgcgtcctggggacgactcccggcattatcggccaggttgagtccgctcctggcattccgcggaaagatgggtgggtgccgggcagaggtgtggccacctgcgatggggattgacctccgaggggagggggcccttctagacgtcgtgccgtgggataggtaccttctgctccctccccgccaccctgcctcagatcagcacaaggtccttactgctgcccatctgacagttgggaacatcgaggcctgcagcggaggggggtctcatccaacagcctacaaaacccttatttgactctgtccccagtgagcacccccagctcttgcctggtttcccgggacactagggtggggcctgaggagtggagtggcagctgaccctgtctgtgcccctagtattcccactttcctgtgcggtgcagcagtatgcctgggggaagatgggttccaacagcgaagtggcgcggctgttggccagcagtgatccactggcccagatcgcagaggacaagccttatgcagaggtgagccccgggctgtatttcagcccactttacccgcaggtcaggagaaagggcctgaggcaagtcataagaatcagctgggaagggtgaggcagcaaggagggaggagacccacttggctcttcaggctaatggactagatagtgttatcaaaaagaagagaggttttgtcataataggctgggatttccagcactctccttcccccaaccactcttagcacttagtgaattttaattcagccctctttgacaattaagtttttttactttgactatttttttgcatttttattaacctaaaatatttctcctgcctatttagtggagaaaaagccaaagcataggaaggctttcgcctctgcttctgaaactggaagatgtatgttaacccctgaaagaatcatttaagagtcatagtttttctgctaccttgacagtgcagatgtcattctcctctttggacagacaaagaagatacatctaaagaagggaaataactagtccaagtcttcatagatggctagaggccgagtctggacaagggcctgggtctactgcctccctgtatgtccatgatggcatgaacatttgtatccagacctgggaggcctttcccaggactcagttgccctgtggggagcacagcataacggattgggacaggccaactcagggtggcaggtttcttcccccttcccctcccaagtttcctgtctttccagttgtggatggggactcacccccgaggggatgccaagatccttgacaaccgcatctcacagaagaccctaagccagtggattgctgagaaccaggacagcttgggctcaaaggtcaaggacacctttaatggcaacctgcccttcctcttcaaagtgctctcagttgaaacacccctgtccatccaggcacaccctaacaaggtaaaggacagagtgcggtgcagaggtcagggtacagaagggcttatgctaaggccctcccgtgacttttactgccacttttaccccacccatgccaggctcctgcccaaggccaaatccaggctgacaactcccaatttagctctgcaaagccagatggtagtgacacatgcagcaactaagtctaagcaaacagctcaccggcctgtgccaggggagtttctctaagctcattccaaggggcttgttcctggtcttccctcatccaacccatgtctattcatatctgccatttactcatctgctttcaggaagagttcaacttgcaaggcagggcaggtaccctcagccccacccccatggagtctccctacacaagccggagtcccatcctaagcaactgtggatcaaaactcctttttttttttttctgagacttgagtcttgctctgtcgcccaggctggagtgcagtggcgcgatctcggctcactgcaacctcctcctcccaattcaagcaattcttctgcttcagcctcgcaaatagctgggactacaggcacgcgccaccacacccagctaatttttgtatttttagtagagatggggtttcaccatgttggccaggctggtcttgaactcctgccctcgtaatccgctcgcctcagcctcccaaagtgctgggattacaggcgtgagccaccatgcccagccaaaactccttatttctagatacacaaagtaagacccagagaagggagggatttaccaaagccacacagcttgttagtgtcagagcttggtctggtatttgggtttcctgattcacaggccaagcctcttaaagtctgccccagcttttccctgatttgccccggggttgcccctgatttgcccctgccctgggttggctgagccccaagtttctgcaacatgctttgactgggctccttgccagaggtaggtagtcactgccatcctgcaactggggagggtggacagcaggggctaggtggcactggtgtacctgctaggtaatggctgtaccctcaccatcctcctcttcccctggccaccccacaggagctggcagagaagctgcacctccaggctccgcagcactaccccgatgccaaccacaagccagagatggccattgccctcacccccttccagggcttgtgtggcttccggccagttgaggagattgtaacctttctaaagagtaagttgggcagaatgctgaaggcatgcgtactgggccagggatacctggggaaccaagatgataggaacagtggctgagaacgggtcacatgtcacaggaactgaagggcctcatgaagcagtttttggagccagtgagccaggccagtgagaccaggctcaggtgtggtagtcaagggctggtggtgagtgattggtttccactgcaaagtttacttagcattgccggctctttggttagggctgggatggaaaggtgtcctccaactccccacttgtgtgggttccatcttaccattcctgatatgggccctgggccttgccttcctgtagaggtgcctgagtttcagttcctgattggagatgaggcagcaacacacctgaagcagaccatgagccatgactcccaggctgtggcctcctctctgcagagctgtttctcccacctgatgaagagtgagaagaaggtggtggtggaacagctcaacctgttggtgaagcggatctcccagcaaggtggacacagttatattcctggttgggtgcaatgctctggcctgggcttcccagcagacaccagactctggggacagttctcaacccccttgcccaagtggaacactaaaaggggccccacttagatgacctgttggcaacttagcattgcttgcctagtctttgtggagcagggcccttcttagttgagtgctgcttcccaactggtcatcttctccagatggttggaggcagactggcatagaggactcttaggatgccttccacctaggcattctgagattttccctagccctgcagctgccctccatggatggacttgtatctcggggctaaagaggcaggaaggggacacgagcatcctccctctcctggaaaggactgatgcctccagcactcagtcatttgatctttcctttaccttctgtgtgcccaaccttgtgctaagaagagttcaggaaatgactgtgatgggtgtggtcactgtcaccctaaaggtggggagtcaacacaagcagtaagaaacccaaaacagaacagactcccagcaatgagcttatgtggtgcaggcgatgaggtctcagcttcttagcctggcagccacaaccccttctctaggtggcccagagctctctttttattttacctctacaggtttcccattacctttgagccttagggcattatttatttgacccaagcatatttttttctgttcagtgtgtgtgtgtgtgtgtgtgtgtgtgtgtgtgtgtgtgtgtgtgtgtgtgtgtgtgtgtgtgtgtgtggtctctttctgttgccccaggctggagtgcagtggtgcgatcttggctcactgcagcctctgcctcccgggttcaagcaattctcctgcttcagcctcctgagtagctgggattacaggcatgtgccaccacatctggttaagtttttatattttagtagagacggagtttcaccatgttgcctaggcgggtctcgaactcctgagctcaggcaattcacctgcctcagcctcccaaagtgctaggattacaggtgtgagccaccacgccaggccccttgcctcactttaaagaagcctggctgggcacggtggctcacacctgtaatcctaacactttgggaggttgaggcggccgtatcacttgaggtcaggaattcaagaccagcctggccaacatggtggaaccccatctctactaaagatacaaaaattagccaggcgaggcagaggttgtggtgagcctagatcatgccactgcacttcagccggggcaatagagtgagactctgtctcaaaaaaaaaaaaaaaatgctgggcatggtggtgtgtgcctgtaatcccagctactcaggaggctgaggcgcaagaatcacttgaacccaggaggtggaggttgcagtgagtctagattgcaccactgcacttcagcctgggagacagagcaagactccgattcggaaaaaaaaaaaagaaaaagaaaaagaaaaaaaatttaaaaattaaagaagtccacccttgccactctacccaggctgagctcattttcccttgtcgtttccaggacacattttggccctcagcgcattctgcctcatgctctctggagcagaccgagagagattctctgagacatagaactttcttttttttttttgagacggagtctcgctgtgtcacccaggctggagtgcagtggtgcaatctcgatcactgcaacctccgcctcccgggttcaagcgattctcctgtctcagcctcccgagtagctgggattacaggcacgtgccaccacacctggctttttttttttttttttttgtatttttagtagagatggggtttcaccatgttggtcaaactggtctcgaactcctgacctcgtgatccgcctgccttggcctcccaaagtcctgagatgacaggtgtgagccaccgcgcccagctgagacacagaactttcagtgctaaaaactagaaagtcgccgggtgcggtggctcacacctgtattcccagcactttgggaggcctaggtgggaggatcccttgagttcaggagttcgagaccagcctgggcaatatagcgaccccctctctctgcaaataataaaaaacttagccgggcatggtggcatgcacgtgtggttctcgctactcaggaggctgaggtaggaggattgcttggtcctggacagttgaggctgcagtgaggtatgatcgtgccactgcactccagcctgggtgacagcgagaccccgtctcaaaaaaaaaaaagggaaagctcgggcatgttggttacccttcatgaaactcttttgcgttatctccctagattttgagctccaagggcagtggttctcatacaggggacatttggctgttgtctggagccattttttgattgtcaaaacccagataggggttgctagtggcatcttgtgggtggaggccagggaagctgctacacatccatcagtacacaggacagcccccacaataaagaattacctagcccaaatgtcagtagcgccaaggctgagaaatcccatcctgaaaggaccatactctagctcttttagtggctagtatagtcctgggcatatgaatagtcaagatatgatgaaagatggtatttgtatggactggagtatcaagcaaggctcgacccccaaagggctggaggcgtggccagaaggacagggccactttggcttctggattcctgtggcagggaccttttcctaggactccctggccaatgtggggctatgaacagcactgagtatccccctaagtgaccttggggtgctctgtgaccctcagcggctgccggaaacaacatggaggacatctttggggagcttttgctacagctgcaccagcagtacccaggtgatatcggctgctttgccatctacttcctgaacctgcttaccctgaagcctggggaggccatgtttctggaggccaacgtaccccatgcctacctgaaaggaggtgagccacatttcagcagtgagccccactgccatccctgctgggccctgtttccctatctggacaaaggaaggagaagggtggtcaaggagacccccaaggaccttgcagctctgacctctgagggttcctgggctcagcaagcaacagctggtagggatgatgaatgcatttagcattgaacacgccttgaatcctgacaccaaccctgtg

SEQ ID NO: 12847 - DNA, 1052 bp, Homo sapiens
atcctggtgcagggggcgagcatggccgctccgcgagcagtatgcctgggggaagatgggttccaacagcgaagtggcgcggctgttggccagcagtgatccactggcccagatcgcagaggacaagccttatgcagagttgtggatggggactcacccccgaggggatgccaagatccttgacaaccgcatctcacagaagaccctaagccagtggattgctgagaaccaggacagcttgggctcaaaggtcaaggacacctttaatggcaacctgcccttcctcttcaaagtgctctcagttgaaacacccctgtccatccaggcacaccctaacaaggagctggcagagaagctgcacctccaggctccgcagcactaccccgatgccaaccacaagccagagatggccattgccctcacccccttccagggcttgtgtggcttccggccagttgaggagattgtaacctttctaaagaaggtgcctgagtttcagttcctgattggagatgaggcagcaacacacctgaagcagaccatgagccatgactcccaggctgtggcctcctctctgcagagctgtttctcccacctgatgaagagtgagaagaaggtggtggtggaacagctcaacctgttggtgaagcggatctcccagcaagcggctgccggaaacaacatggaggacatctttggggagcttttgctacagctgcaccagcagtacccaggtgatatcggctgctttgccatctacttcctgaacctgcttaccctgaagcctggggaggccatgtttctggaggccaacgtaccccatgcctacctgaaaggaggtgagccacatttcagcagtgagccccactgccatccctgctgggccctgtttccctatctggacaaaggaaggagaagggtggtcaaggagacccccaaggaccttgcagctctgacctctgagggttcctgggctcagcaagcaacagctggtagggatgatgaatgcatttagcattgaacacgccttgaatcctgacaccaaccctgtg

SEQ ID NO: 12848 - DNA, 7617 bp, Homo sapiens
atacgtgcttaatcctggtgcagggggcgagcatggccgctccgcgaggtgagccattggctggggtgtcggcgagtgtgttcgtggagcgcgtcctggggacgactcccggcattatcggccaggttgagtccgctcctggcattccgcggaaagatgggtgggtgccgggcagaggtgtggccacctgcgatggggattgacctccgaggggagggggcccttctagacgtcgtgccgtgggataggtaccttctgctccctccccgccaccctgcctcagatcagcacaaggtccttactgctgcccatctgacagttgggaacatcgaggcctgcagcggaggggggtctcatccaacagcctacaaaacccttatttgactctgtccccagtgagcacccccagctcttgcctggtttcccgggacactagggtggggcctgaggagtggagtggcagctgaccctgtctgtgcccctagtattcccactttcctgtgcggtgcagcagtatgcctgggggaagatgggttccaacagcgaagtggcgcggctgttggccagcagtgatccactggcccagatcgcagaggacaagccttatgcagaggtgagccccgggctgtatttcagcccactttacccgcaggtcaggagaaagggcctgaggcaagtcataagaatcagctgggaagggtgaggcagcaaggagggaggagacccacttggctcttcaggctaatggactagatagtgttatcaaaaagaagagaggttttgtcataataggctgggatttccagcactctccttcccccaaccactcttagcacttagtgaattttaattcagccctctttgacaattaagtttttttactttgactatttttttgcatttttattaacctaaaatatttctcctgcctatttagtggagaaaaagccaaagcataggaaggctttcgcctctgcttctgaaactggaagatgtatgttaacccctgaaagaatcatttaagagtcatagtttttctgctaccttgacagtgcagatgtcattctcctctttggacagacaaagaagatacatctaaagaagggaaataactagtccaagtcttcatagatggctagaggccgagtctggacaagggcctgggtctactgcctccctgtatgtccatgatggcatgaacatttgtatccagacctgggaggcctttcccaggactcagttgccctgtggggagcacagcataacggattgggacaggccaactcagggtggcaggtttcttcccccttcccctcccaagtttcctgtctttccagttgtggatggggactcacccccgaggggatgccaagatccttgacaaccgcatctcacagaagaccctaagccagtggattgctgagaaccaggacagcttgggctcaaaggtcaaggacacctttaatggcaacctgcccttcctcttcaaagtgctctcagttgaaacacccctgtccatccaggcacaccctaacaaggtaaaggacagagtgcggtgcagaggtcagggtacagaagggcttatgctaaggccctcccgtgacttttactgccacttttaccccacccatgccaggctcctgcccaaggccaaatccaggctgacaactcccaatttagctctgcaaagccagatggtagtgacacatgcagcaactaagtctaagcaaacagctcaccggcctgtgccaggggagtttctctaagctcattccaaggggcttgttcctggtcttccctcatccaacccatgtctattcatatctgccatttactcatctgctttcaggaagagttcaacttgcaaggcagggcaggtaccctcagccccacccccatggagtctccctacacaagccggagtcccatcctaagcaactgtggatcaaaactcctttttttttttttctgagacttgagtcttgctctgtcgcccaggctggagtgcagtggcgcgatctcggctcactgcaacctcctcctcccaattcaagcaattcttctgcttcagcctcgcaaatagctgggactacaggcacgcgccaccacacccagctaatttttgtatttttagtagagatggggtttcaccatgttggccaggctggtcttgaactcctgccctcgtaatccgctcgcctcagcctcccaaagtgctgggattacaggcgtgagccaccatgcccagccaaaactccttatttctagatacacaaagtaagacccagagaagggagggatttaccaaagccacacagcttgttagtgtcagagcttggtctggtatttgggtttcctgattcacaggccaagcctcttaaagtctgccccagcttttccctgatttgccccggggttgcccctgatttgcccctgccctgggttggctgagccccaagtttctgcaacatgctttgactgggctccttgccagaggtaggtagtcactgccatcctgcaactggggagggtggacagcaggggctaggtggcactggtgtacctgctaggtaatggctgtaccctcaccatcctcctcttcccctggccaccccacaggagctggcagagaagctgcacctccaggctccgcagcactaccccgatgccaaccacaagccagagatggccattgccctcacccccttccagggcttgtgtggcttccggccagttgaggagattgtaacctttctaaagagtaagttgggcagaatgctgaaggcatgcgtactgggccagggatacctggggaaccaagatgataggaacagtggctgagaacgggtcacatgtcacaggaactgaagggcctcatgaagcagtttttggagccagtgagccaggccagtgagaccaggctcaggtgtggtagtcaagggctggtggtgagtgattggtttccactgcaaagtttacttagcattgccggctctttggttagggctgggatggaaaggtgtcctccaactccccacttgtgtgggttccatcttaccattcctgatatgggccctgggccttgccttcctgtagaggtgcctgagtttcagttcctgattggagatgaggcagcaacacacctgaagcagaccatgagccatgactcccaggctgtggcctcctctctgcagagctgtttctcccacctgatgaagagtgagaagaaggtggtggtggaacagctcaacctgttggtgaagcggatctcccagcaaggtggacacagttatattcctggttgggtgcaatgctctggcctgggcttcccagcagacaccagactctggggacagttctcaacccccttgcccaagtggaacactaaaaggggccccacttagatgacctgttggcaacttagcattgcttgcctagtctttgtggagcagggcccttcttagttgagtgctgcttcccaactggtcatcttctccagatggttggaggcagactggcatagaggactcttaggatgccttccacctaggcattctgagattttccctagccctgcagctgccctccatggatggacttgtatctcggggctaaagaggcaggaaggggacacgagcatcctccctctcctggaaaggactgatgcctccagcactcagtcatttgatctttcctttaccttctgtgtgcccaaccttgtgctaagaagagttcaggaaatgactgtgatgggtgtggtcactgtcaccctaaaggtggggagtcaacacaagcagtaagaaacccaaaacagaacagactcccagcaatgagcttatgtggtgcaggcgatgaggtctcagcttcttagcctggcagccacaaccccttctctaggtggcccagagctctctttttattttacctctacaggtttcccattacctttgagccttagggcattatttatttgacccaagcatatttttttctgttcagtgtgtgtgtgtgtgtgtgtgtgtgtgtgtgtgtgtgtgtgtgtgtgtgtgtgtgtgtgtgtgtgtgtggtctctttctgttgccccaggctggagtgcagtggtgcgatcttggctcactgcagcctctgcctcccgggttcaagcaattctcctgcttcagcctcctgagtagctgggattacaggcatgtgccaccacatctggttaagtttttatattttagtagagacggagtttcaccatgttgcctaggcgggtctcgaactcctgagctcaggcaattcacctgcctcagcctcccaaagtgctaggattacaggtgtgagccaccacgccaggccccttgcctcactttaaagaagcctggctgggcacggtggctcacacctgtaatcctaacactttgggaggttgaggcggccgtatcacttgaggtcaggaattcaagaccagcctggccaacatggtggaaccccatctctactaaagatacaaaaattagccaggcgaggcagaggttgtggtgagcctagatcatgccactgcacttcagccggggcaatagagtgagactctgtctcaaaaaaaaaaaaaaaatgctgggcatggtggtgtgtgcctgtaatcccagctactcaggaggctgaggcgcaagaatcacttgaacccaggaggtggaggttgcagtgagtctagattgcaccactgcacttcagcctgggagacagagcaagactccgattcggaaaaaaaaaaaagaaaaagaaaaagaaaaaaaatttaaaaattaaagaagtccacccttgccactctacccaggctgagctcattttcccttgtcgtttccaggacacattttggccctcagcgcattctgcctcatgctctctggagcagaccgagagagattctctgagacatagaactttcttttttttttttgagacggagtctcgctgtgtcacccaggctggagtgcagtggtgcaatctcgatcactgcaacctccgcctcccgggttcaagcgattctcctgtctcagcctcccgagtagctgggattacaggcacgtgccaccacacctggctttttttttttttttttttgtatttttagtagagatggggtttcaccatgttggtcaaactggtctcgaactcctgacctcgtgatccgcctgccttggcctcccaaagtcctgagatgacaggtgtgagccaccgcgcccagctgagacacagaactttcagtgctaaaaactagaaagtcgccgggtgcggtggctcacacctgtattcccagcactttgggaggcctaggtgggaggatcccttgagttcaggagttcgagaccagcctgggcaatatagcgaccccctctctctgcaaataataaaaaacttagccgggcatggtggcatgcacgtgtggttctcgctactcaggaggctgaggtaggaggattgcttggtcctggacagttgaggctgcagtgaggtatgatcgtgccactgcactccagcctgggtgacagcgagaccccgtctcaaaaaaaaaaaagggaaagctcgggcatgttggttacccttcatgaaactcttttgcgttatctccctagattttgagctccaagggcagtggttctcatacaggggacatttggctgttgtctggagccattttttgattgtcaaaacccagataggggttgctagtggcatcttgtgggtggaggccagggaagctgctacacatccatcagtacacaggacagcccccacaataaagaattacctagcccaaatgtcagtagcgccaaggctgagaaatcccatcctgaaaggaccatactctagctcttttagtggctagtatagtcctgggcatatgaatagtcaagatatgatgaaagatggtatttgtatggactggagtatcaagcaaggctcgacccccaaagggctggaggcgtggccagaaggacagggccactttggcttctggattcctgtggcagggaccttttcctaggactccctggccaatgtggggctatgaacagcactgagtatccccctaagtgaccttggggtgctctgtgaccctcagcggctgccggaaacaacatggaggacatctttggggagcttttgctacagctgcaccagcagtacccaggtgatatcggctgctttgccatctacttcctgaacctgcttaccctgaagcctggggaggccatgtttctggaggccaacgtaccccatgcctacctgaaaggaggtgagccacatttcagcagtgagccccactgccatccctgctgggccctgtttccctatctggacaaaggaaggagaagggtggtcaaggagacccccaaggaccttgcagctctgacctctgagggttcctgggctcagcaagcaacagctggtagggatgatgaatgcatttagcattgaacacgccttgaatcctgacaccaaccctgtgatgccatgctactctgattttaagtcctgccagtcagtgtgggaaccacaatttgaacgcaggctatattggatcaaagctgttgttctgtcacagcctttgtatgtctgtcctacctaccagggatttttacactaaaatatgcatgttgccatggaaggatgccacctttcgactgttggctgcttatccacacatgcctcatgcacaggattctggggtagaagtgggagactacagagttggggctccccaacccccaggggttaacatgactcccctctgacaataatgggtgacctgtcacctgtttttggtatttgatatcttaaccccattctcccagagaatacaattcatggaaatttttacctaacttggcatggggttcatggagctcaggttaggaggcccagaactggagagctaaggcatacttcatcagcttagcacatgacgactgtctctccagactgcgtggagtgcatggcgtgttcagacaacacagttcgtgctggcctgacacccaagttcattgatgtgccaaccctgtgtgaaatgctcagctatacccctagctccagcaaggacaggctctttctcccaacacggagtcaggaagacccctacctctcaatctatgacccccctgtaccagacttcaccattatgaagacggaggtgagtgaggggctatgatgggtgtccttcgtgtgccatgaaaatctctggcaagggtcacgatgtggaggacacctggggctgggtttcctgtcaagcccacttggcggagggtggccccagggcctgcccattccttcctgtaccagggaccaggcctctatgctgactgagcctgggttgtgcgagaaggtggcagagctctccctcgtgccctggggactgtcctgggcccatgagctgatgagagcagagtctgagctgcactgccttatcatttcttcctgcccaggtccctggctctgtcactgaatacaaggtcttggcactggactctgccagcatcctcctgatggtacaggggacagtaatagccagcacacccacaacccagacaccaatccctctgcaacgtggtggcgtgctcttcattggggcc

SEQ ID NO: 12849 - DNA, 407 bp, Homo sapiens
atacgtgcttaatcctggtgcagggggcgagcatggccgctccgcgagtattcccactttcctgtgcggtgcagcagtatgcctgggggaagatgggttccaacagcgaagtggcgcggctgttggccagcagtgatccactggcccagatcgcagaggacaagccttatgcagagttgtggatggggactcacccccgaggggatgccaagatccttgacaaccgcatctcacagaagaccctaagccagtggattgctgagaaccaggacagcttgggctcaaaggtcttggcactggactctgccagcatcctcctgatggtacaggggacagtaatagccagcacacccacaacccagacaccaatccctctgcaacgtggtggcgtgctcttcattggggcc

SEQ ID NO: 12850 - DNA, 6889 bp, Homo sapiens
atacgtgcttaatcctggtgcagggggcgagcatggccgctccgcgaggtgagccattggctggggtgtcggcgagtgtgttcgtggagcgcgtcctggggacgactcccggcattatcggccaggttgagtccgctcctggcattccgcggaaagatgggtgggtgccgggcagaggtgtggccacctgcgatggggattgacctccgaggggagggggcccttctagacgtcgtgccgtgggataggtaccttctgctccctccccgccaccctgcctcagatcagcacaaggtccttactgctgcccatctgacagttgggaacatcgaggcctgcagcggaggggggtctcatccaacagcctacaaaacccttatttgactctgtccccagtgagcacccccagctcttgcctggtttcccgggacactagggtggggcctgaggagtggagtggcagctgaccctgtctgtgcccctagtattcccactttcctgtgcggtgcagcagtatgcctgggggaagatgggttccaacagcgaagtggcgcggctgttggccagcagtgatccactggcccagatcgcagaggacaagccttatgcagaggtgagccccgggctgtatttcagcccactttacccgcaggtcaggagaaagggcctgaggcaagtcataagaatcagctgggaagggtgaggcagcaaggagggaggagacccacttggctcttcaggctaatggactagatagtgttatcaaaaagaagagaggttttgtcataataggctgggatttccagcactctccttcccccaaccactcttagcacttagtgaattttaattcagccctctttgacaattaagtttttttactttgactatttttttgcatttttattaacctaaaatatttctcctgcctatttagtggagaaaaagccaaagcataggaaggctttcgcctctgcttctgaaactggaagatgtatgttaacccctgaaagaatcatttaagagtcatagtttttctgctaccttgacagtgcagatgtcattctcctctttggacagacaaagaagatacatctaaagaagggaaataactagtccaagtcttcatagatggctagaggccgagtctggacaagggcctgggtctactgcctccctgtatgtccatgatggcatgaacatttgtatccagacctgggaggcctttcccaggactcagttgccctgtggggagcacagcataacggattgggacaggccaactcagggtggcaggtttcttcccccttcccctcccaagtttcctgtctttccagttgtggatggggactcacccccgaggggatgccaagatccttgacaaccgcatctcacagaagaccctaagccagtggattgctgagaaccaggacagcttgggctcaaaggtcaaggacacctttaatggcaacctgcccttcctcttcaaagtgctctcagttgaaacacccctgtccatccaggcacaccctaacaaggtaaaggacagagtgcggtgcagaggtcagggtacagaagggcttatgctaaggccctcccgtgacttttactgccacttttaccccacccatgccaggctcctgcccaaggccaaatccaggctgacaactcccaatttagctctgcaaagccagatggtagtgacacatgcagcaactaagtctaagcaaacagctcaccggcctgtgccaggggagtttctctaagctcattccaaggggcttgttcctggtcttccctcatccaacccatgtctattcatatctgccatttactcatctgctttcaggaagagttcaacttgcaaggcagggcaggtaccctcagccccacccccatggagtctccctacacaagccggagtcccatcctaagcaactgtggatcaaaactcctttttttttttttctgagacttgagtcttgctctgtcgcccaggctggagtgcagtggcgcgatctcggctcactgcaacctcctcctcccaattcaagcaattcttctgcttcagcctcgcaaatagctgggactacaggcacgcgccaccacacccagctaatttttgtatttttagtagagatggggtttcaccatgttggccaggctggtcttgaactcctgccctcgtaatccgctcgcctcagcctcccaaagtgctgggattacaggcgtgagccaccatgcccagccaaaactccttatttctagatacacaaagtaagacccagagaagggagggatttaccaaagccacacagcttgttagtgtcagagcttggtctggtatttgggtttcctgattcacaggccaagcctcttaaagtctgccccagcttttccctgatttgccccggggttgcccctgatttgcccctgccctgggttggctgagccccaagtttctgcaacatgctttgactgggctccttgccagaggtaggtagtcactgccatcctgcaactggggagggtggacagcaggggctaggtggcactggtgtacctgctaggtaatggctgtaccctcaccatcctcctcttcccctggccaccccacaggagctggcagagaagctgcacctccaggctccgcagcactaccccgatgccaaccacaagccagagatggccattgccctcacccccttccagggcttgtgtggcttccggccagttgaggagattgtaacctttctaaagagtaagttgggcagaatgctgaaggcatgcgtactgggccagggatacctggggaaccaagatgataggaacagtggctgagaacgggtcacatgtcacaggaactgaagggcctcatgaagcagtttttggagccagtgagccaggccagtgagaccaggctcaggtgtggtagtcaagggctggtggtgagtgattggtttccactgcaaagtttacttagcattgccggctctttggttagggctgggatggaaaggtgtcctccaactccccacttgtgtgggttccatcttaccattcctgatatgggccctgggccttgccttcctgtagaggtgcctgagtttcagttcctgattggagatgaggcagcaacacacctgaagcagaccatgagccatgactcccaggctgtggcctcctctctgcagagctgtttctcccacctgatgaagagtgagaagaaggtggtggtggaacagctcaacctgttggtgaagcggatctcccagcaaggtggacacagttatattcctggttgggtgcaatgctctggcctgggcttcccagcagacaccagactctggggacagttctcaacccccttgcccaagtggaacactaaaaggggccccacttagatgacctgttggcaacttagcattgcttgcctagtctttgtggagcagggcccttcttagttgagtgctgcttcccaactggtcatcttctccagatggttggaggcagactggcatagaggactcttaggatgccttccacctaggcattctgagattttccctagccctgcagctgccctccatggatggacttgtatctcggggctaaagaggcaggaaggggacacgagcatcctccctctcctggaaaggactgatgcctccagcactcagtcatttgatctttcctttaccttctgtgtgcccaaccttgtgctaagaagagttcaggaaatgactgtgatgggtgtggtcactgtcaccctaaaggtggggagtcaacacaagcagtaagaaacccaaaacagaacagactcccagcaatgagcttatgtggtgcaggcgatgaggtctcagcttcttagcctggcagccacaaccccttctctaggtggcccagagctctctttttattttacctctacaggtttcccattacctttgagccttagggcattatttatttgacccaagcatatttttttctgttcagtgtgtgtgtgtgtgtgtgtgtgtgtgtgtgtgtgtgtgtgtgtgtgtgtgtgtgtgtgtgtgtgtgtggtctctttctgttgccccaggctggagtgcagtggtgcgatcttggctcactgcagcctctgcctcccgggttcaagcaattctcctgcttcagcctcctgagtagctgggattacaggcatgtgccaccacatctggttaagtttttatattttagtagagacggagtttcaccatgttgcctaggcgggtctcgaactcctgagctcaggcaattcacctgcctcagcctcccaaagtgctaggattacaggtgtgagccaccacgccaggccccttgcctcactttaaagaagcctggctgggcacggtggctcacacctgtaatcctaacactttgggaggttgaggcggccgtatcacttgaggtcaggaattcaagaccagcctggccaacatggtggaaccccatctctactaaagatacaaaaattagccaggcgaggcagaggttgtggtgagcctagatcatgccactgcacttcagccggggcaatagagtgagactctgtctcaaaaaaaaaaaaaaaatgctgggcatggtggtgtgtgcctgtaatcccagctactcaggaggctgaggcgcaagaatcacttgaacccaggaggtggaggttgcagtgagtctagattgcaccactgcacttcagcctgggagacagagcaagactccgattcggaaaaaaaaaaaagaaaaagaaaaagaaaaaaaatttaaaaattaaagaagtccacccttgccactctacccaggctgagctcattttcccttgtcgtttccaggacacattttggccctcagcgcattctgcctcatgctctctggagcagaccgagagagattctctgagacatagaactttcttttttttttttgagacggagtctcgctgtgtcacccaggctggagtgcagtggtgcaatctcgatcactgcaacctccgcctcccgggttcaagcgattctcctgtctcagcctcccgagtagctgggattacaggcacgtgccaccacacctggctttttttttttttttttttgtatttttagtagagatggggtttcaccatgttggtcaaactggtctcgaactcctgacctcgtgatccgcctgccttggcctcccaaagtcctgagatgacaggtgtgagccaccgcgcccagctgagacacagaactttcagtgctaaaaactagaaagtcgccgggtgcggtggctcacacctgtattcccagcactttgggaggcctaggtgggaggatcccttgagttcaggagttcgagaccagcctgggcaatatagcgaccccctctctctgcaaataataaaaaacttagccgggcatggtggcatgcacgtgtggttctcgctactcaggaggctgaggtaggaggattgcttggtcctggacagttgaggctgcagtgaggtatgatcgtgccactgcactccagcctgggtgacagcgagaccccgtctcaaaaaaaaaaaagggaaagctcgggcatgttggttacccttcatgaaactcttttgcgttatctccctagattttgagctccaagggcagtggttctcatacaggggacatttggctgttgtctggagccattttttgattgtcaaaacccagataggggttgctagtggcatcttgtgggtggaggccagggaagctgctacacatccatcagtacacaggacagcccccacaataaagaattacctagcccaaatgtcagtagcgccaaggctgagaaatcccatcctgaaaggaccatactctagctcttttagtggctagtatagtcctgggcatatgaatagtcaagatatgatgaaagatggtatttgtatggactggagtatcaagcaaggctcgacccccaaagggctggaggcgtggccagaaggacagggccactttggcttctggattcctgtggcagggaccttttcctaggactccctggccaatgtggggctatgaacagcactgagtatccccctaagtgaccttggggtgctctgtgaccctcagcggctgccggaaacaacatggaggacatctttggggagcttttgctacagctgcaccagcagtacccaggtgatatcggctgctttgccatctacttcctgaacctgcttaccctgaagcctggggaggccatgtttctggaggccaacgtaccccatgcctacctgaaaggaggtgagccacatttcagcagtgagccccactgccatccctgctgggccctgtttccctatctggacaaaggaaggagaagggtggtcaaggagacccccaaggaccttgcagctctgacctctgagggttcctgggctcagcaagcaacagctggtagggatgatgaatgcatttagcattgaacacgccttgaatcctgacaccaaccctgtgatgccatgctactctgattttaagtcctgccagtcagtgtgggaaccacaatttgaacgcaggctatattggatcaaagctgttgttctgtcacagcctttgtatgtctgtcctacctaccagggatttttacactaaaatatgcatgttgccatggaaggatgccacctttcgactgttggctgcttatccacacatgcctcatgcacaggattctggggtagaagtgggagactacagagttggggctccccaacccccaggggttaacatgactcccctctgacaataatgggtgacctgtcacctgtttttggtatttgatatcttaaccccattctcccagagaatacaattcatggaaatttttacctaacttggcatggggttca

SEQ ID NO: 12851 - DNA, 1481 bp, Homo sapiens
atacgtgcttaatcctggtgcagggggcgagcatggccgctccgcgagtattcccactttcctgtgcggtgcagcagtatgcctgggggaagatgggttccaacagcgaagtggcgcggctgttggccagcagtgatccactggcccagatcgcagaggacaagccttatgcagagttgtggatggggactcacccccgaggggatgccaagatccttgacaaccgcatctcacagaagaccctaagccagtggattgctgagaaccaggacagcttgggctcaaaggtcaaggacacctttaatggcaacctgcccttcctcttcaaagtgctctcagttgaaacacccctgtccatccaggcacaccctaacaaggagctggcagagaagctgcacctccaggctccgcagcactaccccgatgccaaccacaagccagagatggccattgccctcacccccttccagggcttgtgtggcttccggccagttgaggagattgtaacctttctaaagaaggtgcctgagtttcagttcctgattggagatgaggcagcaacacacctgaagcagaccatgagccatgactcccaggctgtggcctcctctctgcagagctgtttctcccacctgatgaagagtgagaagaaggtggtggtggaacagctcaacctgttggtgaagcggatctcccagcaagcggctgccggaaacaacatggaggacatctttggggagcttttgctacagctgcaccagcagtacccaggtgatatcggctgctttgccatctacttcctgaacctgcttaccctgaagcctggggaggccatgtttctggaggccaacgtaccccatgcctacctgaaaggaggtgagccacatttcagcagtgagccccactgccatccctgctgggccctgtttccctatctggacaaaggaaggagaagggtggtcaaggagacccccaaggaccttgcagctctgacctctgagggttcctgggctcagcaagcaacagctggtagggatgatgaatgcatttagcattgaacacgccttgaatcctgacaccaaccctgtgatgccatgctactctgattttaagtcctgccagtcagtgtgggaaccacaatttgaacgcaggctatattggatcaaagctgttgttctgtcacagcctttgtatgtctgtcctacctaccagggatttttacactaaaatatgcatgttgccatggaaggatgccacctttcgactgttggctgcttatccacacatgcctcatgcacaggattctggggtagaagtgggagactacagagttggggctccccaacccccaggggttaacatgactcccctctgacaataatgggtgacctgtcacctgtttttggtatttgatatcttaaccccattctcccagagaatacaattcatggaaatttttacctaacttggcatggggttca

SEQ ID NO: 12852 - DNA, 8003 bp, Homo sapiens
atacgtgcttaatcctggtgcagggggcgagcatggccgctccgcgaggtgagccattggctggggtgtcggcgagtgtgttcgtggagcgcgtcctggggacgactcccggcattatcggccaggttgagtccgctcctggcattccgcggaaagatgggtgggtgccgggcagaggtgtggccacctgcgatggggattgacctccgaggggagggggcccttctagacgtcgtgccgtgggataggtaccttctgctccctccccgccaccctgcctcagatcagcacaaggtccttactgctgcccatctgacagttgggaacatcgaggcctgcagcggaggggggtctcatccaacagcctacaaaacccttatttgactctgtccccagtgagcacccccagctcttgcctggtttcccgggacactagggtggggcctgaggagtggagtggcagctgaccctgtctgtgcccctagtattcccactttcctgtgcggtgcagcagtatgcctgggggaagatgggttccaacagcgaagtggcgcggctgttggccagcagtgatccactggcccagatcgcagaggacaagccttatgcagaggtgagccccgggctgtatttcagcccactttacccgcaggtcaggagaaagggcctgaggcaagtcataagaatcagctgggaagggtgaggcagcaaggagggaggagacccacttggctcttcaggctaatggactagatagtgttatcaaaaagaagagaggttttgtcataataggctgggatttccagcactctccttcccccaaccactcttagcacttagtgaattttaattcagccctctttgacaattaagtttttttactttgactatttttttgcatttttattaacctaaaatatttctcctgcctatttagtggagaaaaagccaaagcataggaaggctttcgcctctgcttctgaaactggaagatgtatgttaacccctgaaagaatcatttaagagtcatagtttttctgctaccttgacagtgcagatgtcattctcctctttggacagacaaagaagatacatctaaagaagggaaataactagtccaagtcttcatagatggctagaggccgagtctggacaagggcctgggtctactgcctccctgtatgtccatgatggcatgaacatttgtatccagacctgggaggcctttcccaggactcagttgccctgtggggagcacagcataacggattgggacaggccaactcagggtggcaggtttcttcccccttcccctcccaagtttcctgtctttccagttgtggatggggactcacccccgaggggatgccaagatccttgacaaccgcatctcacagaagaccctaagccagtggattgctgagaaccaggacagcttgggctcaaaggtcaaggacacctttaatggcaacctgcccttcctcttcaaagtgctctcagttgaaacacccctgtccatccaggcacaccctaacaaggtaaaggacagagtgcggtgcagaggtcagggtacagaagggcttatgctaaggccctcccgtgacttttactgccacttttaccccacccatgccaggctcctgcccaaggccaaatccaggctgacaactcccaatttagctctgcaaagccagatggtagtgacacatgcagcaactaagtctaagcaaacagctcaccggcctgtgccaggggagtttctctaagctcattccaaggggcttgttcctggtcttccctcatccaacccatgtctattcatatctgccatttactcatctgctttcaggaagagttcaacttgcaaggcagggcaggtaccctcagccccacccccatggagtctccctacacaagccggagtcccatcctaagcaactgtggatcaaaactcctttttttttttttctgagacttgagtcttgctctgtcgcccaggctggagtgcagtggcgcgatctcggctcactgcaacctcctcctcccaattcaagcaattcttctgcttcagcctcgcaaatagctgggactacaggcacgcgccaccacacccagctaatttttgtatttttagtagagatggggtttcaccatgttggccaggctggtcttgaactcctgccctcgtaatccgctcgcctcagcctcccaaagtgctgggattacaggcgtgagccaccatgcccagccaaaactccttatttctagatacacaaagtaagacccagagaagggagggatttaccaaagccacacagcttgttagtgtcagagcttggtctggtatttgggtttcctgattcacaggccaagcctcttaaagtctgccccagcttttccctgatttgccccggggttgcccctgatttgcccctgccctgggttggctgagccccaagtttctgcaacatgctttgactgggctccttgccagaggtaggtagtcactgccatcctgcaactggggagggtggacagcaggggctaggtggcactggtgtacctgctaggtaatggctgtaccctcaccatcctcctcttcccctggccaccccacaggagctggcagagaagctgcacctccaggctccgcagcactaccccgatgccaaccacaagccagagatggccattgccctcacccccttccagggcttgtgtggcttccggccagttgaggagattgtaacctttctaaagagtaagttgggcagaatgctgaaggcatgcgtactgggccagggatacctggggaaccaagatgataggaacagtggctgagaacgggtcacatgtcacaggaactgaagggcctcatgaagcagtttttggagccagtgagccaggccagtgagaccaggctcaggtgtggtagtcaagggctggtggtgagtgattggtttccactgcaaagtttacttagcattgccggctctttggttagggctgggatggaaaggtgtcctccaactccccacttgtgtgggttccatcttaccattcctgatatgggccctgggccttgccttcctgtagaggtgcctgagtttcagttcctgattggagatgaggcagcaacacacctgaagcagaccatgagccatgactcccaggctgtggcctcctctctgcagagctgtttctcccacctgatgaagagtgagaagaaggtggtggtggaacagctcaacctgttggtgaagcggatctcccagcaaggtggacacagttatattcctggttgggtgcaatgctctggcctgggcttcccagcagacaccagactctggggacagttctcaacccccttgcccaagtggaacactaaaaggggccccacttagatgacctgttggcaacttagcattgcttgcctagtctttgtggagcagggcccttcttagttgagtgctgcttcccaactggtcatcttctccagatggttggaggcagactggcatagaggactcttaggatgccttccacctaggcattctgagattttccctagccctgcagctgccctccatggatggacttgtatctcggggctaaagaggcaggaaggggacacgagcatcctccctctcctggaaaggactgatgcctccagcactcagtcatttgatctttcctttaccttctgtgtgcccaaccttgtgctaagaagagttcaggaaatgactgtgatgggtgtggtcactgtcaccctaaaggtggggagtcaacacaagcagtaagaaacccaaaacagaacagactcccagcaatgagcttatgtggtgcaggcgatgaggtctcagcttcttagcctggcagccacaaccccttctctaggtggcccagagctctctttttattttacctctacaggtttcccattacctttgagccttagggcattatttatttgacccaagcatatttttttctgttcagtgtgtgtgtgtgtgtgtgtgtgtgtgtgtgtgtgtgtgtgtgtgtgtgtgtgtgtgtgtgtgtgtgtggtctctttctgttgccccaggctggagtgcagtggtgcgatcttggctcactgcagcctctgcctcccgggttcaagcaattctcctgcttcagcctcctgagtagctgggattacaggcatgtgccaccacatctggttaagtttttatattttagtagagacggagtttcaccatgttgcctaggcgggtctcgaactcctgagctcaggcaattcacctgcctcagcctcccaaagtgctaggattacaggtgtgagccaccacgccaggccccttgcctcactttaaagaagcctggctgggcacggtggctcacacctgtaatcctaacactttgggaggttgaggcggccgtatcacttgaggtcaggaattcaagaccagcctggccaacatggtggaaccccatctctactaaagatacaaaaattagccaggcgaggcagaggttgtggtgagcctagatcatgccactgcacttcagccggggcaatagagtgagactctgtctcaaaaaaaaaaaaaaaatgctgggcatggtggtgtgtgcctgtaatcccagctactcaggaggctgaggcgcaagaatcacttgaacccaggaggtggaggttgcagtgagtctagattgcaccactgcacttcagcctgggagacagagcaagactccgattcggaaaaaaaaaaaagaaaaagaaaaagaaaaaaaatttaaaaattaaagaagtccacccttgccactctacccaggctgagctcattttcccttgtcgtttccaggacacattttggccctcagcgcattctgcctcatgctctctggagcagaccgagagagattctctgagacatagaactttcttttttttttttgagacggagtctcgctgtgtcacccaggctggagtgcagtggtgcaatctcgatcactgcaacctccgcctcccgggttcaagcgattctcctgtctcagcctcccgagtagctgggattacaggcacgtgccaccacacctggctttttttttttttttttttgtatttttagtagagatggggtttcaccatgttggtcaaactggtctcgaactcctgacctcgtgatccgcctgccttggcctcccaaagtcctgagatgacaggtgtgagccaccgcgcccagctgagacacagaactttcagtgctaaaaactagaaagtcgccgggtgcggtggctcacacctgtattcccagcactttgggaggcctaggtgggaggatcccttgagttcaggagttcgagaccagcctgggcaatatagcgaccccctctctctgcaaataataaaaaacttagccgggcatggtggcatgcacgtgtggttctcgctactcaggaggctgaggtaggaggattgcttggtcctggacagttgaggctgcagtgaggtatgatcgtgccactgcactccagcctgggtgacagcgagaccccgtctcaaaaaaaaaaaagggaaagctcgggcatgttggttacccttcatgaaactcttttgcgttatctccctagattttgagctccaagggcagtggttctcatacaggggacatttggctgttgtctggagccattttttgattgtcaaaacccagataggggttgctagtggcatcttgtgggtggaggccagggaagctgctacacatccatcagtacacaggacagcccccacaataaagaattacctagcccaaatgtcagtagcgccaaggctgagaaatcccatcctgaaaggaccatactctagctcttttagtggctagtatagtcctgggcatatgaatagtcaagatatgatgaaagatggtatttgtatggactggagtatcaagcaaggctcgacccccaaagggctggaggcgtggccagaaggacagggccactttggcttctggattcctgtggcagggaccttttcctaggactccctggccaatgtggggctatgaacagcactgagtatccccctaagtgaccttggggtgctctgtgaccctcagcggctgccggaaacaacatggaggacatctttggggagcttttgctacagctgcaccagcagtacccaggtgatatcggctgctttgccatctacttcctgaacctgcttaccctgaagcctggggaggccatgtttctggaggccaacgtaccccatgcctacctgaaaggaggtgagccacatttcagcagtgagccccactgccatccctgctgggccctgtttccctatctggacaaaggaaggagaagggtggtcaaggagacccccaaggaccttgcagctctgacctctgagggttcctgggctcagcaagcaacagctggtagggatgatgaatgcatttagcattgaacacgccttgaatcctgacaccaaccctgtgatgccatgctactctgattttaagtcctgccagtcagtgtgggaaccacaatttgaacgcaggctatattggatcaaagctgttgttctgtcacagcctttgtatgtctgtcctacctaccagggatttttacactaaaatatgcatgttgccatggaaggatgccacctttcgactgttggctgcttatccacacatgcctcatgcacaggattctggggtagaagtgggagactacagagttggggctccccaacccccaggggttaacatgactcccctctgacaataatgggtgacctgtcacctgtttttggtatttgatatcttaaccccattctcccagagaatacaattcatggaaatttttacctaacttggcatggggttcatggagctcaggttaggaggcccagaactggagagctaaggcatacttcatcagcttagcacatgacgactgtctctccagactgcgtggagtgcatggcgtgttcagacaacacagttcgtgctggcctgacacccaagttcattgatgtgccaaccctgtgtgaaatgctcagctatacccctagctccagcaaggacaggctctttctcccaacacggagtcaggaagacccctacctctcaatctatgacccccctgtaccagacttcaccattatgaagacggaggtgagtgaggggctatgatgggtgtccttcgtgtgccatgaaaatctctggcaagggtcacgatgtggaggacacctggggctgggtttcctgtcaagcccacttggcggagggtggccccagggcctgcccattccttcctgtaccagggaccaggcctctatgctgactgagcctgggttgtgcgagaaggtggcagagctctccctcgtgccctggggactgtcctgggcccatgagctgatgagagcagagtctgagctgcactgccttatcatttcttcctgcccaggtccctggctctgtcactgaatacaaggtcttggcactggactctgccagcatcctcctgatggtacaggggacagtaatagccagcacacccacaacccagacaccaatccctctgcaacgtggtggcgtgctcttcattggggccaatgagagtgtctcactgaagcttactgagccgaaggacctgctgatattccgtgcctgctgtctgctgtaaaggctgcagcctccccagctctcctctgccagccaccctaaattccagccaacctcacctcctcgggcccagctcaagcccccttccttgctctggaccccttaggtataccctggaagagctggggtgggggaggagggagcgtgaaggtagtgactcctgaacacacccaggtggaaccatctttggggaggagaggcccgtgtgaggggtctgatactccctttgtcttccctctctactcctcgctacacctgagccaggctcttgccaactctgttccagcctatggctttaggctagctgttaaatat

SEQ ID NO: 12853 - DNA, 1707 bp, Homo sapiens
atacgtgcttaatcctggtgcagggggcgagcatggccgctccgcgagtgagcacccccagctcttgcctggtttcccgggacactagggtggggcctgaggagtggagtggcagctgaccctgtctgtgcccctagtattcccactttcctgtgcggtgcagcagtatgcctgggggaagatgggttccaacagcgaagtggcgcggctgttggccagcagtgatccactggcccagatcgcagaggacaagccttatgcagagttgtggatggggactcacccccgaggggatgccaagatccttgacaaccgcatctcacagaagaccctaagccagtggattgctgagaaccaggacagcttgggctcaaaggtcaaggacacctttaatggcaacctgcccttcctcttcaaagtgctctcagttgaaacacccctgtccatccaggcacaccctaacaaggagctggcagagaagctgcacctccaggctccgcagcactaccccgatgccaaccacaagccagagatggccattgccctcacccccttccagggcttgtgtggcttccggccagttgaggagattgtaacctttctaaagaaggtgcctgagtttcagttcctgattggagatgaggcagcaacacacctgaagcagaccatgagccatgactcccaggctgtggcctcctctctgcagagctgtttctcccacctgatgaagagtgagaagaaggtggtggtggaacagctcaacctgttggtgaagcggatctcccagcaagcggctgccggaaacaacatggaggacatctttggggagcttttgctacagctgcaccagcagtacccaggtgatatcggctgctttgccatctacttcctgaacctgcttaccctgaagcctggggaggccatgtttctggaggccaacgtaccccatgcctacctgaaaggagactgcgtggagtgcatggcgtgttcagacaacacagttcgtgctggcctgacacccaagttcattgatgtgccaaccctgtgtgaaatgctcagctatacccctagctccagcaaggacaggctctttctcccaacacggagtcaggaagacccctacctctcaatctatgacccccctgtaccagacttcaccattatgaagacggaggtccctggctctgtcactgaatacaaggtcttggcactggactctgccagcatcctcctgatggtacaggggacagtaatagccagcacacccacaacccagacaccaatccctctgcaacgtggtggcgtgctcttcattggggccaatgagagtgtctcactgaagcttactgagccgaaggacctgctgatattccgtgcctgctgtctgctgtaaaggctgcagcctccccagctctcctctgccagccaccctaaattccagccaacctcacctcctcgggcccagctcaagcccccttccttgctctggaccccttaggtataccctggaagagctggggtgggggaggagggagcgtgaaggtagtgactcctgaacacacccaggtggaaccatctttggggaggagaggcccgtgtgaggggtctgatactccctttgtcttccctctctactcctcgctacacctgagccaggctcttgccaactctgttccagcctatggctttaggctagctgttaaatat
